United States Patent Application Publication US 2026/0092266 A1 - sequence listing, part 28

SEQ ID NO: 5230 - protein, 1070 aa, synthetic construct
  REGION 1..1070: note = Synthetic
MGEEINYSLGLDIGIASVGWSVINLDVNRIEDLGVRIFNAAENPKDGASLALPRRSARGRRRLLRRKAYRVKRVKNFIMARKILSEDKLKNLFINKNVISVWEARVKGLNEKLSEEEWSKILINLCKRRGFKSNRKNEAKNKETGQILSSINNNLEKMKEVNARTVGEFIYNEVKSSKDRYKALRNKFGEYNMCVSRDIIREEIHTLFEKQREFENEFAADELEDEYLAIFDSQRPYSKFEDLEKLVGFCTFEKKKYKRAPKNCISSEEFVLYEGINKLSIMNNGDRRKLTNDERELIVNEAFKKKEIKYTNLRKLLNLKEEDRFLTLTYSIDKDTYKTENTKFISLKGYHEIRKSIEYGVSKMYWQEIKNNRKMLNDIAYVLTLGKTDDDIIKQLKLRNISDTKVIDSLLDISFSKFNNLSIEAIEKILPFMKEGYQYNEACEKAGYNFKALYEGIKSKKLPVIEIDEIVNPVVNRALAQTRKVINSVIDRYGSPIRINIELARDLAKNFKDRKAIEKEQKENRCNIEKIREEIKSLMGKEPTGSEVLKYRLWQQQRGECAYTQQSIYIENLFDHGYCEIDHIIPFSRSFDDSLSNKVLVLGIENQRKSNRTPYEYFGLDEQRWNRFETWVKGSYLNYKKKSNLLKKRLSEEEQREWKTRNLQDTKYICRYIANYINNRLEFKPSESKQKVITINGRATAYLRAKWGLMKVRGNGDKHHALDAAVVAVATQKMVQQISKYSKAHELSSIRNNHEFIDMETGEIVQLEEYKDLLKKILPRPWLGFSEELSMRLSNDPISELKKSPFKSYDEEFIRNTVKPIFVSRVPFRKIGGKLFGETVYSKKHFNKDGYFVKKKKLTELTKEDLNNFYNYGCDKRLYDAIMERMEQFNYNAKKAFEGKFRKPTKNGTEGPMVRSIKIKTKVPFKDGIELQNVEGLVAKEGMVRIDIYEKENKYFVVPVYRYQLAKGIIPKKAVLRNYQEEQWPTMDESYKFKFSIYKNDLIEIKYEKKSGYFGYYDGFNRHTDSLTIQNHDRSEEYEGVGIKLGVVEFNKYQVDVLGNYYKVKAGGKQ

SEQ ID NO: 5231 - protein, 1069 aa, synthetic construct
  REGION 1..1069: note = Synthetic
MKYRLGLDIGITSVGWSVINLDENRIEDLGVRIFNAAENPKDGSSLAAPRREARGRRRLLRRKAYRVKRVKNLIVDKKILTKDELESLFTNKSVIPIWDARVEALDRSVTNEEWSKILINFCKRRGFKSNRKNEVNDKEAGVIITSIKNNEENMKMTSSRTIGEFIYNQVKNSDDGYKAMRNKSGEYNMCISRDMIREEIHTLFEKQRYFNNKFASDEIEDLYLKIFDSQRPYSKFEDLEKMVGYCTFEKRKYKRAPKNSISAEEFVLYDNLNKLSIIMDGDKRTLTKEERNFIVNEAYIKKEIKYSRLRTLLGLDDKERFSTLTYSLNTSYAKTENCKFVSLRGYHEIKKAIEHGISKEYWNSKVKDNRKMLNDIAYVLSLGKTDDEIINQLRKRDIPNVVIDVVLDISFSKFANLSIEAIEKIIPYMKEGYQYNESCEMAGYDFKAIFQGERSYKLPVIKIDEIVNPVVNRALAQTRKVINAVIDEYGSPIGINVELARELSKNFKDRKVIEKEQKDNRDNKEKIKKEIYDLMDKEPTSMEILKYRLWEQQKGECAYSQMMISINDLFTVGAYEIDHIIPFSRAFDDSLNNKVLVLARENQLKRNRTPYEYFGNDEDKWHQFEVWVNNSNLPYKKKQNLLKKKISKEEQKDWKARNLQDTKYICKYISNYINNRLIFVESESKQKVITVNGRATSYLRAKWGLIKAREDGDKHHALDATVVAVTTQGMIAEISKYSKANELKYVREGDDFMDIETGEIVKLSDYKYLLKDKLPRPWPYFSEELQLRLSDNPIEELKKWSIKTYDEEFIANTVRPIFVSRVPFRKIGGKLFKETIYSKKSFKEDSFITKKNLTDLKITDKVNDMDSVYNYNSDRKLYDAIETRLREFDGDGKRAFQEVFRKPTKSGKLGPVVRSIKVKAKQPFKDGIRLKNGIVAKNQIVRIDIYEKNKKYFVIPIYSCHLTIGIIPKKAVVAKKSEENWSEIDSTYKFKFSLFKNDLIEIKYDNKKGYFGYFDGFDINSAGLTIEEHDTSKQYRGIGIKSGVCLFNKYDVDVLGRYHKVKDGAKNGI

SEQ ID NO: 5232 - protein, 1069 aa, synthetic construct
  REGION 1..1069: note = Synthetic
MKNEINYALGLDIGITSVGWSVINLDVNRIEDLGVRIFNAAENPKDGASLALPRRTARGRRRLLRRKAYRINRVKNLILEREILSKDELDTLFTNKEVISVWEARIKGLDQQLSGKEWSKILINLCKRRGFKSNRKNESKDKEAGQIISSINNNIEKMKEANARTVGEFIYNEVMNSEDKYRPLRNKFGEYNMCVSRNMIREEIHMLFEKQREFGSEFATDEIEDDYLNIFNSQRPYANFEDLEKLVGFCTFEKKKYKRAPKNCISAEEFVLYENLNKLSIIKNGDGRKLTQEERILIADEAFKKKEIKYTHLRTLLNLKEEELFSTLTYSIDKDKSKTENTKFISLKGYHEIRKSIEHGVSKEYWEEIKTNRKMLNDIAYVLTLGKTDEDIKRQLKLRNISNEKVIQSLLDISFSKFNNLSIEAIDKILPFMKKGYQYNEACEMAGYDFKAIYKGVRSKKLPVIEIDEIVNPVVNRALAQTRKVINSVIERYGSPVRINIELARDLAKNFKDRKAIEKEQKENRNNVNKIREEIKSLMGKEPTGSEILKYRLWEQQKGECAYTQRPIYIEKLFGYGDCEIDHIIPFSRSFDNSLSNKVLVLGVENQRKGNRTPYEYFGEDEERWNRFQTWVNGSHLNYKKKVNLLKKKFTQEEQNQWKARNLQDTKYICKYIANYINNRLEFKESDSKQKVITVNGSATAYLRGKWGLSKIREDGDKHHALDATVVAVTTQSMIQKISRYNKAHELRYIRANEDFVDVETGEAVELQKYRDELKEILPRPWRGFSEELMMRLSENPIGKLQKSPIESYDLDFIQNTVKPIFISRVPFRKIGGKLFGETIYSSKGFKGEYFVKKKNLDELKKEDLNNFYNYNCDKRLYDAIIDRMEKFDYNAKKAFESEFRKPTKSGEKGPIVRSVKIKTKVPFKNGIELENVKGLVAKDGIVRIDIYEKEEKYFAVPVYRYQLAQRIIPKKAALAKKSEEEWPIMDESYKFKFSIYKNDLIEIRYKTKGGYFGYFDGFDINSAGITIENHDGSERYRGIGIKSGVLEFNKYEVDVLGKYYKVKVGDRS

SEQ ID NO: 5233 - protein, 1066 aa, synthetic construct
  REGION 1..1066: note = Synthetic
MRKQIDYALGLDIGITSVGWSIINLNKNRIEDLGVRIFNAAESPKDGSSLAFPRRIARGRRRLLRRKAYRVTRVKRLIVKENILSKDELNNLFMNKKVIGVWDARVKALDEEVSREEWAKILINFCKRRGFRSNRKNDSKDKEAGLILESIKRNKEKMEQSNYRTIGELIYNETKNSEDDYTPLRNKFGEYKRCVSRDMIRNEIYVLFDKQREFGNKFATEDIEAEYIKIFNSQRPFSKFEDLEKMVGNCTFEKNEKRAPKNSISAEEFMLYDNMNRLFIVNNGDKRKLSEDERRIIVNEAFNKKEIKYSNLRKLLNLSDEDYFSTLSYSTLKSDKSKTENTRFIALKGYYEIKKAVEHGISKDYWKSIKEHRALLNNIIYVLSIAKTDDEIKHQLALRNVPTEVIETVYDISFSKFNNLSIKALEKILPFVKEGYQYNEACEKAGYNFKAVYEGEKSYKLPVIKIDEIVNPVVNRALAQTRKVINAVIDEYGSPVRINIELARELAKNFKDRKTIEKEQKENRDNKDKIKKELYDLMNKYPTGSEVLKYRLWKEQNCQCAYTQQGISIENLFAPGYCEIDHILPFSRSFDDSLNNKILVLGVENQRKGNRTPYEYFGNNEERWHNFEIWVNGSNLKYNKKNNLLKKKFSEEEQKDFKARNLQDTKYICKYIAGYINNKLIFNEKSEFTKKQKVITVNGRATSYLRAKWGLIKVRENGDKHHALDATVVAVTTQGMVQEISKYSKANELKYIRQGDEFIDIETGEIVKLENYRYLLKDRLPRPWLGFSEELKMRLSDDPKGELEKSPFTSYDKEFIENTVRPIFVSRMPFRKIGGKLFKETIYSNKAFKDGAFISKKNLIDLTLKDMDNIYNYDSDRKLYDAIRERLEKFNGNGRKAFEEVFRKPTKSEKLGPVVRSIKIKSSKIPFNDGISMNKGLVAKEGMVRIDIYEKDEKYYAVPVYRYQITNGEIPKKASLAAKSESEWPLMDETYNFKFSIFKNDLIEIKYKKKEGYFGYYDSFNRANASLTIEFHDNSKTYGSIGFKSGVKEFNKYNVDILGKYNRAKR

SEQ ID NO: 5234 - protein, 1065 aa, synthetic construct
  REGION 1..1065: note = Synthetic
VNKDINYALGLDIGITSVGWAVINLDLNRIEDLGVRIFNAAENPKDGSSLALPRRLARGRRRLLRRKAYRVERVRKLILKNNILTKEELEGLFKNKEVIDVWEARVKGLDYKLSREEWAKILINFCKRRGFKSNRKNETKDKEAGQILSSISYNIEKMKETNSRTIGEYIYNEVKNSEDSYAPLRNKFGEYKMCVSRDVIREEIHTLFEKQRELGNDFASDEIEDKYFEIFNSQRPFSNFEDLEKLVGFCTFERKKHKRAPKHCISSEEFTLYEGINKLSIIKDGEKRKLSEEERTLVVNEAFNKKEIKYTTLRKLLGLSEEELFSTLTYSIDKDISKTENTKFVSLKGYHEIKRAIEKGVSKKAWQDIENNRNLLNDIAYVLTLGKTDDEIEKQLRLRNVPEELFESLLDMSFNKFNNLSIYALEKILPFMKEGYQYNEACEKAGYNFKAIYEGVRTKKLPVIEIDEIVNPVVNRALAQTRKVINSVIDKYGSPVRINIELARDLAKNFKDRKLIEKEQKENRANLDKIRENLRELMDKEPTVVEVLKYRLWEQQRGECAYTQSQIPLERLFSPGYCEIDHIIPFSRSFDDSLSNKILVLGSENQRKGNRTPYEYFGEDSERWNSFEIWVKGSYLNYKKKANLLKKKFSEEEQRDWKARNLQDTKYICRYISNFVNNRLEFKESENKQKVITVNGRATAYLRSRWGLNKVREDGDKHHALDAAVVGVTTQGMVQKISKYSKAHELYTVRKNDEFVDVETGECVDVDEYKEIRKDILPRPWRGFSEELKLRLSDNPLEELKKLPIETYNEEFIKENVKPIFVSRVPFRKISGKLFKETIYSERAFKDGYFVSKKSLVDLKKGDLDNFYNYECDKKLYDAISERMKEFNYNGKKAFESPFRKPTKSGKEGPVVRSVKIKSAAPFKDGIPMNEGLVAKEGMVRIDIYEKEGKYFVVPVYRYQLAKGLVPKRAAIAKKDELKWPIMDQTYNFKFSIYKNDLIEVKYDKKGVYFGYYDGFDRNSASLTIEKHDNSERYRSIGLKVGVLEINKYEVDVLGNYHKVKLGGN

SEQ ID NO: 5235 - protein, 1064 aa, synthetic construct
  REGION 1..1064: note = Synthetic
MGDINYSLGLDIGITSVGWSVINLDKNRIEDLGVRIFNAAENPKDGASLAMPRRLARGRRRLLRRKAYRIKRVKNLISETEMLSKEELNNLYTDNYLLNVWEARVNGLDYFLTREEWARVLINFCKRRGFKSNRKNESKDKETGELLASINSNLENMRAVNARTIGEFIYKKVKEEDEKYGAFRNKFGQYTRCVSRDVVREEIHTLFEAQRKFNNDFASNEIEDKYLKIFNSQRPYAKFEDLEKLVGYCTFEGKKYKRAPKNCITAEEFRLYEVMNKLSIFNNGDKRKLTAEEREMIVNEAFSKREIKYGALRKILNLSDEERFSTLTYSLNNDVDKTENTIFISLRGYYEIRRAIEHGVSKKYWEEIKEDRKLLNDIAYVLTLGKTDEDIIKQLRLRNVPDSVIDSVLDISFSKFNNLSIKALEKILPYMKEGYQYDKACEKAGYNFKAIYEGIKSRKLPVIDINEIVNPVVIRALAQTRKVINAVIDEYGSPIRINIELARELSKNFKDRKKIEKEQKENRYNIEKVAEDLEELMGKKPTGAEILKYRLWEQQRGECAYSCSPISFGSLFSPGYCEIDHIIPFSRSFDDSISNKVLVLGIENQRKGNRTPFEYFGDNEDRWHKFEVWVNSGNLNYKKKMNLLKRRFTEEEQRDWKARNLQDTKYICRYIANYVNSRLEFKKSDIKQKVITINGRATAYLRAKWGLNKVREDGDKHHALDATVVAVATQGMVQEISKYSKAHELQYIRQNDDFVDIETGEIVQLEEYKYLRKDLLPRPWLGFSEELVMRLSDDPLEILKKSPFKSYNEEFIKSTVRPVFVSRVPYRKIGGKLFKETVYSSKAFVENSFIVKKDLKDLTLKDMDNVYNYSCDKKLYDAIKERLEEFNDNGKKAFENEFRKPTKLGKLGPIVRSIKIVTSVPFKDGVEINNGLVAKEGMVRIDIYEKDKKYFAVPVYRYQLLNGVIPKYAAVANKPEEQWIYMDETFNFKFSIYKNDLIEIKYLKKEGFFGYYDGFDRATASITIEAHDNSQRYRSIGIKKDVLEFKKYDVDVLGRYHKVKESVK

SEQ ID NO: 5236 - protein, 1064 aa, synthetic construct
  REGION 1..1064: note = Synthetic
LKESINYRLGLDIGITSVGWAVINLDKERIEDLGVRIFNAAEDPKDGSSLALPRRLARGRRRLLRRKAYRVNRVRNLILNEKILTKEELDNLFTKNYSDVWKSRVEGLDRGLSNEDFSKVLINLCKRRGFKSNRKVDKSDKESGEILTSIKQNEGKMKELGYRTIGEYIYKEAMFEEDTYTPLRNKFGKYKNCVSRDMIREEIHKIFEAQRSFGNNFASDEIEDKYLDIFNSQRPFSKFDDLEKMVGLCTFEKDKKYKRAPKNSISAEEFVLYDNLNRVSIINNGDKRKLTDDERNLIVEEAYKKKEIKYSSVRKLLNLKEEDKFSTLTYNGDNQKTENTKFISMNGYHEIRKAVEHGIGKDYFENIKDNRELLNNIAYVLSIAKTDEDIIKQLNKRNVPDEIIDVVSDITFSKFSNLSIEALEKILPFIKQGYMYNEACEKAGYDFKAIYNGEKLYKLPVIDIDEIVNPVVNRALSQTRKVINAVIDRYGSPIGINIELARELAKNFKDRKQIEKEQKENRDKNDKIRTELKSLTGKEPTGSEVLKYKLWVDQNNECAYTQEKIYIEKLFEPGYCEIDHIIPFSRSFDDSLNNKVLVIGCENQHKGNRTPYEYFGADEERWNKFEIWVNSSRLNYKKKNNLLKKKFSEEEQREWKERNLQDTKYICRYISNFISNRLLFKESESKRKVININGRATAYLRAKWGLIKVREDGDKHHALDAAVVAVATQGMVNEISKYSKANELKYIRNNDEFIDIETGEIVELESYRYLLKDKLPRPWLGFSEELIMRLSNDPIEELKKSPIKSYDDEFTKNTVRPIFVSRMPFRKIGGRLFKETIYSKKNFTEDGFITKKNLNELTKKDFENIYNYNSDRKLYDAIKERLEEFDWNAKKAFESEFRKPTKDGKLGPIVRSIKIKSKEPFKVKDAISLNQGTAAKEGMVRIDIYEKDEKFYSVPVYRYQLLNREIPKKAAVAAKTEDEWIYMDESYKFKFSIYKNDLIEIKYKKKAGYFGYYDSFDRSTALLTIEVHDNSERYRGIGIKAGVSEFNKYEVDILGRYYKVKDGK

SEQ ID NO: 5237 - protein, 1063 aa, synthetic construct
  REGION 1..1063: note = Synthetic
MLMKDINYRLGLDIGITSVGWSVINLDKDRIEDLGVRIFSLGENPKTGESLATQRRIARGRRRVLRRKTHRIKRVRKLLIDTGVISQTELENLYNDRSVTDVWEARIKGLDEVLSNKELAKLLITFAKRRGFKSNRKSERSDKEISVLLNDINSNKQGMIETNARTIGEFIYNKVKSSEDKYAGFRNKAGEHLMSVSRDMIVEEIEFLFKTQRDLGNKLISNELEEKYLEIFNSQRPYSKFEQLEKLVGNCTFEKELKRAPKNSISAEEFILYDNVNKLSIINKGAKRKLTEDERELIIKEAFNKKEIKYSRLRKLLDIKDNERFSTLTYSTDKDINKTENTKFIAMKGYYEIKTGIEEYGGKELWNSVKDNREMLNNIAYVITLGKSDNEISEQLKLRGVPDDIIDATLDLTFTKFMNLSVYAIEKILPFMKDGLQYNEACEIAGYDFRNIYKGEKYKKLPVINIDEIINPVVNRSLAQSRKVINSIIDKYGSPIGINIELSRELAKSVKDRDKIKKKQIKNREKSQSLKEEIKTLLKKEPTSSEILKYRLWEEQKGKCAYTQNEITINNLFEDGFCEIDHIIPFSRSFDNSLSNKVLVLCSENRNKSNRIPYEYFGHDIEKWSNFEQWVVNSGLDYKKKLNLLNRKNSKEEMNIRNIQDTQYISKFIANYINNKLEFKKSDIYKSKQKVIMINGMATAYLRLRWGLMKVREEGDKHHALDATVVAVATRGLINKISRHSKAHELNWLAQQVKYIDIETGKEINIEEYKDVLKEKFPKPWDEFKEELLLRLSNNPKEELKNNNIKTYDEEFIEKSLRPIFVSRVPNRKVKGALFEETIYSKKSFKDGKYITKKNLSDLTKKDLENIYNYKTDKKLYDSIIARMEAANYDGKKAFTEEFRKPTKNGELGPVVRSIKVKAKLPFKDGFELKKANGMVAKQGLVRVDIYYKDDKYYTVPVYRYQISSGEIPKMAVVANKPEEDWELLDESYKFKFSIYRNDLIEVKFIKKGTFFGYFDGFDRSTSAIAIKAHDSSEKSRIGIKVGVAEFNKYEVDVLGNYYKIKL

SEQ ID NO: 5238 - protein, 1063 aa, synthetic construct
  REGION 1..1063: note = Synthetic
MENHINYRLGLDIGIASVGWSVINLDKKRIEDLGVRIFNAAEHPKDGSSLALPRRIARGRRRLLRRKAYRVKRVRKLIVDYNILTKDQLNDLFKQKCQNSVWEIRVKALDNKVTNEEWARLLINLCKRRGFKSNRKNEADDKETKKVINSIKSNIKGMKESGSRTIGEYIYTQTLSSGDISKSFRNKDGQYNNCVSRKMIEEEIKILFKKQRELGCEFASEEIEEKYLAIFNSQRPFSKFEDLEKMVGFCTFEKASKERRAPKCSISAEEFVLYDNMNKLSILNKGDTRKLTNEERKIIVENAFKNKEIKYSKLRKILNLSNDERFSTLSYSNKTELSKTENSKFVALKGYHEIKSAIEKSFGKDTWNRVKNNRTMLNDIAYVLSIAKTDEDIIKQLSLRNIPREIIDAVLGLSFSKFSNLSIKAIEKILPYLKDGQQYNEACKSAGYDFKATYNGEKSYKLPLIDIDEIVNPVVNRALSQTRKVINAVIDRYGSPIGINIELARDLAKNFKDRSKIKKEQEENRANKEKIKNELKMLMNKEPTSSEILKYRLWKEQREECAYSQERIYIEDLFKVGQYEIDHIIPFSRSFDDSLNNKVLVKAAENQRKANRIPYEYFGSDEDRWYRFEVWVEQSSLSFKKKNNLLKKRFSREDSIEFKDRNLVDTQYISRYISNFIKSRLIFKESDSKQKVITINGRATSYLRAKWGLLKVRENGDKHHALDATVIAVATQGMVQEISKYSKAHELKYIRQGDEFIDIETGEIVKVKDHKHLSKDRLPEPWLGFSSELRLRLSENPIEELKKSPISTYDEEFIRKTVRPIFVSRVPYRKVTGRLFEETVYSPKAFIDEGFIAKKKLQDLTLKDFENIYNYNSDKKLYDALRERLEEYGGNAKKAFAEEFRKPTKTGKLGPIVKSIKVKTKIPFKDGIDLNGGKVKKDGLVRIDIYEKEGKYYVVPVYRLDIQQGNIPKKAAVANKEEKDWILMDESYNFKFSLYKNDLIYIKYDSKGEYFGYYDGFDRHTGAITLERHDNSERYRGIGIKTGVKEIFKYNVDVLGRYYKVAK

SEQ ID NO: 5239 - protein, 1062 aa, synthetic construct
  REGION 1..1062: note = Synthetic
INYSLGLDIGTTSVGWSVINLDLNRIEDLGVRIFNAAENPKDGSSLALPRREARGRRRLLRRKAYRIKRVKKLILDRKILSQNELNNLFVNKDVISVWNARIKGLNEKLSGEEWAKILINLCKRRGFKSNRKNEMKDKEAGKVLSSIKSNFEKMKETNARTIGEFIYNEVMTSKDNYKALRNKSEQYNMCVSRDMIREEIHTLFEKQRAFGNEFAKDEIEDEYLNIFNSQRPYSKFEDLEKMVGFCTFEKKKYKRAPKNCISAEEFVLYEGLNKLSIVNSGNKRKLTNNEREIIIKEAFKRKEVKYTHLRKILNLKEEDRFLTLTYSIDKDISKTENTKFVSLKGYHEIRKSIEHGVSKEYWQQIKDNKKMLNDIAYVLTLGKTDEDIVKQLKLRNILDEKVIESLLDISFSKFNNLSIEAIEKILPFMKEGYQYNDACEKAGYDFKAIYKGVKLKKLPVIDIDEIVNPVVNRALAQGRKVINAVIDKYGSPTRINIELARNIAKNFKDRKAIEREQKENRDNKEKIREEIKNLMGKEPTGSEVLKYRLWEQQRWECAYTQQPISIDQLFTSGYCEIDHIIPFSRSFDDSLSNKVLVLGVENQRKRNRTPYEYFGEDTERWNKFEIWVKGSHLNYKKKMNLLKKKFSPEEQREWKARSLQDTKYICRYISNYINNRLEFRESESKQKVITINGRATAYLRAKWGLIKVREDGDKHHALDATVVAVATQGMVQKISKYSKAHELKSVRSCDGVVDVETGGVVETEEFRNTLKEILPRPWRGFSEELVLRLSDDPIAQLKKSPIKSYDQEFIKNTVKPIFVSRVPFRKIKGRLFGETVYSKKAFKDGYFISKKKLIDLKKDDLDKFYNYNCDKKLYDAIVERMKKFNYNAKKAFEEEFRKPTKSGDKGPIVRSVKVKVKIPFKDGVEFNEGLVAKDGMARIDVYEKEGKYFSVPVYKYQLAIGIIPKKAALAKKTEEEWTIMDENYKFKFSLYRNDLIEIKYKNKNDYLGYFEGFDINSAVITIKNHDGSKRYRGIGIKSGVKEFNKYEVDVLGNYYKVKAGDR

SEQ ID NO: 5240 - protein, 752 aa, synthetic construct
  REGION 1..752: note = Synthetic
MDKELNYAIGLDIGITSVGWAVINLDLNRIEDLGVRIFNAAENPKDGASLALQRRLARGRRRLLRRKAYRVKRVKNLILDKNILTKNQLDNLFKNNYICDVWEARVKGLDSRLTNEEWAKILINLCKRRGFKSNRKNEAKEKEAGAIISSINKNIELMKETNSRTIGEYIYKKVKESDDIYKALRNKSGEYNMCISRSILREEIHTLFEKQRSFGAEFASDEIEDMYLEIFDSQRPYSDFDKLEKFVGYCTFEKGVKRAPKKCISAEEFMLYDNINKLSILCDGEKRKLNNEERDLIVKEAYNKKEIKYSALRKLLKLDENSRFSTLTYSIDKDVSKTENTKFVSLSGYYEIKKAIEKGISKEYWNEVKNNKDMLNDIAYVLTLGKTDKEIEEQLIKRNIDEKIIENVIDISFSKFNSLSVKAINKILPFMKEGFQYNEACEKAGYDFKAIYKGEKSKKLPVIDIQEIVNPVVNRALAQTRKVVNSIIDKYGSPIRINIELARELSKNFKDRKAIEKEQKQNRVDIEKIRTELKDLFGKEPTYSEVLKYRLWQMQNYECAYSQQQIGINELFSQGYCEIDHIIPFSRCFDDSLSNKVLVLSTENQRKGNRTPFEYFGDNVERWNRFEVWVKGSHLNYKKKTNLLKKKVSKEEEREWKARNLQDTKYICKYIANYINNKLEFKESDRKQKVITINGRATSILRGYWGLTKIREDGDKHHALDAAVVAVATQGLVQKISKYSKARELRGIRESD

SEQ ID NO: 5241 - protein, 1069 aa, synthetic construct
  REGION 1..1069: note = Synthetic
MENEINYALGLDIGITSVGWSVINLDVNRIEDLGVRIFNAAENPQDGSSLALPRRMARGRRRLLRRKAYRINRVKNLILKREILSEDELNSLFTNKEVISVWEARVKGLDEQLSRDEWAKILINFCKRRGFKSNRKNESKDKEAGQIISSINNNLEKMKESNARTIGEFIYTDAMNSGDKYISLRNKSGEYNMCVSRSMIREEIHMLFEKQREFGNKFATDEIEDEYLNIFNSQRPYSKFEDLEKLVGFCTFEKKKYKRAPKNCISAEEFVLYDNMNKLSIIKNGDKRKLKEEERNLIISEAFKKKEIKYTSLRNLLNLEEDEFFSTLTYSLDKDKAKTENTKFISLKGYHEIRKSIENGVSKEYWEEIKNNRKMLNDIAYVLTLGKTDEDIIKQLKLRNITDEIVIQSLLDISFSKFNNLSIEAIERILPFMKKGYQYNEACELAGYDFKAIYKGTRSKKLPVIEIDEIVNPVVNRALAQTRKVINAVIDRYGSPVRINIELARELAKNFKDRKAIEKEQKENRDNVDKIKEEIKILMRREPTSSEVLKYRLWQQQRWECAYTQQPIPIEKLFHEGYCEIDHILPFSRSFDNSLSNKVLVLGVENQRKGNRTPFEYFGDVEERWNRFQIWVNGSSLNYKKKVNLLKKKFSKEEQDEWKARNLQDTKYICKYIANYINNRLEFKESDSKQKVITINGRATAYLRAKWGLNKVREDGDKHHALDATVVAVTTQGMVQKISRYSKANELRFFRDNDEFVDIETGEIVKSADNREVLKDILPRSWRGFSEELKMRLSEQPLYELEKYPIATYDLEFMQNTVKPILVSRVPFRKIGGKLFGETIYSSKAFKEDYFIKKKKLTELTKEDLKNIYNYSCDKILYDAITERMEEFNYNAKKAFQEEFRKPTKSGEKGPIVRSIKIKTKVPFKDGIEVKNVDGLVAKDGMVRIDIYEKEGKYFAVPVYRYQLANGIIPKKAALQSKSEEDWPIMGESYKFNFSIYKNDLIEIRYKRKKGYFGYYDKFNRHTASLVIKEHDNAKEYEGIGIKSDVLEFNKYEVDVLGNYYKVKVGGNN

SEQ ID NO: 5242 - protein, 1060 aa, synthetic construct
  REGION 1..1060: note = Synthetic
MRYRLGLDIGITSVGWSIINLDENRIEDLGVRIFNAAENPKDGASLAAPRREARGRRRLVRRKAYRVNRVKEMLVDEKILSKDELDNLFTNINVASVWDVRVEALDRSVTNEEWSKVLINFCKRRGFKSNRKNEVNDKEAGVIITSIKSNEDNMRAAGSRTIGEYIYNKAKNCDDRYKPLRNKSGQYNMCISRGLIREEIHTLFEKQRSFNNDFASDAIEDLYLEIFDSQRPFSKFEDLEKMVGFCTFEKGKYRRAPKNSISAEEFVLYDNLNKLSIIKDGSKRKLTKEERNVVVNEAYAKKEIKYSRLRTLLELDEKEFFSTLTYNLKESYLKTENCKFVSLKGYHEIRKAIEHGISKDYWKDNIKENRKMLNDIAYVLTLGKTDDDIRVQLRKREIPKEIIDVVIDISFSKFGNLSIEAIERILPFMKDGYQYSDSCEKAGYDFKAIYQGEKSYKLPVIKIDEIVNPVVNRALAQTRKVINAVIDDYGSPVGINVELARELSKNFKDRKSIEKEQKENRDNKEKIKQEISSLMGKEPTGTEILKYRLWEQQKSECVYSQVGISINDLFDTGICEIDHIIPFSRSFDDSLNNKVLVLARENQNKKNRIPYEYIGDDEERWHRFEVWVTNSRLPYKKKQNLLKKKFSEEEQRDWKARNLQDTKYICKYIANYINNRLIFAESESKQKVITVNGRATSYLRAKWGLIKVREEGDKHHALDATVVAVTTQGMVNEIAKYSKANELKYVRQGDDFVDIETGEIVKLADYKYLLKDKLPRPWEYFSEELKLRLSDSPIEELKKWLIATYDQEFIARKVKPIFVSRVPFRKIGGKLFKETVYSKKAFKDNYFVTKKRLDDLKISDIENIHDYHCDKKLYEAIEVKLREFGGDGKKAFKEEFRKPTKSGNLGPVVKSIKVKTKVPFKDGIELNEGIVAKNRIARIDIYSKEGKYFVVPVYVHQIASGIIPKKAVVAAKSEKDWINIDESYEFEFYLHKNDLIEIKYGNKKGYFGYFDSFDVGTGALTIEEHDSSKQYRGVGVKVGVTKFNKYDVTVLGKFYKVKRG

SEQ ID NO: 5243 - protein, 1072 aa, synthetic construct
  REGION 1..1072: note = Synthetic
MMNMNKKIDYALGLDIGITSVGWSIINLNKNRIEDLGVRIFNAAENPKDGSSLALPRRMARGRRRLLRRKAYRVKKVKRLLVKENILSQDELNGLFENKNVISVWECRVKALNEKVSKEEWAKILINFCKRRGFKSNKKSNSEDKEEGIILESIKANEQKLEESGYRTIGELIYNEVNNSNDKYKPLRNKYGSYSRCVSRSMIKDEIYYLFEKQREFNNEYASKEFESKYIEIFDSQRPFSKFEDLEKMVGNCTLEKNEKRAPKQCISAEEFTLYDNMNRLSIINNGDKRKLSKEERKIICDEAFKKKELKYSTLRKILKLKDDDLFSTLNYNLEKADKSKTENAKFVSLSGYYEIKKVISYGISKEYFESIKDSRKLLNDIVYVLTVSKTDEDTKKQLSIRQVPEEIIDCVCNNNISFSKFNNLSIKAIENILPYVKEGYQYNEACEKVGYDFKGMFKGEKSYKLPVIQIDEIVNPVVNRALAQTRKVINAVIEQYGSPVRINIELARELAKNFSDRSKIAKEQEINRANKEKIIEEIKELMNKEPTGSEILKYRLWKEQNGECAYSQRGITIDELFTPGYCEIDHILPFSRSFDDGLNNKVLVLGKENQRKGNRTPCEYLGSNEERWNAFEIWVNNSTLRYKKKNNLLKKKFLRDEQKDWKARNLQDTQYICKYIATFVNNRLKFNEDSEFSRPQKVITVNGRATAYLRAVWGLIKVRENGDKHHALDATVVAVTTQGMVQKISKFNKANELRSFKEIDEFVDVETGEVIDVNEYSDIRKNKLIPRPWQGFSEELKIRLSNDPISELNKYPISTYDKEFIRDTVRPIFVSRVPFRKAKGKLFKETVYSKKAFTQNGYVAKKKLVDLTLKDMDNVYNYECDKILYDAIKEKLIEADGKAKKAFEEEFRKPTKSGKLGPVVKSIKIIAPKMPINDGIDMNEGIVQKEGIVRIDIYEKDNKYYAVPVYRYQIAKGIIPKKAAVASKKEEDWTIMNETYNFKFSIFKNDLIEIRYKNKKGYFGYFDGFDRSTASLTIEEHDNSNRNRGIGIKTNVIVFNKYFVDVLGKYYLSNK

SEQ ID NO: 5244 - protein, 1068 aa, synthetic construct
  REGION 1..1068: note = Synthetic
VKDINYRLGLDIGIASVGWAVINLDKERIEDLGVRIFQAAEHPKDGSSLALPRRLARGRRRLLRRKAYRIKRVRKLISDCGILSKEEMDNLYNKHEDIWHLRVKALNQRVTATEWAKILINLCKRRGFKSNRKNEAKDKETGQLILSIKNNKKHMIDLNARTVAEYMCKLKEESMDKYMPIRNKNGNYNMCVSRTMIEDEVKLLFKSQRDFGLDFADEQIEKEYLNIFNAQRPYSKFEDLEKMIGYCTFEKDKKELRAPKNCISVEEFILYDNMNRLSIINNGNKRGLTKEERNIIIDNAYKKSEIKYKDLRKLLLLNNDDRFSGLTYSNKIDISKTENSKFVSMKGYHEIKKSIEKNLGKEKWDNIKNDRKLLNDMAYVLTIAKTDEDIIKQLKIRNVEQNIINAVIEISFTKFNNLSIKAIEKILPYVKEGYQYSEACEKAGYDFKAVFKGTKELKLPLINTEEIVNPVVIRSLTQTRKVVNAVIDKYGSPRGINIELARDLAKNFKDRKSIEKEQKENRDNKEKIRNELKELMRKEPTGGELLKYRLWKEQKEECAYSQEHIYIDDLFKPGLYEIDHIIPFSRCFDDSLSNKVLVKGIENQNKKNRIPYEYFGSDIDRWHRFEVWVEQSSLGFKKKTNLLKKKLSEEEQKAFKSRNLNDTRYISKYIANYIENRLIFKEDNVKSNSKKVISINGRATSFLRAKWGLIKVREDGDKHHALDAAVIAVTTQKMINEISRYSKANELKYIKRNEEYIDIETGEVVDENIIKENKVLLEEVLPRPWRGFTQELNLRLSDNPKEELKKSSFDSYDDEFIKNIVRPIFVSRVPDRKAGGILFKETVYSANAFKNNKSIVKKNLCDLKLSDMDNVYNYISDKNLYDSIKAQLVSYDGNAKKAFENGFRKPTKSGKLGPVVKSIKIVTNLIAKDMLDLNKGKVQKDGIVRVDIYEKEGIYYSVPVYRIDIAKGVRPKKAALAGKSEKDWTDITEEYNFKFSVYKNDLIEIKYKKKKGFFGYFNSFDRATASFTIEAHDNSSRSRGIGIKSGVEELNKYEVNVLGEYYKVKGGK

SEQ ID NO: 5245 - protein, 674 aa, synthetic construct
  REGION 1..674: note = Synthetic
LSIRQVPEEIIDCVCNNNISFSKFNNLSIKAIENILPYVKEGYQYNEACEKVGYDFKGMFKGEKSYKLPVIQIDEIVNPVVNRALAQTRKVINAVIEQYGSPVRINIELARELAKNFSDRSKIAKEQEINRANKEKIIEEIKELMNKEPTGSEILKYRLWKEQNGECAYSQRGITIDELFTPGYCEIDHILPFSRSFDDGLNNKVLVLGKENQRKGNRTPCEYLGSNEERWNAFEIWVNNSTLRYKKKNNLLKKKFLRDEQKDWKARNLQDTQYICKYIATFVNNRLKFNEDSEFSRPQKVITVNGRATAYLRAVWGLIKVRENGDKHHALDATVVAVTTQGMVQKISKFNKANELRSFKEIDEFVDVETGEVIDVNEYSDIRKNKLIPRPWQGFSEELKIRLSNDPISELNKYPISTYDKEFIRDTVRPIFVSRVPFRKAKGKLFKETVYSKKAFTQNGYVAKKKLVDLTLKDMDNVYNYECDKILYDAIKEKLIEADGKAKKAFEEEFRKPTKSGKLGPVVKSIKIIAPKMPINDGIDMNEGIVQKEGIVRIDIYEKDNKYYAVPVYRYQIAKGIIPKKAAVASKKEEDWTIMNETYNFKFSIFKNDLIEIRYKNKKGYFGYFDGFDRSTASLTIEEHDNSNRNRGIGIKTNVIVFNKYFVDVLGKYYLSNK

SEQ ID NO: 5246 - protein, 1052 aa, synthetic construct
  REGION 1..1052: note = Synthetic
MKYRLGIDMGSTSLGWCAVKLDDNNQPCDIIDMGVRIFPDGRDAKSKQPLSVTRREKRSARRRRDRYIERRNKLLNALIKYGFMPKDKAERKKVEEIDPWKARAESATKQVPLFELGRALFHINQRRGFKSNRILDDTSDSELTGMKGGIQELQEQLNCKTVGQFLYEKHKNKNTVRLRPNSVKGKNEWDFYISREMMEQEVKTILSHQTKYYPENLTPDIQQELMDIIIEQRPLQIPEPGWCTLIEGEKRGRLGYPEIQRFRIFQEVANLQLKKYTPDDPDLTKQQKDIILKELTTNFTEVNKNGLLTWAKIKKLTNLNRASSFNLEELGRKGLNCDLTSFRLSDDEAFGTEWLDLDLDTQNQIVDKIVTVTNKEDLKSWLSDNFDLSESQLSSIASAKLPPGYASISLKAAIKINPHMENGLTYDKACKEEGIDHSQFHTGEVYNEGNLPYYGQLLQRYVLGGDRSLGEEATPEQYYGKINNPTVHIALNQLKTVVNALIKRLKSAPEEIHLELARELPLGADQYSKLERDLRKGRDDNERINEELEKLGIAKNYQNRMKYKLWEDLAESPNERCCPFTGDIISAHDIFNSAYEVEHLLPFSLSYDDSRANKVLSHRDANRLKGNQSPFEAFGHSPEGYDWEAIIARVENFANKNKRWRFEPNAWEKWKGDNGDLLARMLNDTRYMTRVAREYMTYACHKDKVVAVTGQLTSMLRHHWGLNSLISDDDSKDRSDHRHHAIDALVVACTSRNTLNKVSKASKRAHDTDKLLEKLEYPFEGFERSKIQELVDDIVISYKPDHGKPNGSTTIGSLHEETYYGRICDGTKKNTGIYATRKPFLNIEDKEKKILEIANTSIREDLLEQLATKPTKKQWQDFLAQYAKQHNIRRVRVHIEKSDDVMIPIKDKTGKPYRYVQGGSNYCADIWCTDKGKKAGKWQSEIISMFDAHQSDFTPQWRKDNPTAWRIMRLQINDMVAFDNKDNTEIRRVKKITNGLVYLRSHLIAKEEKDKSSWAASAKQLQEKNARKVFVDPLGKVKDPGHARKAHKIKKE

SEQ ID NO: 5247 - protein, 1413 aa, synthetic construct
  REGION 1..1413: note = Synthetic
MKEKVVGIDLGTSSLGISVRNLSLGESLEKQLEWFSVTTFESGTSSDQTGEHTLAADRRSHVQSRRLKEHSRWKRWSTLSLLIDYNMCPMSRQSLERWCTYDKSRGLKREFPVDDNAFMRWLRMDFDGDGKSDLTAFQLRRKMVEEQFDFTKPINRYKLGRAIYHIAQHRGFKSSKGETLSGQEEDVKDVQVNADNLEETMKKSEERKSKDLSEYMAKHGFKTVGQAFASLEDAGIRVRNSRYQAVRSQNVAEVDEYFHFQEGLREYEDLHKRLVSTKKGEGTLFYKLPLRSQKGHIGKCTFEKNKRRCPISHPEYEKYRAWGFINNIKYRESANDCWQELPLELKKLLYQKVFTAYVRKDFPFEKIREFLEKQLGMTFKNVEGTKTINYKDKTLVAGCPVTARLQNIAAILNTNIEQLHLQSTKTRLSHSVKNTEKHAVTYNAEDLWHFCFEADEIEDVKRFARSSLGWEDMATDALCKLWASIEQGYAPLSLKALKNINRMLEYGLKTSDAIFLAKVPDIAGIEESSIPQLIELYEKDVKAPVDRSLRIGRIVNTLISKYKSLAPRDRFADHDFGYQLQDDDKDDVVQCIMDNDSLFALMDAGEQQQMINEVTRLYQSFFADIHRDYVKTPKFANTLAEKLKEKFPAVDESKWKLLYHPSMVSDFPRNKEDEGLLGSPRIGAIRNPTVLRALNVLRKTLNTMIVDGLIDPQETRLVVETTRVNNDINKRWAIEKYNNERRDANKAIWNILKEYYPDKNIKDEDVDAARYVLEQSGEDLFTDDNPDDLHYRNQLKRYKLWLEQGCCCLYTEHDISLSNMFSENYCDLEHTIPRSLSFDSSDKNLTICDAYYNRHIKQNRIPTQLPNYEHDVTIDGQVYTAIKPRLKNWEEKVERLSQNVLFWKSRARRAQTEDSKNACIRQKLLWQMELDYWRQKLYRFKMKPENLTDGFRNSQLVDTGIITRYAVLYLKTLFSSVDVQNGQSTSAFRKIFGIPQKDRSSNYHHAVDATILTMIPQSAKRDRMLKLFYQIDELKRDCHDVSGLQFQLNKEIEDCDLGRGLAGIDDFIARQVMVDFYKQDRTLQKNVRPVIRKGKPLMKKTAAGKLEPVTFCSDSIRGELHKQTFFGAIRRREDQKTLFVVREPLKYKTSNKDSGFKDWKELNDRLVDLNFKDKSSDLKPMVKMMMNQFRKGTSFKEACEQGIYMLDKDGRKVNRIRHIRCYGKNVTNPMRVKRHTYPSDKEYKQYVWAALADGSVYALCEYVNGSSKVYKRYTYMDISENRKVGVEDIPVCLTDKKGKRFNLRRKICKGDMLLIYKDAPEELLHLDSTDLSKRLYKVQSFERKNDIILRHHLLSTAKTNSEDGKERIRDRGESIKSFTKLPNIIRSSITSFKFLQKDVDYVFNKEGLLLITI

SEQ ID NO: 5248 - protein, 1411 aa, synthetic construct
  REGION 1..1411: note = Synthetic
MSRKILGIDLGTGSLGMSLRNPDLGGNIQNQLEYFSVTTFNSGTGTSQTGEYTLASDRRSHRQSRRQKDHSRWKRWNTLALLVEYDMCPISKESLERWSVYDKKRGLKREFPIDDEPFIQWLRMDFDGDGISDCTAFQLRRDLVEKQFDFTIPINRYKLGRAIYHIALHRGFKSSKGETLSSQEENEKTETNIDADNLEVAMQKSEMSKNKDLVEYMNLHDFKTVGQAFASLEDEGVSIRGSRYQAVRQQNIDEVNEYFRFQKGLSISKYDDLHKRLVSTKKGEGTLFYKLPLRPQKGNIGRCTFEKNKRRCPISHPEYEKYRAWSFINNIKYKEKTGGVWLELPIAIKRELYQEEFVSKVRKDFFFETIRKALERKLGLTLQNTGESKNINYKDKTLVAGCPVTARLQNIANLFNKSIDNLHFQGNKTRPSHNNHNGGGNHTVTYDALDLWHFCFESDELEDVKRFATGSLNFDPKATDCLCKIWNSIETGYTTLSLKALQNINRFLEYGLIASDAIFLAKIPDITGEEDAEKIIKFFYEKVKTPVEKIQRIDRIANILIADYKSFALNERFAEHDFDYKLQKEDKQVVIDCIKSNDSAFELMDAEEQQTMIEQVTRLYQSFFSDRKRGFVNVPTIAEELVKELKSIYPEVKEWKWGKLYHPSLVSDFPRDKDNPNHLGSPKIGAIRNPTVLRALNVLRRNINYLIDDGLDPKETRIVVETTRVNNDINKRKAIEKYNEERNNENKVIEKILIELYGEASEKDINAARYVLEQSGEDLLTADDTDNRHYRHQTKKYKLWLEQGCRCLYTGRIINLTNLLDDNSFDMEHTIPRSLSFDSSDKNLTVCDAYYNRHIKQNHIPTELPNYDVDVIIDGHLYTAIKPRLEMWQKKVERLGQNVLFWKNKAKKAQTENSHDRSMREMLLWQMEYNYWRQKLDRFTMKTKDLTDGFRNNQLVDTGIITRYAVYYLKTQFASVDVQNGQSTSAFRKIFGIPQKDRSSNFHHAVDATILTMIPVSAKRDRMLKLFYQIDEYKKLGYEAHGLKFQLGREIENCGLGSGLAETEDYISQRVLVDFYQHDRTLQRDFHPVIRKGKPLTREQEGKSAPVTFRSDSFRGELHNQTFYGAVKRRNDDKVLYVVREPLKYKTSERDKGFKDWKELNNRIVDLNYSAEYEGFKPMVKMMMSQFPVGTSFKDASEQGIFMLDKKGNKVNRIKHIRCYGKNVSNPVKVKKHTYLSDKEYKQSIWAALGDRSVYALCEYSDGKNKEYKRYTNMEISDNRKNGKEDIPTLYVGKKGEVLPLVRKIIKGDMLLIYKNSPKELLNLDRLELSKRLYKVQSFEDKNRVTLFNHLLSKTNKKGQDGHDGKEYKGESIKDFEKLPPVIRSAITKFSFLQKGVDFEFSRTGVNLIQK

SEQ ID NO: 5249 - protein, 1379 aa, synthetic construct
  REGION 1..1379: note = Synthetic
LYLGAKLRIKNDKTKYSAKKMKEKVVGIDLGTGSLGILLRNLELGDNIIDQLEWFSVTTFDSGTGMSQTGEYTLASDRRSHVQSRRLKEHSRYKRWATLALLIEYDMCPMSPESLEKWRVYDKTRNLKREYPLDDLAFNQWIKMDFNGDGIPEYTSPFQLRRELVEKQLDFSQPENRYRLGRAIYHIALHRGFKSSKGETLAELEEGNKDTQISTDDLEGAMKKSEEKKSKDLTEYMEFHQLKTVGQAFAYLEDEGVRIRNSRYQAVRSQNVDEINEYFQFQHGLSGFQELHKRLISTKKGIGTLFYKLPLRSQKSHIGKCIFEKNKRRCPISHPEYEKYRAWAFINNIRYKASVEDVWQELSLEIKNQLYQEVFVSKVRKDFNFEVIRKFLEKHLCLTFSNTEKAKTINYKDNTLVAGCPVTARLQNIADYFGTDIEHFEQKGTKTRDTHTKRQERERHTVVYHTMDLWNFCFDTDEKEDVTAFAHNSLGWNEQATDKLCKLWNAMDQGYATLSLKALRNINRMLVYGLKTSDAVFLAKVPDITGMSEEGVKDLIDIYLGRVKGQVNQKVRDCRIVNTLIANYKSMPVRDRFADHNYDYQLGIDDREAVVKCIVDNDKDFSLLDATAQKKMIDRVTNLYQSFFADIHRDFVKAPRTVDALKEELCKRYSGIDDSKWERLYHPSMLSDFPRDKDNANHLGSPNIGAIRNPTVMRTLNVLRSVINKMIDEGLIDPQETRLVVETTRVNNDINKRWAIQKYNEERRDENKAIKDILQEYYPEKDINDDDVDAARYVLEQSGEDLYGENDRFQHLIKKYKLWLEQGCQCLYTGHIISLSNLLNGEMFDAEHTVPRSVSFDSSDKNLTMCDSYYNRHVKKNMIPSQLPNYEHDVVIDGHTYTAIKPRLQMWEEKVERLSKNVTFWKNKAKRAQTESYKNTCIRQKLLWLMEFDYWRSKLDRFKMKTSDLTDGFRNSQLVDTGIITKYALLYLKTLFKSVEVQNGQSTSAFRKIFGIPEKDRSTHYHHAVDAAILTLIPTSAQRSRMLKLFYEIDEMKRGGHEYSGLQFQLNKEIESCGIGKGVAAVDQYIEDHVLVNYCKQDRTLQDANNIRGKLHAETFLGAITQWNGEEKKYVKRAELKYKKSSLDSGFKSWEDLEGAIVNKQLVQMMKSQFPKGTTFQEACEQGIYMLNKRGEKVNRIRHIRIEVKEKHPLAIKKQTNLSAKDYKQYYYAGMGDLYVTCEYQNQQEREFIVYSLFSIAENRKLGVEDIPTTIIGKKGIRLTLDRIIKKGDMILIYKNSPEELYELDTNSLSKRLYMVCNPESDGRLNLCHHLCAKQEKGQSIKDYDHLPQNIRCGAKTIKFLQMGKDFSIVKGKIEFKRS

SEQ ID NO: 5250 - protein, 1104 aa, synthetic construct
  REGION 1..1104: note = Synthetic
MRYTIGLDLGITSVGWAIIDEDKRRIIDLGVRYFDKPETPDSGKSLAEPRRLARSQRRRLARRHGRLDAVKEAFMRAGLSKDEIRKAHSQPNNPYGIRTCALDELISPQELFIAIYHIVKRRGYKSNRKEKSDAKVDKERGAVLFGIQNMKISLVKEGVRTVGELFHKKIVENEDNISFEGVRNKAGSYKNSVTRGMLEDELGQIFSVQQKLGNKFVTDELVKTIVDHDTEDNATGAFNRQKHYAQGGFEKMVGLCTFEGKTKELRAAKATYAFQYSSVLQKINHVVIKKGQYDRGRPLSEEERKIAKKYIFSVKTPHYDGLRKKLNLGASDRFNMVNYFIKVKPGEEINKEKLIKEAETKTKLPSMMNWMKLRDLLEETDPNFVQKADDDKTIYDRIGTVLSLYKTNKEVKDNLINGKYAVEKIPETVIEAITSSDLTYDSFGSLSLKALYNIIPYLEAGEDYDTAISKADYKEFANIKRHKLLSLKQDDYRITNPVVKRTISQTIKVVNAIIDRYGSPHQINIELARDLSKNFRERKNIEKLQGDNRLVNEKAKERMVELGIPEPKGQDILKFRLWSEQNCKCAYSGKAIYENRLNEDGYVEIDHVIPFSRSLDDSFNNKVLVLKQENQEKGNRIPYEWFGGNENKWAQFEALVKSFVNIAPRKRANLLVKKYVGDDLVARALNDTRYISKFVKNYIEKGLEFSDPDHKKPVNTVNGMATAYARKRWTLYKNREENLKHHAQDAALVAVMNSKTVKDIAKDSKKGEIIRYLQLHKKLDELPEINAEEAHKLEKEIKEEEYRTKLNDPWEGFRYELAARMEDDPMYELEAHKDEILWFKNREETDDELNIKPIFVSHMPRRKVSGKVHDDKVRSAKRFEQEYSSVKVPLTNLTEKRLVEEGLFLDPKLMQTLLSRLREFNGDAKRAFAEPLYKTMKNGEKGPLVRSVKLTGGQKSGLLINDGEGIVKRQSMVRVDIFTKANKKGKDEFYFIPVYAYHKTKKELPTKVCTRGKSEKDWDVLNDNYSFKFSVYPGDLLSMTKGQNITKGYYVKARVSVASLVVETHNRTEQKNTGIKSLDKLDKYMVDILGNYNKVHHEKRMPLS

SEQ ID NO: 5251 - protein, 1147 aa, synthetic construct
  REGION 1..1147: note = Synthetic
MVRSISFHGSVFVVWLSYCLVVKHKFMKYTIGLDLGITSVGWSVVNDDKKRIEDLGVRIFTKAENPKSGASLAEPRRVARSMRRRLRRRNGRLQAVKRIFIEAGLPPDVIVSAHAKPNNPYLIRAEALDRVLTPQELFILVYQITKRRGYKSNRKKIDQVSDDKEKQAVLGGIQNMKALLEQGGFTTVGQILHSKLVEQRNLHSFGTGVRNHAGSYENSVSREMLEAELKEIFLTQRKHGNTFVTDDLERAVIGYDELGKATGAFNRQRHYVTGDILKKMVGICTFENESGKGEMRAAKATYSFQYFNLLQKLNNLKIDDLAEPLLPPRGLSLEEKQHLISYFHTVQEPSYHSVRTQLKLKPTERFNISYFAKRPKNNEPLPTEAEIQSQTEKTKFSNLKDYIHLKKIISETNQAFWNEIDSKKYIIDEIATILTLYRTDEDVLAKLDMIVDGERVVIPDDVKQALLGISFAKFGHLSLRALRKLIPHLENGLRYDEAVTAAGYGSKLAKRHKKLPPLSKDDNSITNPVVKRTVAQTIKVINAIIDRYGSPFAVHIELGRELSKSHKERGDIEKQQKENASKNERARQTIKETFRVLEPKGQDIIKYRLWEEQENKCAYSGVSIDEKRLFEDGYVEIDHIIPFSRSWDDSFNNKVLVMKRENQQKGNRTPYEYLGGEGDRWRDFEVLVESYKRMHYGKRRKLLLKKYTEDELTTRALNDTRYISRYIKNYIENSLEFSNLEDKRKKRVITINGMATAYLRKRWTFNKSRETDIHHAQDAVIVAVIDDSMVQQVAKHSKMGEVKEYLQLHKRAEGLVGISESEETEAKQQLADKQVRHSKLFPLPWEGFREELNARLSSDPQFELEACKDKIPWYKNCTLEELPSLRPIFVSRMPKRKVTGRAHEDTLRSPKWFKQQKPQSSVRTPLTSLTLEKLRGEQALYLDPKLKMALITQLDLHNGDAKKAFAEPFYKTMKNGERGPQVRSVKLIETGQKSGLLIHNGNALVDRASMIRVDIFVKQNKKDKDEFYFIPIYAHHVVEKNLPVRACTAGKRETEWEKIDDSFSFKFSLYPGDLIRIIKEGEKRFWYYVKAGISTNSFTVESHDGSETIPSMGIKTLDKIDKYVVDVLGNYHQVSREPRLSLQSKAE

SEQ ID NO: 5252 - protein, 1067 aa, synthetic construct
  REGION 1..1067: note = Synthetic
MITKMVSQAPDKISRGSLTMGLDIGHRSIGWAVLKKAPEGQIPEILGCGTVIFRSEDCMNSQRTALRRSRRNIRATRSRIKRMEKALAQAGVLTQTQLDKFHAAGRGHPAPWWLMACWLSGKTSLLSAEEFWQVLRWYAHHRGYDANRSWLNEEEEADSKRTQETRERMAAAGIKTAAEYLCKLAGCKPGDPQPKFGKPFRGTKHSVLFPRSLIEDEVRRLVEAHVGKLKGLDAKLRETLVGTDKESWASTPWFGGKRLPKRYRGSLLFGQLIPRFDNRIISACPFEPEPKNREVGRKVCSKATWEFLNFRWAMVVANIRVYVGGMQRALTSDETKRFFNVCWDEGDLRATTGANKIQKNSDKVRSLLGKAGVSLAGGDNLDQLVVLPDSLKAFRLVPVAKGLAAFRQIWSCANEHQRRWLRSKLLARQKLAASSIFRIPKPMFQSWKDAANTKGLFQGKDAKLLEEKIGGDVPQGRAAYSRPILVKAFEEVMDGKDPREEKGCLFRQGETPLEAKIPLDQRTNNHLVRHRIRIAEKLRKDIITEYAGGDSHAFGDVVIEINRDLPSLSGKNAEAIAAAETSKLKNFNDVRERLEADLKGHGVRVTAGLIRKARIASDLDWTCPFTGQKFSALELVRGVYDKEHIVPRSTRPSDSLSSLVITPRKVNDFKGKRTGLQFVKEEGGKKVPGTSLSVITEQRYREWVEKLSPPLKTRDDIRRCEIRKRLLLTAHLPKEDEVGFLPRDLTQTSYLAKLALKEIRKAFEAEGVKIDVRPLPGLATATARKAWKLLGCLTPAFPEAKEALEANDKQAVRKITHLHHALDAVTLALSGEILPRDGMLLAALASRNRDKATHSLLNRKLGSLVRFNEERAEVEDLPKELKDSISKRLAECRVAQHIPGTWSGTKSELTMWGVVKREGGKVTLRQRGPKGLKEDSLREDSIIQAPSLPGVFKASDNYGVLLSTPPQNIRWNKPFQKIKDAKRFKLLRIGTLISVPSGNFFGLWRIVGITCRLSGELLVNLVHPAAIKSQSGKPASGRDNVSLNSLLKSKMEVLSRNLVGCPIISLK

SEQ ID NO: 5253 - protein, 1139 aa, synthetic construct
  REGION 1..1139: note = Synthetic
MKYNLGLDLGVQSIGWAIIPVDENNGPAMRLGVRCFDTVIDNVKDWQEGTLGKDGKPKAQTNNRKRSDARGVRKNQWRRKRRTLKLFNLLRNHGLLPMGKGINDDPLDRQELINHLDKELARKLSLNDDRVSAHLLPYKLRAMALDQQLEPFAFGRALLHLSQRRGFLSNKKTPPKDDEDEKGLKKDISDLRGKIAECGYRTLGEYFASLDPEEKRIRQRWTGRDMFKDEFKAICDSQDKYYHDLLNKKVVIDSWKNKPGAWKYDIKEGKRKKIFSNEHFRAKEMTLQKAIERTLFFQRPLKSQKHLIGKCQLERGKRRAQLASLEAQRFRYWQKILDLKYKDVDGFMVPLSIEQQDILAKEFENNDHLTYAQIRSLLGFKQPRQSKEEKERHKKAGIQPVYAINFEIDDENEKLKGNVTSERIRKIIPERWNAMPDEEKEQLVSEILQFEDENALARRLEKVFKFDSSKASELAMVQLERGYASLSKQAIGKILPVMKAKRIRFATARKDVYGEQFDEERKDVKPDLPPVLNVVKDLKNPVVTRALTELRKVVNAIIRKYGKPDMICVELSRDMKRSRPDREKLAEEMKQQEKRRAAVVEIIREYRKDKNYEPKKNEILKVLLAEECNWECPYTGTDKDKHWGKITLDSLLGSEPQFDIEHILPLSRSLDNSFVNKTLCRIYANRHEKKNQTPWEDYGHDEQRWHEIMERVERFQGPLAKIKHRRFEMKKIPDGFTNRHLNDTRHISRLAGEYLALLYGGRSDAEGTQRIQVSSGGVTKYLRDEWGLNAILDDGGDEKNRNDHRHHAVDAGIIAVSAPKIVKMLSDAAERGWLEGRQRFGKGGIEEPFPDFYKKMEAAVNKINISFRANRKVSGGFHEETNYSKPQIVVEGKGKKAKQVEYRHVRKPIASMSKNEVHDIVDEKVRNLVLETLKSLGTDDPRKLTENDLPYLRSKDGKRMTPIRKARIRKSDSTRTMGLAKTKKGGNPEIHGRTGRERHVVTGNNHHMEIFAHLDDQDNEVKLDWKVVNLFDSVQRIKQKQPVISRFPDGEQTRLKFSLAKGEYVLATPPGEDDVLLKVCKISEGDLSLCLHTDARPEKDRAKTGDFQKYRIASIKKLEQFKLRKVTVDVLGNIHPAND

SEQ ID NO: 5254 - protein, 1005 aa, synthetic construct
  REGION 1..1005: note = Synthetic
MKRRVFGFDLGIASIGWAVVDFDNEYYDMETGEILADKAKGSGEIAQGAIVDCGVRVFPVSENQKGATLASVRREKRLARRACRRKARRKEGLRGLFAAKGLVENADAFTKEICKQQIGGDVWNLRVKALQEKLSKEELARVLYHLAKHRGFKSVRKAQEENDKDSGKVLSAIRANMALKEDGKSLAQIIVEKAGATGKKRNFSKVIKKDKDGKDVVKADYKNSIPRSEIEAELAMIFARQKEYGIFTQDLYDDFVKIAFRQRGIKSVGDMVGNCTFEANEKRAPKEAPTAEFFVAWSKINNLAVYEGDTKRFLTTEERHNLFELLKKTKDVKYKSITAKLFKDKDIQFACLDYRPKQKKNKNGEMVNADPEDTLFYSMKGWHKLQSAFKAMPDVFEDIEKLNKAVTIIAEEKEDTKIQAKLGKLGYSQEIIDKFLTLSFDKFINLSLKALYKINPYLEKGEKYDKACASAGYDFKAVTDKLVNEKGLLLAVIDEEKLTRVPVVNRTIAQFRKLYNAIVRQYGAPDQINLETGRDLKKSAEERKKIQNRQEENRDRNQSIKEQIEKMGFDVTGTNITKLRLYNEQQGKSIYNVNCKDNDIKIERLFEDGYAEIDHILPYSRSFDNSYSNKVLVLARENQEKRNQTPFEYKGKSNAKSKEWTDFISYVTSFASIPKNKKEKLLLETFNDREQEFRNRNANDNSYIATYVKRYLEDGIDFSKSLHTEIKNKVQVRSGNVTAFLRHQWGLEKDRGIDTHHAQDAIVIACATQGMVQALSKISRKEGLVHTEAVHRKYTIAAPWNNFRNDVLTALEKVFVSRSPRKKASGEIHDATIHSLKKKKKQNEKKNQQKTREIKTGLIVRGGIAENGDMLRTDVFCKKNKKGKEEFYLVPIYKSDLGKDLPNKAITRNKTEDEWTVMDESFTFLFSLFMDDLVRVQKGETVYFGYYKGVHRGTAGITLEEHDKKQKYEGIGSKTLDYIKKYQVNFLGEYTEVKGEKRQLLMHKK

SEQ ID NO: 5255 - protein, 1002 aa, synthetic construct
  REGION 1..1002: note = Synthetic
MKKKIFGFDLGIASIGWAVIEFDNEYFNPETGEIIDGKIIKSGVRCFPVAENPKDGSSLAAPRREKRLARRICRRKARRMESIKKLFIAKNLVSDLKELDALYAEQQGGDVWNLRVKGLFEELSKEELLRVLTHLAKHRGFKSYRKAAEENDAEGGKVLKAINENKKLLTANQTLAQVIVERAGEGGKKRNYTETDAKGMAKAVYNNSIPRNEIERELDLIYEKQKQYGIFSKDLFDDFKKIAFRYRPLGSVADMVGYCTFEKGEKRAPKEAPSSEFFVAWGKINNMAVYENSQKRFLHPEEKVALFELLKTTQKVKYQAISKKIFAGKDIQFADVNYKLTEKKAKDGSVKEINPEDVLFYEMKGWHKLKALFDKEEWLDVSRDISLLDEAVNVVACEKNDENITKGLELIGISEKYIGKFVSLTTDKFVNLSLKALSKIIPYMEQGMKYNEACEKAGYDFKENVDRLVDKKGILLGVISADKQTKIPVVNRTVAQFRKVYNAMVRQFGVPDQINIETGRELKKSFDERRKIINKNKENEQERREAREELEQENIKGSSKNILKYRLYQEQDGKCIYSGKPIDLHRLDEEGYLDVDHIIPYSRSLDDSLNNKVLCLSSENRMKGNKTPFEYIRDKDSWEAFEARVNLLRNNRKKENLLSKNFNDRELEFRERNANDNNYIARYIKQYLEDGIDFNSCNRQDIKNRVQMRTGSLTSYLRHCWGLRKDRNENDRHHAQDAIVIACATQGMVQYLSTVSKLWENKWQLAQSKEDGEAWYKSLKYKFSEPWNGFREDVQKSLDEIFVSRPPRKSATGSVHKDTIDKCSENISRLSVRGGEAIKENMFRCDVYKTNTGYKIVPIYVVDLVNKEFKHYIQPYEEIDGNKIEAQEADFFCSLYKDDYIEIYVDKDEKYGGYFNQYNAQSGQIYLGSVDNASVYKIRDKKETNGYHLANEKKISLSKCVKLQKYIISPLGDKVLVQKETQRFSNITKSNAQRHKERQQKG

SEQ ID NO: 5256 - protein, 998 aa, synthetic construct
  REGION 1..998: note = Synthetic
MKKKIFGFDLGIASIGWAVVEFDNEYFDPETGEVVEGKIVKSGVRCFPVAENPKDGSSLAAPRREKRLARRICRRKARRMESIKRLFVAKNLVSDLRELNDLYASQKGGDVWNLRIKGLSEKLSKEELLRVLTHLAKHRGFKSYRKAVEENDAERGRVLKAINENKKLLSKDNTLAQVIVERAGKTGKKRNYTESDAKGMAKAIYNNSIPRNEIERELNLIYAEQKQYGIFSEDLFEDFKKIAFRYRPLGSVADMVGNCTFEKGEKRAPKEAPSSEFFVAWGKINNMAVYENAQKRFLSMEEKKALFELLKTTPKVKYQTIAKKIFVGKDIQFADVNYNLIRKKSKDGSSKEVNPEDAVFYEMKGWHKLKSLFEKDAWSEISKDISLLDRVVNVVVCEKNDENIIKGLKHINVPEKYIETFSSLTTDKFINLSLNALYKILPYMVQGMKYNEACEKAGYDFREKTDKLVEKKGVLLSVIPAEKQTKVPVVNRTISQFRKVYNAMVRQFGAPDQINIETGRELKKNYEERRKIINKNKENEQERKEAEEELRQENIKETSKNIWKYRLYQEQDGKCIYSGKSIDLRRLDEEGYLDVDHIIPYSRSLDDSFNNKVLCLSSENRMKGNKTPFEYIQNKDDWEAFEARVNLLRNNRKKENLLNKNFNDRELEFKERNANDNNYIAKYIKQYLEDGLDFSSSNRQDIKNRIQMRTGSLTSYLRHCWGLHKDRNENDRHHAQDAIVIACATQGMVKYLSTVSGLWENKWQVAQLKDNGEAWYKSLKYKFLEPWNGFREDVKQSLDEIFVSRPPRKSATGEIHQETIRSLNPKHKNYNKKDIKSGILVRGGLANNGSMLRTDVFVKKNKKGKDEFYLVPIYLSDMGKELPSKAIVPLKFEDEWLQIDDNFSFKFSLYMDDLVKVKKGEKEIFGYFKGTGRTTGSITIEAPDRSIITPSIGVKTQDAFKKYSVDPLGNYTEVKHESRIPLTLIKSNAQRYKEQQKG

SEQ ID NO: 5257 - protein, 998 aa, synthetic construct
  REGION 1..998: note = Synthetic
MKRRVFGFDLGIASIGWAVVEFDNEYYDMETGEILADKVNGSGEIAQGTIVGCGVRTFPVAENPKDGSSLAAARREKRLARRACRRKARRKKGLQGLFAAKGLAESPAAFTDEICMRQIGGDVWNLRVKALQEKLSKEELARVLYHLANHRGFKSVRKAQEENDKDSGKVLSAIRANMALKEDGKSLAQIIVEKAGETGKKRNFSKVVKVNKKGEDVKEADYRNSIPRSEIEAELAMIFTKQKEYGIFTQDLYDDFVKIAFRQRGIKSVGDMVGNCTFEKDEKRSPKEAPTAEFFVAWSKINNLAVYEGDKKRELTPEERQTLFDVLKVTKDIKYKTIRSKVFKGKDIQFTCLNYSPKQKKNKNGELVTIDPEDVLFYNMKGWHKLQSIFKAEYSDIFNDIKKLDKAVTIIATEKEDVKIQEKLQELGYSQEKIDKFLTLSFDKFINLSLKALYKINPYLEKGEKYDKACANAGYDFKEITDKLVNEKGLLLAVIDKEKLTKVPVVNRTIAQFRKLYNAMVRQYGAPDQINIETGRDLKKSAEERKKIQKLQEENRDKNQSIKKQLLEWGVKDNGTNITKLRLYNEQQGKSIYSGNEIKIEQLFDDGYVEIDHILPYSRSWNNSQSNKVLVLARENQEKGNQTPFEYIGKSDAKSKEWTDFTSYVTSFASIEKHKKEKLLLETFNEREQEFRDRNANDNSYIALYVKRYLEDGIDFGKSLHTEIKNKVQVRSGNVTAFLRRQWGLEKDRTESDKHHAQDAIVIACAAQGMVQALSKISRKEGVVHTDAVHRKYAIAKPWDNFRNDVLTALEKVFVSRSPRKKASGEIHSETIYTLNEKKKQFEAKNAKSGFYVRGGIAGNGDMLRTDVFCKKNKKGKVQFYLVPIYKSNLGKELPNKAIVANKNEDEWTVIDESFSFMFSLFLDDLIKAQKDETVTFGYYKGVDRANAAITIEVHDRSQDNARIGTKTLDSIKKYQVNLLGEYFEVGGEKRQLLTHEE

SEQ ID NO: 5258 - protein, 999 aa, synthetic construct
  REGION 1..999: note = Synthetic
MRRRVFGFDLGIASIGWAVVDFDNEYYDMETGEILADKAKGSVEIAQGKIIDCGVRCFPVAENPKDGSSPAAARREKRLVRRACRRKARRKEGLRGLFVAKGLVANSEEFTEEICKNQFGGDVWDLRVKALHEKLSKEELLRVLYHLAKHRGFKSARKAQEEKDKDSGKVLSAIRVNMALKEEGKSLAQIIVEKAGVNGKKRNFTVSVKKGKNEKKVEADYRNSIPRSEILAELNMIFAEQKEYGIFTQDLYDDFIRIAFRQRGIKSVGDMVGRCTFEKDEKRAPKEAPTSEFFVAWSKINNLAVYEDDEKRFLTTEERQLLFELLKKTKEIKYKAISAKIFKDKNIQFACLKYSSKSEIDDNREEKNADPENAVFYSMKGWHKLQSVFKALPHIFDDIEKLDKAVTIIAEEKEDREIKEKLENLGYSQEIIAQFLTLTFDTFINLSLKALYKINPYLEKGEKYDKACASAGYDFKEISEKLVEKKGKLLPVIDKDKQTKVPVVNRTVAQFRKVYNALARKYGTPDQINLETGRELKKSFEERREISKRQEENRNKNQSAVTQIEEKGYKATGTNILKWLLYLEQDCKCIYSGKPMDINRLFEVGYVEIDHILPYSRSFDNSYSNKVLVLSTENQEKGNRTPFEHIGKNNVGSEKWMEFIGRVSSHVNLHRIKKEKLLNETFNERELEFRERNANDNSYIALYVKRYLEDGIDFSESLHTNIKNKVQVRSGNVTAFLRHQWGLEKNREESDKHHAQDAIVIACATQSMVQALSKISRKEGLVHREHVHKKYVIAKPWGNFREDVLIALDKVFVSRPPRKKATGGLHGETIYTLNEKKKQFEAKNVKSGFYVRGGIAGNSEMLRTDVFCKKNKKGKNEFYLVPIYKSDLGKNLPNKAIVAGKGEGEWIVVDESFTFMFSLFMDDLVKVQKGETVYFGYYKGTDRATAAMTIEAHDRCWKQRSIGVKSQDAIIKYQVGLLGDYTEIKEEKRLFLMSTKKRI

SEQ ID NO: 5259 - protein, 1263 aa, synthetic construct
  REGION 1..1263: note = Synthetic
LSLRVLGLDVGVTSVGWAVVSVDNDDKSKNKIEKCGVRLFEGVAQDRHENLKCAIWASAKSSRNRFKARRKRLNEIKKVFEAIGFIDFSFDFEAFHKNLYQRGENIYTLRAKSLKEKIEKIEIFACIYHLAKHRGYRSGPVINVGKKEGSKVKILETREKLQGKTFAQFLVENNANATQPTYRNRGEEARFMADKDMIECEVRAILEKQGECYYDTLDSAFIQKIIDIINQKSASINKDFIENMLGNCQFEKEEKRTSSDTLTAIISRILQKINNIKIIENGEIKNLINAESGESKSAETAQLVQKLLLAFFKDYELSYAKIREIAKLDENAIFKDLNYKEFVIKEIYKIFKDYLPKTSQKAKNGDSANSIDSANVSQNSKNPNVFKHFPTFAQDLYGLLQSSQFVESKVPESSTFKMIIESNLAQNKAISDISNLESRISSLKKLSNYKSGLEKEANLFADKNLKMIAEALEALNLKFDSVESIFEKRDFIDSIIFDFFFYKDYLELEEHLSLKVPDKNARDKVANELFQKVKGTSNLSLKALKKIEPFLLQGYKYTEACEKAGYSKEESTQRFTYLPLMRDAMKMGLIGVNNPRVRKINNQVIKLINELIRRKIYFDRIHIELARDIPQTKNEAIEKAKSNKEVEKLKKQAIEPLSDILGANPNPKDILKARLWLEQNERCPYCGEKLVRTDWGHFDIDHIKPLPRSYDNTYSNKVLAHKSCNQSKGMRLPLEWLSGEAAEKYRVRVEGLANIGKRKLKNLLMLEIKDEDIENPRILTESRYAVRFLKNYIEKHLDFERFSPESNLPKSKEGARFQRVQTRNGGVTNILRNYWHIGAQDSNNIDESMARYKKDRLIHTHHAEDAIILAFATQGIVQKIHTIATEISLSHDTKEAMDYTTGEITITESAQNAKHKAIQKRLHSSAPLENMPQKVENAIRNIFPSRMATRRKQYGQIHDDTIYSVRDKSNNYKKLSKAEVEEKIQAKDIENLVIIKTQKLSDKYAKDGKAKLEKNLENMIDKDTRNKKLYEAIKAFINSDESECKYAGVAVRGFKYYEKFTPTALFIRGGVATRSLQQKYLVYKKNGFYYIGLVYFGDNIGDDKNARVQITDKDKDYEYREYSDNGYSYEMTLHKNDLIYYEQENKSLKDGVERHVYYIDLFNTARKSAQMFFKDPVVSQTLKTNKKGETADEKYSPSVKFGKLSHNNITKLEKLEIDLLGNVYRIVNGEKTNFTKEALAIMHAQKAEAKSKESKKSKKSLES

SEQ ID NO: 5260 - protein, 1442 aa, synthetic construct
  REGION 1..1442: note = Synthetic
MPVLSPLSPNAAQGRRRWSLALDIGEGSIGWAVAEVDAEGRVLQLTGTGVTLFPSAWSNENGTYVAHGAADRAVRGQQQRHDSRRRRLAGLARLCAPVLERSPEDLKDLTRTPPKADPRAIFFLRADAARRPLDGPELFRVLHHMAAHRGIRLAELQEVDPPPESDADDAAPAATEDEDGTRRAAADERAFRRLMAEHMHRHGTQPTCGEIMAGRLRETPAGAQPVTRARDGLRVGGGVAVPTRALIEQEFDAIRAIQAPRHPDLPWDSLRRLVLDQAPIAVPPATPCLFLEELRRRGETFQGRTITREAIDRGLTVDPLIQALRIRETVGNLRLHERITEPDGRQRYVPRAMPELGLSHGELTAPERDTLVRALMHDPDGLAAKDGRIPYTRLRKLIGYDNSPVCFAQERDTSGGGITVNPTDPLMARWIDGWVDLPLKARSLYVRDVVARGADSAALARLLAEGAHGVPPVAAAAVPAATAAILESDIMQPGRYSVCPWAAEAILDAWANAPTEGFYDVTRGLFGFAPGEIVLEDLRRARGALLAHLPRTMAAARTPNRAAQQRGPLPAYESVIPSQLITSLRRAHKGRAADWSAADPEERNPFLRTWTGNAATDHILNQVRKTANEVITKYGNRRGWDPLPSRITVELAREAKHGVIRRNEIAKENRENEGRRKKESAALDTFCQDNTVSWQAGGLPKERAALRLRLAQRQEFFCPYCAERPKLRATDLFSPAETEIDHVIERRMGGDGPDNLVLAHKDCNNAKGKKTPHEHAGDLLDSPALAALWQGWRKENADRLKGKGHKARTPREDKDFMDRVGWRFEEDARAKAEENQERRGRRMLHDTARATRLARLYLAAAVMPEDPAEIGAPPVETPPSPEDPTGYTAIYRTISRVQPVNGSVTHMLRQRLLQRDKNRDYQTHHAEDACLLLLAGPAVVQAFNTEAAQHGADAPDDRPVDLMPTSDAYHQQRRARALGRVPLATVDAALADIVMPESDRQDPETGRVHWRLTRAGRGLKRRIDDLTRNCVILSRPRRPSETGTPGALHNATHYGRREITVDGRTDTVVTQRMNARDLVALLDNAKIVPAARLDAAAPGDTILKEICTEIADRHDRVVDPEGTHARRWISARLAALVPAHAEAVARDIAELADLDALADADRTPEQEARRSALRQSPYLGRAISAKKADGRARAREQEILTRALLDPHWGPRGLRHLIMREARAPSLVRIRANKTDAFGRPVPDAAVWVKTDGNAVSQLWRLTSVVTDDGRRIPLPKPIEKRIEISNLEYARLNGLDEGAGVTGNNAPPRPLRQDIDRLTPLWRDHGTAPGGYLGTAVGELEDKARSALRGKAMRQTLTDAGITAEAGWRLDSEGAVCDLEVAKGDTVKKDGKTYKVGVITQGIFGMPVDAAGSAPRTPEDCEKFEEQYGIKPWKAKGIPLA

SEQ ID NO: 5261 - protein, 1382 aa, synthetic construct
  REGION 1..1382: note = Synthetic
MKRILGLDLGTASVGWAVVNEAENSEEQSSITALGSRVVLLSADEKNNFLTGKSVSATATRTAKRGARRNLQRYKLRREWLKDALVSSGIINENTCLNDSNSKELFATYVSRAKAVTEQIALEDFAKVLFMINKKRGYKSNRKTDNTESEDGQIIDGLDLAKKLKARNITPGQYLLELFKENKKNKAVFYRSDLQEELNRIWAFQSQFYPEILDNTLLSAITNKSKKAVIGLFKGIKNVEIADVKTKERTEKALTWRSEALHKQLEIGEVAYAIAEVMGAISQSSARLALLSDNSKHLEFEGLTIGQYLLNLLRNNPNSSLKNINFYRKDYEDEFNSIWNKQASFYPQLTESLRSTIFNSIFMQRNLKSCKALLANCELEFAEKKITLPEGSCQTRTIYSKVCPKSSPYFQEFQIWQSLSNIRIIDKENTHLTKGQELSYDQKVMLLPELMIHSELKANKVIEILFGKKSNYTINMPSIKGNRTNETIFNALLEIVELTGHSIDNIVKTDANQQIETVKNIFDNLGYKTNFITFDSTIEGKDGLNQPYYKLWHLLYSYCGDNSKTGNEALIRKIEELTGLEKEEAKVLSNCTFENDYASLSTKAIRKLLPHLQSNLDYSEACEAAGYNHSKRSRTKEDIKNKTYKDELDLLPRNSLRNPIVEKILNQMIHVINQTSEAYGKPDEIRIEMAREIKKNKIQREKLANQLRQNTAELERIKDILRKDFKLSHISHNDILRYRLYEELSLNGYKTLYSNTYIERQQILDPTVTIEHIVPKALAFDDSFSNKTLEIQSVNGEKSNQTAFDFISKKYGSEALEQYINRVNNLFENGKISKTKRDNLLRKQEDIPSDFLNRDLRNTEYIAKKALEILEDYVPRVTPTIGEITKTLREDWQLVNIMRELNWEKYNSLGLTSFYYDRNGTKIGLIHNWTKRNDHRHHAMDALTIAFTKPSIIQYLNNLKSQNDKGSSIYAIQAKETYIDETRKRLIKPPYDIKQFRNDAKQMLDNIFVSHKAKNKVVTPNTIVTKKKRKAGKETKAEKKRTFLTPRGALSNETVYRKICNYETKEITINSKLTYEIALTIAKKKEREAVLERLAQHNNNPTTAFKNYNKNPIMLQTSVGEKPLMSVKIVNYKELFVKRSEINEKLDIKRVLDAKVRARLTDRLKEYNNDPKAAFANLEENPIWLNEEKGIALKHVTTIERVVGLPIRPKRNINGEIMKDEQGQPLKSHYVATGGNHHVAIYEDEEGKWHEKVVSFNEAASRAIQKFPIIDKDFNKELGWVFQFTMKQNEMFVFPDKESGFDPLAIDLKDPANKSLISKHLYRIQKISSGDYYFRHHLETNVEENKEVKGITWKRIRSVSSLQGIIKVRVNHIGQIIDVGEY

SEQ ID NO: 5262 - protein, 1449 aa, synthetic construct
  REGION 1..1449: note = Synthetic
MNMKKIIGLDIGTNSIGWAFIELKEFGKAGTISALGSRIIPMDGDALQKFEKGNTVSKNADRRQSRMSRRLKQRFVLRRTRLITALKIAGLVPDSFPIDFKAAENENSGARFNINDFLPIASSSIHEAKQELGASAIPQDWVLYYLRHKALSQKITIHELVRIIYMMNQRRGFRSSRKDITEQEETDEIRYPIIEKWVQILTIKEITEIAEEKGKKVFQVTGSGVGGNIVGQIERRNPPDWLHKEVELEITKKTTKSGDVSYRFSLPDSSAWEQQKTALNKDIRETIEHGQCQTVGEYLFLHLKKEKNYRIRQRIVDRDLYQAEFEAIWKKQAAYHPELNDRSLLPDIAMALYQHNEAKRKEIIANDLFYLIANDIIYYQRPLKSQKHSIDFCTYEKKYDPKGNEFGIRVAPKSSPAFQEFRIWQTIHNLRVLQLEGALDGKPQIDIDVTDQVLIPLAKAKLFLLFDSRKEVTHPAILRELGLNPKTYRLNYPAEKNFTGNETKETFRKVFRKHKWEEGENLLKNSRQFDSLWHILYSLPDPSSITKALSTPGNQWHIPNNIIQHLSNLPDFPKQYAAYSTKAINKLLSLMRCGSYFDAATIDPVTKARIDKLITGEFDESLSSELRDKVNQSKEKYKFLQTEDFQGLPHWLAAYIIYGRHSEKENTTRYSSPDEMVVSDLIPNNSLRNPIVEQICKETISLVKSIWEQYGQPDEIHIELARDLRKTSEERKRLSDIQFANENDRKRIKSILRQLKNANPESLVDIEKLRIWEETGSEEAIRTSVKFSKEPTQAEIEKYKLWGEQNHISPYTGRIIPLSKLFTPEYEIEHIIPRSRFFDNSIGNKTICEAAVNDYKGSRTAREMIEEEGGRTITHKGQTFTLLNPESYIDNCKKIFRGKKRIALMREEIPQDFVERQVNDTRYITRKIAELLYPVTRNENGIVFTIGQITSELKDKWGLNRVWKEILKPRFERLEVLTGERLIEWDNDHNNIHFKKDYKRIDHRHHALDALVIACTMREHVRYLNTLNAADEKSKYQYLVKRRYSDFILPWETFTREAKAKLHEVIVSYKNKNRVITKGINRHTKWVQQKDGSWKKELTRQMKGKLIAIRRSMFKEPLGKITLREYKTVTVKQAVDLQLAALRSNDKSIAPQIADKLLRQQVVEIIRNSDFDKKEVEKFLSKHPLSDDSGNIISKIQITHFNDYAAKRVKLDESFTHEKIDKIPHAAHSWLARLLHDHLTSFNNKPEEAFKGEGLDILNKAAGPPINKVTVYEDIGKKIPFKGKLVEADKGSNLFFVIYESLSDRSRIINESSSVPLLEAIERFTNQLPIADEKPGYKTIVLSPNELVYVPEEGENIKAIDWGGEIRKIHDRIYKVVSFSKAQCFFIPHFVSKPLDENGKELGSNNKSERAWNGEMIKNVCVKIKVDRLGNIVEVDGRKIHASKASEIQ

SEQ ID NO: 5263 - protein, 1431 aa, synthetic construct
  REGION 1..1431: note = Synthetic
MKKILGLDVGTNSIGWAVISLNQFGQEGAILGLGSRIIPMDGDAMQKFESGATVSKTADRRMARMARRLKQRFRLRRTRLITALKTLGWMPDGFPVLFREAKSFSMRQYLPFDASIIAEAQEAFGSKSISEDWIVYYLRTKALEHPIPLSGLVRILYMMNQRRGFRSSRKDEKDEEQDEIKYPLFEKWVQILTVSEITEVSEEKGIKTLNVTAGDITGQIKRRAIPDWVGQEMELEVTRKTTKAGEVTYTFAMPDPTDWEKKKTALEKSILKSGHHPGEYFFHHLISDPNYRIRQNIIDRSLYEREFEAIWKKQATFHPELADTSKLPAIADLLYKNNAAKQKELCANDLYYLFSRDIIYYQRPLRSQKHSVGHCSLEKKGNGYGIKVAPKSSPEFQEFRIWQTIHNLKALELSAETEGKPLLDVDATEQHLTDEKKALLFALFDSRESVSHHAILKELGLNTSGYRLNYPSDRDFQGNETKAVFRKVFKKHAFDAGNALLDNADTFYRLWHILYSLNSRKEIASALSNPKHAFGLPEAVIAHLSKLPDLPKQYAAFSSKAIRKMLPLMRCGQYFNWDNIPVSVKTRIDHIVTGEYALGISDDARDKIASFNLRENADFKGLSVPKASYVAYNRHSERENSGKYEAPDDINVPLLIPNNSLRNPVVEQVIKECLSLVKDVWAQYGQPAEIHIELARELKKTAEEREKADKKNRENEADRKRIRAILRELQNANPNSPADIERIRLWENTGNETARSTAVRFSKEPTRSEIERYKLWGEQNHISPYTGKVIPLSKLFTPEYEVEHIIPRSRFFDDSFLNKTICETCVNDFKGNRTARQLIETDGGRTITHKGHTFTLMDTMAYYAHCQQTFQGGKYRNLMREDIPNDFIQRQINDTRYITRKLAELLYPVAREKEGIVFTIGQITSELKDKWGLNRVWKEILLPRFERLEQITGEPLIQLDTAHNNIHFKTDYKRIDHRHHALDALIIACTTRQHIQYLNSLNATDEAGKYRYLVKSRYSDFVLPWESFTKEAREKLQQVIVSHKNRNRLLSKAVNRYSKWVQTPEGTWKKQLVKQEKGPLTAIRKSMFKEPLGKITLREYKDVTLKQAVDTQLKALQGTTRDQVSQVADASLRKQLNELLKNCAYNLKEAEKHLKKYPLLDGDGKALSKIRVTVFNNYAAKRVTLDSSFTADKIGKIPYAKNSWLANLLLQHLEEYQGDPNLAFKGEALDLLNRKAGKPIHKVTIYEEIGKKIDLHGKLLEGDKGTNLFFVIYENTSTGQRVLTKKSTVPLMEAIERLANKWPVAEALEGHRPIILSPNDLVYVPEIGEDVSNITWENLTKIQQRIYKVVSFTKQECHFVPHHIARPLDDKNRELGSNNKSERAWDGQMIKNTCIKIKVDRLGNIIEANGRKVIHHQEINPSHQPETTPEP

SEQ ID NO: 5264 - protein, 1430 aa, synthetic construct
  REGION 1..1430: note = Synthetic
MGDIKMKKLLGLDIGTNSIGWALIDYDFDNKTGEIKALGSRIIPLEADKLKDFQQGRSASLAAERRMARQGRRLKYRYKLRRERLIKVFKILGWFPQNFPEKFEEDDHFNINDFVPFSDQTIQEAKELFNVVNLPNDWAIYYLRDKALREQISLQLLARIIYHFNQRRGFKSSRIENKSPDVVEQEVFPKTETFYEFLKITSIKETTEKRKSNRVFIVEGKTKDNVTYSGTLSRKTKPDWLNQEIELEITKTTKKDGTVSFTFKEPDRSNWEERKLALEKDIKLSGLYVGQYHLKKLLEDRNYRIKEQIVDRKFYQEELEAIWKSQERFYPELKNNPKIEVIAKTLYQHNEQKQKELQKLSLLEIIKDDIIYFQRPLKSQKKLIGECRFEKKNFIDQYGRQPGYKVAPKSSPIFQEYRIWQTINNLRIFKREEKQPDGKFKFDVEKTDEVLNIENKEKLFKLFDSKDDVKIDEIIKAIGLSPDEYRINFPQDRELKGNETKAAFRRVFKRHNFIEEGEKILENRELFFNLWHLTYSVTDENQLSKSLIKKFNFSEDLAIHISKMPPFKKEYAAYSSKALKKLVPLMRCGNYWNEKEIDPSTKQRIEKIIDGSLKSSFPEEIISKLYSGSYKSISDFQGLPVYLACYVVYGKHSERELYEKFDSPDEIDHLKMLPTNSLRNPVVEKVIRETLLVVKDIWAQYGRPDEIHIELARDLKRNAKEREILTKQMLENEKERKRIAEILKYIKNANPNSPMDIERLRLWEELGTKEAKETFPKLSANPTKAEIQKYLLWGEQNHISPYTGKVIPLSKLFTEKYEIEHIIPKSRYFDNSLANKTICEAEVNRFKENLTAMELIQQYGGTTIPNTKIKLLTLEEYTQHIKSTFRGRKLSNFMRLEIPENFINRQINETRYITRKLGELLYPVAKESLIFTIGSITSELKEKWGLNKVWKEIIKPRFERLEKITGDKFIFYDKETNNFHFAKDYKRIDHRHHALDALVIGLTQREHIRYLNSLNAVDSSDELMEVKYRLVKKGIREFHLPWKTFTKDAKEKLKEVIVSFKNKIRVVQRGRNKYWKWVNENGKWFKKLVPQDNSKLFTVRKSLFKEPSGIINIAEYKDVNINEAVKYQFEYLTNRQSNLQERIANKKLRKKINELIKNCNFDLNETLEHLKKYPLKDDKGNKLKKVTILYFKEYSAKRVSLDQSFDERKIDKIPYSNHPDNRLVKLLKNHLKEFNNNPKDAFTGEGLEQLYKKYGKPIRKITIMEEVGKKIPIKGKYFEVDKGTNLFFVIYENINDPTDRIIDENSSISIVDALQVFINGGKKEDLGENKPGYKKIILSPNDLVYVPEPGETVNLIDWNNKAKLSQRIYKVVNFTKSQIFFIPHFIAEPIIQTTELGSNNKAERSWDGIMIKKVCIKLKVDRLGNISPEI

SEQ ID NO: 5265 - protein, 1427 aa, synthetic construct
  REGION 1..1427: note = Synthetic
MKKILGLDIGSNSIGWALIENNFNERKGKILGMGSRIIPIETELLKNFEQGLSASKAAERRAARQIRRLRHRYKLRRERLIKVFKQLGWFPQNFPEKFDSLEQFNINDLVPFSEETINEAKQIFKVEKLPVDWAIYYLRDKALKQKITLNELARVIYHFNQRRGFKSTRKEKSDSESIEEIDNKKVFLEYIRVESITDTGETSRGKKVFLLNGKSPDGKIYTGKLIRKEIPSEWINNTIQLEIAETQTRNGETKVEFRKPDLTDWKKQLTALEKEIKSSGLYVGQYHFYNLIADPNYRIKEKVVSRNFYQEELEAIWKKQSEFYPELNDRSKLEDVAKLLYPHNIQKQQELLKGDLLNIIENDIIYYQRPLKSQKKLIAGCRFEKKNYVDIYGNRPGYKVAPKSSPLYQEFRIWQDIHNLRVFQKEFKTPDGKYLFDIEQTDILLNTENKEKLFELFDNNAKIKVDDILSTLSDSNFKVSKDTHRINFPEDKEFPGNETKHKFRQAFKKFNYTEEGEKILNDPDKFFELWHIFYSLEDELVIKNVLIKKFGFSNELASYISSLPSFKKDYAAYSSKALKKLLPLMRCGKYWRPDEIHPETIERINKIISGELLPKFPENIQKIFKNGNFQSLNDFQGLPVYLATYVVYGLHSERENYEKFESPDEIDTNKLLPNNSLRNPVVEQVVRETLNLVKDVWKQYGQPDEIHIELARDLKNNSETRKKIADAMRQNEKDRRRIIGILRHLKNANPYSENDIEKLRLWEETANIDAKLSMPKISDNPTEAEIQKYLLWGEQNHISPYTGKVIPLSKLFTNEYEVEHIIPKSRFFDDSFANKTICEAAVNKYKDQRTAFEFISELGGTTVPDTNIRILTMDEFRQHINLTFKGKKKNYFLRQSIPDNFINRQINETRYINRKLGQLLFPIAKESIVFTSGQITAALKSEWGLNRVWKELLLPRFERLEKILGQQIIIRDETNNDIHFNIDCDKKRIDHRHHALDALVIAATTREHIRYLNSLNAADKDEIQQIRYKLVKKGIREFHLPWLTFTKEAKEKLQGVIVSYKNRMRIVQKGYNKYQKWVYENGKWVKKFVTQDRSKLYSIRKSLFKEPLGVINLATYKDVRVNEAIKIQFEYLTNYKDSLQPRIANKNLRNQVNQLIKNCSFDLKETLDYIKSKPLKDENGKPLDRITILKFEQYAGKRVQLDATFDETKIDKIPYSYHNPIVKILKEHLAEYNNSSKEAFTGEGLEKLYKKIGFPIRKVTRFEDIGNKLNFKGKLFETDKGGNVFFIIYENIHDPTDRIITAESSISVLDAVQAFIEGKKKNDLGEYKPGYRKIILSPLDLVYVPDDGEVIESIDWSNTEKLSNKIYKAVSFSKGSIFFVPHFVAKPIVETKELGSNNKAERDWTGKMIKERCIKLVVDRLGNIKPE

SEQ ID NO: 5266 - protein, 1432 aa, synthetic construct
  REGION 1..1432: note = Synthetic
MKTILGLDIGSNSIGWALIEQDINNKTGKILGMGSRIIPFDSDLIKNFEAGRSASLAAERRKFRQMRRLKSRYKLRRERLIKVFKVLGWFPENFPEKFDKLNHFNINEYVPFSQESIEEAKKVFNVDNLPIDWTIYYLRDKALKQKITLSELARIIYHFNQRRGFLSTRKTEEIDTFKQGDEEQNDKSKEILYEYLKVEEIIDTNEKVGNKNKFKLIATSPDNIKYEGSITRKDLPKDWIGKTILFEIKKTTLKSGEVKIEFNRVLESDWKKQITALEKEIVSSGLYVGQYHFKNLLADPNYRVKEKVVSRKFYQEEFKAIWKKQAEYHPELNDTSKIPLIAETLYPHNIQKQRELSKLNLLEIIKDDIIYYQRPLKSQKKLISECRFEKKNYIDDLGRQPGYKVAPKSSPLFQEFRIWQDIHNLRVYLKEKKLDDGSRIFDVEETNFLLDTKGKEKLFDLFDSKTNIKIDDILSALSKPDYPVSKKTHRINFPDDREFKGNETKAKFRNAFKKFNYNEGEELLQDRNKLFELWHIFYSIDDEKVISSVLQKKFGFSQELANYISQLEPFKKEYAAYSSKAIKKLLPLMRCGKYWNQEDISDDAIERINKIISGELISEFTERVREEISKRNFMTIQDFQGLPVYLATYIVYGLHSERENYEKYDNPDEIKVDKLIPNNSLRSPIVEQVIRETLKVVQDVWKQFKQPDEIHIELARELKNNAKIREQLTKAMSENQKERKRIVEILKHIKNANPNSEKDIEKLRLWEETATPEHKKAMPKISTNPTSEEIEKYLLWGEQNHISPYTGKVIPLSKLFTQEYEVEHIIPRSRYFDNSFANKTIAEASVNKFKGDLTAYEFISMYGGTIVPGTKIKLFTLEEFKQHIDGIFKGKKKGYFLKQEIPKDFINRQLQETRYITRKLGELLYPIAKDDVVFTTGQITAELKENWGLIRVWKEILKPRFERLEKILGEKIITINKETNEIIFNIEYDKRIDHRHHALDALVIAATTREHIRYLNSLNAANQEDLIKIKYQLVKKGIREFRLPWPSFTKEAKEHLNSVIVSFKKKNRLVQRGYNKYQKWVFENGKWVKKFVLQDRSKLIAIRKSLFKEPLGIIHLASYKDVPLTEAIRLQFEYLTNFKNHLQPRIADKNLRHKVNQLIKNCSFDLNETLNYLKQNPLKDNKGNELKKITILYFEEYAAKRVNIDESFDLTKIDKIPYANHPNNRIVKILKEHFSEYGNKTSEAFKGEGLEKLYKKFGIVIRKVTRTENVGNKINLNDKLLEIDKGGNVFFIIYQNIHDPYDRIVTEESSISLLDVIDAYIQGKKISDLGENKPGYKKIILSPNDLVYVPDDGEVIESIDWNNRKALSNKIYKVVSFSGRQIFFVPHFIAKPIIETKELGSNNKSERDWKGKMIRDRLIKLNVDRLGNVYPE

SEQ ID NO: 5267 - protein, 1431 aa, synthetic construct
  REGION 1..1431: note = Synthetic
MQKILGLDIGTNSIGWSVIEHDLENHDGRIVGLGSRIIPMEGREKDFEAGTTVSKTADRRQTRSARRLLQRYKMRRIRLIKVFKELGWFPNDFPEEFKDLEKFNINDFVTFEQSTFEEAKEIFNTDKISTDWIIYFLKTKALKAKITLQELARVIYHFNQRRGFRSSRKDKKEEELNKGEIKYPLREKIIEILKVNLIEETEEKSKYGKVFQVTGVNPEGNDYKGTLIRKAKPDWEKKSVELEITKVTNKAGDIRFEFRLPDRTDWTRMKIALEKDIKESGLFVGEYYLMHLLQDRNYRIKDRIVDRSFYQNEFDAIWKKQSEFHTELNDKAKLPTLINILYKHNNEKINELQANDLHHLIKNDIIYYQRDLKSQKHLVAECNYEKKKNEKGDVFGIKVAPKSSPVFQEFRIWQDIHSLKIFRLEQTQANCKTKFDIDESNIHLNNRGKEKLFKLFERKTSISRKDIFKELSTEEIKLTEATHRINFPEEKEFKGNEIKTKFRTVFKIHDYEDEGEKILNNDKKFELLWHIVYSLKEEKHIESAVKRNFGLDDEIAKHISKLPEFPSQYAAYSSKALKKLLPIMRCGSMWNEDKINTETIERINKIITGEFDTNIPLKVREEITKKGFKQISDFQGLPTYIACYLIYGRHSERENENKYNSFDEIKLLEQNSLRNPIVEQITNETLQVVKNIWKEYGRPDEIHIELARDLKKNADERKKISNQITKNEVERKKTVAILKELKSANADSQSDIERLRLWEETGDRIARESYPNFSKEPTRQEIEKYILWGEQNHISPYTGNVIPLSKLFTAEYEIEHIIPRSRFFDDSFGNKTICEASINKFKDNYTARQLIEEYGGTEIKATGIKLLSSVEYIQHVKNTFYGKKRRHFLNEEIPEGFIERQINDTRYIGKKLGELLFPVANDGVVFTIGSITSELKDKWGLNRVWKELLKPRFERLEEITGERLIDFDKEHNDIRFKKDYKRVDHRHHALDALIIAATRREHIRYINSLNAADTDKELRDIRLKLVKKKIREFVLPWKTFTKDAKEALQTVIVSYKNRTRVVTKGFNLFTKWVLENGTWIKKSIRQEKGQLLSVRKSMFKEPLGIIHIAEYKDISIKQAIEIQFDYLTKYNSKLQTRIANKELRNTINTLIKNCLFDLTETQKYVKSNPIKDDNGNTITKIQILEFNKYAAKRVALDKSFDAKKIDKIPYAKQQNNRLVKILHEHLKDNGDNPQEAFSGEGLSVLAKKYGKTIAKVTTFEEVGNKISFKGKLFEADKGSNLFFIIYENFSDSRDRIINTESSIALIMAVDAFANGFTKEDLGEDKPGYKKIILSPNDLVYVPELDENMKSIDWNNKKKISERIYKVVSFTGQKCFFLPHYISALLLPYDKATGIGEFESQNKSEKSLDNIIIKDVCIKVRLDRLGNIKPIM

SEQ ID NO: 5268 - protein, 1437 aa, synthetic construct
  REGION 1..1437: note = Synthetic
MKKILGLDIGTNSIGWAMVAMGEFGKTGRILGLGSRIIPMDGDALQKFESGNTVSKTADRRMARTVRRMKQRFKLRRTRLIQALKTLGWIPGEFPLDFRQPEMRPFVLKDYLPFESATIEEARRAFSVEALPEDWIVYYLRRKALYEKISLADLARIIYMMNQRRGFRSSRKDQREEDDINEVKYPIYEKWVQILPVTGIAEISEEKGIKTLEIKAGDLTGQIKRKNIPDWSGKEIELEITKKTIKSGEVTVSFALPDPNDWEKKKKALEENIKDSGYYAGEYFFHQLVLDKQYRIRQRIIDRTLYRQELDAIWQKQATFHPALNDTAKLPEIATMLYKHNVQKQNELIANDLLYLFANDIIYYQRPLKSQKHRVDRCTREYKEDDKGNKYGVRVAPKSSPEFQEFRIWQQIHNLKILEMEGETDGKPQLDVDRTELYLRSEQKAKLFDLFDGRAAVSSGAILKELGLAHRQFRLNYPEEKEFPGNETKAVFRKVFRKHGYTSEGENLLNDPVKCYLLWHILYSLNDAKDIVSALKNAKHGFGLTEEVIYHLSKLPDLPKQYAAFSSKALRKMLPLMRCGKYFSPDAIGALTREKIEKILDGELDSRISDDLREMIKKLNLKTVEDFQGSATWLADFILYDKYASRENNSKYEFPDDINIPELIPNNSLRNPVVEQIIKETLGLVKEVWTQYGQPDEIHLELARELKKTADERKKIDDRNKANEADRKRIRAILRALKNANPDSVTDMERIRLWEETGNEEARTNAIKFSKEPTSAEIERYKLWGEQNHMSPYTGKVIPLSKLFTPEYEIEHIIPRARFFDNSFLNKTICESSVNKFKDKLTARQLIEASGGETISNNGNTFTLLDASAYFDHCKRIFRGGKYRNLMREDIPKDFVQRQINDTRYITRKLAELLYPIAKDKEGIIFTIGSITSEMKEKWGLNHVWKELLRPRFERLQVITGESLIDFDPANNSLHFKKDYKRVDHRHHALDALIITCTTREHIRYLNTLHAAEEASKYKYLVKSKYSSFVLPWETFTKEAKEQLGMVIVSHKNRNRLVSKAVNKITKWKMGKDGKWSKHVVPQVKGELLAVRKSMFKEPLGKITLREYKEVSIKQALEMQFQALKMPDKTSIPQVADTFLRKQLNELIRNCGFDLKETEKHLKKYPLKDMEGNILAKLFVTQFNTYAAKRVTLDKSFTVDKIAKIPNAEHSWLARLLLQHLETYNSDPNEAFRGEALEALNKKAGKPINKVTVYEEIGKKVDFNGKLVEGDKGTNLFFVIYEKLATGERVINEDSAVPLLTAITRLANKWPIAEQRDEFRPIVLSPNDLVYVPEPGEEVSTIDWMHDKARINNRIYKVVSFTKAQCFFIPHFVSRPLDDNAQELGSNNKAERAWDGQMIKNVCVKIRVDKLGNITEVNGKKIYHSSHLENAASNLTQ

SEQ ID NO: 5269 - protein, 1430 aa, synthetic construct
  REGION 1..1430: note = Synthetic
MKNILGLDIGSNSIGWALIENDLEEHTGKIIAAGSRIIPMEGREKDFEAGNSVSKNADRRVTRSARRLLQRYRLRRTRLIKVLKTLNWISNNFPEDFKHLDKFNINDYLPFSTETIEDAKKLFNSQSIPNDWIIYFLRNKALKEKITLQELARIIYHFNQRRGFKSSRKDRKEELTETEEIKFPLREKSVEVLTINSIQETGEKNKFGKVFLVHAATPELNQIVGTITRKMIPDWISKKIELEITKITNKAGEIRYEFRLPDRSDWEKMKVALERDIKESGLHISQYHLNQLLVNRNYRIKDRIVDRSLYQAEFDAIWAKQSEYHKELNDNSILPSLVELLYKHNYEKRNELLKNDLHYLLKNDIIYYQRDLKSQKHLIADCRYEKKMDNNGNIYGVKVAHKSSPVFQEFRIWQDIQSLKIFRLEQIESNGKIKFDVDETKIYLTQDKVERLFTLFDKKNNLTQKEIFKELSDEKHKLSETTHRLNYPKEKIFKGNETKSFFRKVFKKHNYEIQGEQILNDKSKFELLWHIFYSLPDEKSIVSALTRNFSFPNDLARHIAKLPEFKSEFASYSSKAIKKLLSLMRTGSYWKMEDISQQIKERIEKIITGEYDENISIAVRNKIVDWQIHNKKLNSIECFNGLPLWLAAYVVYGRHSERENSDKFESFDEIKLINQNTLRNPIVEQITNETLQVVKEIWKNYGRPEEIHIELARDLKRNAEERKKINDQIFKNQTDRKRVVAILKELKNANSDSPSDIERLRLWEETGNREAKDSFPKFSKEPTKQEIEKYLLWGEQNHISPYTGNIIPLSKLFTPEYEIEHIIPKSRFFDDSFGNKTISEASVNSFKDNNTAMQMINEHGGREIEHRGKRFKLLSVDEYKQHIKSTFYGKWKKVNYFLREDIPEDFITRQINDTRYISRKLGELLYPVADDEVVFTIGSITSELKDKWGLNRVWKEILRPRFERLEKITGEKLIDLDKEHNDIHFKKDYKRVDHRHHALDALIIAATSREHIRYLNSLNAASEKDKLNRKYKLVKSKIREFNLPWDTFTKDVKDTLKQIIVSHKNRTRVVTKGFNLYTKWVLDNGTWIKKMVRQDNNSLFSVRKSLFKEPLGKINLAEYKDVNVKKAVEVQFNYLTKYTSKLQPRISNKYLRNYINKLIKNCEFDLSATLKYIKDNPIKDNDGKVLPKIQILEFSEYAAKRVTLDKTFDIKKIEKIPYSSHNNNRLVKILREHLNENGNNPAEAFSGEGLDVLAKKYGKPITKVTTFEEIGSKFSLGGKLVEADKGSNVFFVIYENTNDRNDRIITSESSLPLLNVIECISNNLPIVQDKPGYKTIILSPNDLVYVPEVDENINSIDWTIKQNISDRIYKVVSFSKTQCFFIPHFVSSPLIETTELGHNNKSEKTWDGIMIKNVCIKINIDRLGNIKLAI

SEQ ID NO: 5270 - protein, 1437 aa, synthetic construct
  REGION 1..1437: note = Synthetic
MTKILAFDLGSSSIGYSLRDTDKNGENIIDQLVLYGSIIFSPGMADNGVSNAAERTKHRSSRHLYRVRRYRIWETLATLIEFGCCPLSKEDLDKWKTYDKKKSLTRQYPVDAVEFEKWIRMNPYELREELATQQSDFTKEENRFKLGRALYHIAQRRGFRSSKGETLKEQEKDINENPAEEIRIDSDLLKKSEEKKSKKLVAYMEEHSLPTVGNAFAKLIKNKVRVRASEYQAVRSQYRDEIEYIFNFQKGLDANGEFFRRIYSTGNDGTIFYQNPIRSQKGQVGKCTLEPAKPRCPISHPKYEKYRAFSFINNIKYRKSINEDWQTLTASQKIKLYKEKFLLVNDFEFDVIRKWIEKEIGLPKDISLSKEHGTINYDDRTNVSVCSVSGRLKSVFGDNWEDYVYQTAKTRKDKEGKEHTVTYTIEDIWHVCFSYDDEDAVVGFAKSIGLDAAQEKKFLNLWMNIPQGYAMLSLKAIRNINRFLVPKENNPSYKGYIYTEATLFAKIPDILGEKQWQESESDILRSLNGLMNDVRDENCILKIVNNLISDYKALDYRDLDYREHFAVNDRSYKLDDSDRKDVEMHTVSFFGKSVWEKKPEDEREEILGKVEELYQNFFSSSKRDYYNLPKLGDRIKLYLSNKFPELRCCNEDADSQSQCNCHACKKLNQLYHPSMVEFYRPVVCNGKKLLGSPVTGSFKNPMAMKVLHQLRRLVNGLIQKGLIDEDTRIVVETARELNDANMRWAIEEYDNIREKENKAIIKAIKEIRKDDSEVGDSILEKARLLIEQSPDYLFDYMDDENMIDKKGTVKKKNSGLIYEKGVTKYRLWLEQGMQCLYTGKIINLSDLFDENITDIEHTIPQSRSFDNSMANKTVCFAYYNREIKKNRMPAELEDYEEIKKRLLPWEKRVEQLKNRVEFWKKKARQALTKENKDKAIRQKHLWQMELDYWKDKLSRFTMTEVSEGFKHRQLNDTRLITKYAYHYLKSVFDKVDVQKGIITSEFRKIFGFPVKTRDNHSHHTIDATILTLIPVASRRDEMLRLFYEIQENKKLNIDTKEKEKQLEGLIKSCRIGKTVGITKHIENNILVKYVSKDRALTPAIRNKRVGGKVVWERNEKGEILIDTDGKKIPQYKLTGDCIRGELHQTSFYGAIKQSKKEAEKKEGNKEERKKDTSYDTSYNNISYVIRRKLKFKTSKKDTGFESLDDLHKVIVDEHLFDIIKKQCGGKDFKDVCNEGFYMPNCNNRIRHIRCYVYDVKNPLHIRQQTYLSKKDYKQTFHVKTGDLYAMCRYRNLDKDVKYEVLTLSDISMNGKKGYGISEVIDDEYYLDAILRSGKQVILYKDKNDLGNLLRKPLNMKLLSERLYVIERFEGNNVVNLKKHLCSRPFKETGRGKAINLKSFANGLPERIRQSMVRLNYLLEDVDFKINLEGKIVFRNKI

SEQ ID NO: 5271 - protein, 1205 aa, synthetic construct
  REGION 1..1205: note = Synthetic
VRASEYQAVRSQYRDEIEYIFNFQKGLDANGEFFRRIYSTGNDGTIFYQNPIRSQKGQVGKCTLEPAKPRCPISHPEYEKYRAFSFINNIKYRKSIDEDWQTLTASQKIKLYKDKFLLVNDFEFADIRKWIEKEICLPKDISLSKEHGTINYDDRTNVSVCPVSGRLKSVFGDNWEDYVYQTAKTRKDKEGKEHTVTYTIEDIWHVCFSYDDEDAVSGFAKSIGLDASQEKKFLNLWMNIPQGYAMLSLKAIRNINRFLVPKENNPSYKGYIYTEATLFAKIPDILGEKQWQESESDILRSLNGLMNDVRDENCILKIVNNLISDYKALDYRDLDYREHFAVNDRSYKLDDSDRKDVEMHTVSFFGKSVWEKKPEDEREEILGKVEELYQNFFSSSKRDYYNLPKLGDRIKLYLSNKFPELRCCNEDADSQSQCNCHACKKLNQLYHPSMVEFYRPVVCNGKKLLGNPVTGSFRNPMAMKVLHQLRRLVNELIQKGLIDEDTRIVVETARELNDANMRWAIGEYVRKREEENNIIIEAIKKIRKDDNEVSDTVLEKARLLLEQSPDYLSYIKEKEEAAANKSNKDKKEDKNKQKKKDIKNYSSWLEKGIKCIYTDKPISLTSLFVENETDIEHTIPCSRSFDNSMANKTVCLAYYNREVKKNRMPTELEDYEEIKKRLLPWEERVEHLEYRVRFWQRKSKQSLKKENKDKAIRQKHLWQMELDYWKDKLSRFTMTEVPEGFRRKQLNDTRLITKYAYHYLKSIFGKVDVQKGIITSEFRKIFGFPVKTRDNHSHHAIDATILTLIPVASKRDEMLRLFYELQEDKKLNIVTKEKEKQLEWLIKSCRIGKTVGIAEHIENNILVKHISNDRALTPAIRNKREGGKVVWKRNEKGERLIDTDGKKIPQYKLTGDCIRGKLHQASFYGAIKQSKKAIEKKGKKKKGQKNDISYKTSYDEISYVIRRELKGFESLDDLHRVIVDENLYKIIKQKCKKEQFRKACNKGICMPNCSYPIRHVRCYAYDVKNPLHIKQQTYLSKKDYKQTFHVKVGDLYAMCRYHNANKKVRYEIVKLFDISKSGEKGYDIQEVLDDEYYLDTILRPGKQVILYKDQNDCDNLLRKPLNIKLLSERLYVIERFEGDNIVNLKKHLCSRSFKETGRGKAVDLKLFDNGLPERIRQSIRQLNYLLEDIDFKITLDGKIIFSNKN

SEQ ID NO: 5272 - protein, 993 aa, synthetic construct
  REGION 1..993: note = Synthetic
MTKILAFDLGSSSIGYSLRDTDKNGENIIDQLVLYGSIIFSPGMADNGVSNAAERTKHRSSRHLYRVRRYRIWETLATLIEFGCCPLSKEDLDKWKTYDKKKSLTRQYPVDAVEFEKWIRMNPYELREELATQQLDFTKEENRFKLGRALYHIAQRRGFRSSKGETLKEQEKDINENPAEEIRIDSDLLKKSEEKKSKKLVAYMEEHSLPTVGNAFAKLIKNKVRVRASEYQAVRSQYRDEIEYIFNFQKGLDANGEFFRRIYSTGNDGTIFYQNPIRSQKGQVGKCTLEPAKPRCPISHPEYEKYRAFSFINNIKYRKSINEDWQTLTASQKIKLYKEKFLLVNDFEFDVIRKWIEKEIGLPKDISLSKEHGTINYDDRTNVSVCSVSGRLKSVFGDNWEDYVYQTAKTRKDKEGKEHTVTYTIEDIWHVCFSYDDEDAVVGFAKSIGLDAAQEKKFLNLWMNIPQGYAMLSLKAIRNINRFLVPKENNPSYKGYIYTEATLFAKIPDILGEKQWQESESDILRSLNGLMNDVRDENCILKIVNNLISDYKALDYRDLDYREHFAVNDRSYKLDDSDRKDVEMHTVSFFGKSVWEKKPEDEREEILGKVEELYQNFFSSSKRDYYNLPKLGDRIKLYLSNKFPELRCCNEDADSQSQCNCHACKKLNQLYHPSMVEFYRPVVCNGKKLLGSPVTGSFKNPMAMKVLHQLRRLVNGLIQKGLIDEDTRIVVETARELNDANMRWAIEEYDNIREKENKAIIKAIKEIRKDDSEVGDSILEKARLLIEQSPDYLFDYMDDENMIDKKGTVKKKNSGLIYEKGVTKYRLWLEQGMQCLYTGKIINLSDLFDENITDIEHTIPQSRSFDNSMANKTVCFAYYNREIKKNRMPAELEDYEEIKKRLLPWEKRVEQLKNRVEFWKKKARQALTKENKDKAIRQKHLWQMELDYWKDKLSRFTMTEVSEGFKHRQLNDTRLITKYAYHYLKSVFDKVDV

SEQ ID NO: 5273 - protein, 1103 aa, synthetic construct
  REGION 1..1103: note = Synthetic
MRVLGLDIGVTSIGWAIVEFDQDAKNEIDKKSNNKIIDLGVRLFDGVAEDRSGKLLAQDWRNSKSSRQRYKRKKERLKAIENEFKSIGFLDNSYNKEQFFAKFHFENKDIFILRAKALEEKLSPKQIFACIYYLAKHRGYRSGPVPQSSKSKSNNKDSVKTINEIQKTKSLLGYDIDKNSYQKTIAQYVVQNINNSIYRNRDGKVVFMAQKEMIEYEAREILRYQSKFYKEINDEFVDKIIDIINLKAPAIDEKSINEMIGDCAILKDERRAFKNSITATKSMIFQIINNTIKKYQLDPIDNLYIDAMNIIIKKGKLTFENLNSILSSNITTKDKEKLIDNKATNMLKDICKILNIDNYNDMNNKEDELNELIYIFAIYKDFMHCEEKFAQHLAKYSYTDNQKDEILNLCFNKISGTSNLSLKALKGIEPYLMNGYVYTIACDEYIKHLDDKSKIKANSIKSKYLKVLIKKENPRVRKIVNQAIILINTLIKNGAKFDQINIELARDLPLTTKEKKRYSESQRRNEENKKSAKAIVGQNAKNKDILKARLLIEQDYQCPYCNIKLNSSDIADNKVEIDHILPLSLSFDDSYTNKVLTHKECNQLKGQRIPRSGFLDDEWFVSHINSIPQSMSKRKRDNLLITLDEFEKHIENIEKSRALNETRYASRLIKNYIEENLKFEGNCSDISDIKNHNIKRNRVQVRNGSLTHILRNLWHIGDKNIDEQRYIKDRDIHTHHAQDAVIIAFSTQGMVKSICDISKRANNEYRVLPNSGEVIKQSKNSSIIELAQLSKDTNDRINRALHSSMPMVNMNETLNERLKWIIPSKKVDRLHNSRSVHEDTICSIRLKENGNYRRLKDKSEFEYLIKNNVDNLYVIKRVSVKDAISKTVKENKEDKFIFEYLIDKDSRNKELYSMLKNNDEDGLNMYFHGKSLDKAKISILSKYDNRMRYVRGGVANLDRQDRYLIYKKDGIYHVGVVYSGDDIKDDKSAVIDILKRGEKHTDHQKSNNGFEYVMTLYKNDLILYIGRDKKEHIGYISIFDISTSNFKLNNPLINDKGYNVGPTTWKSIERLDIDILGNVYRNGKNFTKEAVQIIQNEINNKDK

SEQ ID NO: 5274 - protein, 887 aa, synthetic construct
  REGION 1..887: note = Synthetic
MIEYEAREILRYQSKFYKEIDDEFVDKIIDIINLKAPAIDEKSINEMIGDCAILKDERRAFKNSITATKSMIFQIINNTIKKYQLDPIDNLYIDAMNIIIKKGKLTFENLNSILSSNITTKDKEKLIDNKATNMLKDICKILNIDNYNDMNNKEDELNELIYIFAIYKDFMHCEEKFAQHLAKYSYTDNQKDEILNLCFNKISGTSNLSLKALKGIEPYLIDGYVYTIACDEYIKHLDDKSKIKANSIKSKYLKVLIKKENPRVRKIVNQAIILINTLIKNGAKFDQINIELARDLPLTTKEKKRYSESQRRNEENKKSAKAIVGQNAKNKDILKARLLIEQDYQCPYCNIKLNSSDIADNKVEIDHILPLSLSFDDSYTNKVLTHKECNQLKGQRIPRSGFLDDEWFVSHINSIPQSMSKRKRDNLLITLAEFEKHIENIEKSRALNETRYASRLIKNYIEENLKFEGNCSDISDIKNHNIKRNRVQVRNGSLTHILRNLWHIGDKNIDEQRYIKDRDIHTHHAQDAVIIAFSTQGMVKSICDISKRANNEYRVLPNSGEVIKQSKNSSIIELAQLSKDTNDRINRALHSSMPMVNMNETLNERLKWIIPSKKVDRLHNSRSVHEDTICSIRLKENGNYRRLKDKSEFEYLIKNNVDNLYVIKRVSVKDAISKTVKENKEDKFIFEYLIDKDSRNKELYSMLKNNDEDGLNMYFHGKSLYKAKISILSKYDNRMRYVRGGVANLDRQDRYLIYKKDGIYHVGVVYSGDDIKDDKSAVIDILKKGEKHTDHQKSNNGFEYVMTLYKNDLILYTKGKKEYIRYIDGIDISNVDFDVSHPLINDNKNRKIAPHVCNSIERLDIDILGNVYRNGKNFTKESAAIIQNELN

SEQ ID NO: 5275 - protein, 1073 aa, synthetic construct
  REGION 1..1073: note = Synthetic
MSNGKIDVSLDLGYGSIGWCVAEENGREPLVRGCGTVVFEPNRCLASARRGYRRQRRHIRATRTRIRRMRDYLTEQGVLTPAVAGLAHPNPEPWRLAAQALRGERTLDAAELWAVLLWYAHNRGYDGNRLWSSRSRGTSEETELNEDSKKVAAAKAAMAEHGRKTMAETVLDIVAEGNPLGPARGDYKVLNLAFDRGGVMAEVETILRLHVGKIPGLSETVIRVLMADPLRDPDALRDWPHIPKSYLGGLLAGQVKPRFDNRLATRCPIDGVKTPLKSSEAFLAFRWAELLSHVRVGFAGQPLSPLTPETLAALDAGIRRTGRYTIDGFKRAVRRLAPGDTDNLDALLSMPDAAERLVRYPGLAKLNTLFGVENFRQDAESQRVLRHMSHALAKGKSLSLADLLPLLQEGKAPKTRKNGKSPAEAFDVKLPAGRAPYSERVMRQAVAEIFAGKDPRGEGGVLYRDATQEDPLPEAEIDRATNNHLVRHRIKIMLRLLGDIVHDYAENNPARIGRLFVEVARDIRDFSGKKKEEIDQEIRALRQAALRATRKAAEALGCDEAAVTAGLARKMRIAADLNFTCPYTGRRFDVLDIRNKVVDLDHILPRSRRATDSLDALVLTFSAVNKRKGARTALQFIRDCGGQTISDPGPDGIGRTFQIKTEEAYLRDLKALKQPPSAKERKIFRRRLERLKMFAVEEDAGMTDGMLTQTSAIAKLAHRAIMGWFRERGCKPIRPTLIPGRVTKEVRVRHNLLGMSAQFDVRLLRTYTDLDGVTKTDVIPKGEMRGLTHMHHAVDAVAILLAGTLITPAHRVWDLMVKRHQTEEERAFLLGNGPFHWDGHGKLGLQPLPAHVERSVRAAIGELRTVRYASKRLGRTVIEETQWRVERVENGRVFIRQGHGAATKRDELAISAAYGLNPPSGDGKLKRNKAIYVGKANYAIALLDLPVTIRERFVWRELQQIKAQHNGMVPHLLRAGDYIIIQQGERKGVWCVESLKSSKTGTKVDLAFPYNAAKIDDCRCRWREVLISRLYKEHATFPRYRLTGIPACPITSSRSQATRKRSSSAKTDSSSAE

SEQ ID NO: 5276 - protein, 1193 aa, synthetic construct
  REGION 1..1193: note = Synthetic
MSRNNFVELISMKKRVLGLDIGIASLGWAVVDIDEELMTTKNKNESKYKINSGEIAGSGVRVWKESVDRQGKSLAAIRGESRRIRSTIERKAERLRHLIKLAKQYDIIADDFNLSMLNAPAKVFLKDWDIWRLRARAIKEKLSPFELFRILYHIANHRGFYFSSKAEEKSIEASNAKSNLEGNDNDDDLKAKEDKKVKTGIKEIREKFNQSGCRTIGEFIYLKEGKKRNSKDNYSVSLYRTELLDEVKKVLAFQREQGNILFSKDFEEKYINEVLMYTHPLDDEKIKAMIGECELIKGQLRFPKHGYEAELFAFYNRLNKLQIKNRKEIDKEEREKILQEVKNTKDCKLSFSDLRRSLELENYEQKFNLCSYREFNPEYEKSLSISQNKIEQFKAENLDCYYKDTGELCEENLWSTLKSQINEIFEKYPNRKALKFYYSDIRKQLKLPDNIRFVKLKKDYCLSIEEIGKEKYYAQFEKETFVEFSGYNILKKGLKECFVDNENTLNTIAETLVYYQSDEARKQYLQEHGIEDEKLINKVLELNMKDVSPFSLTALKDLNSIMSKEKVLFNEAKEILSKKDGYKLKKTEKTSEIAPYHGNFEKNATVARIISEFRKTINAINKEYGVIDEIHIEMATDVANSKDKIARIRNGQLKYKEQRDSARARCLENGVDPDVGDNLLRFRLAEEQDFKCIYTGKQIYLGSKTPANAINIVDCDIDHIIPISRSFNDSLANKVICSNLANREKTNRLPYEWFHDPENQKTEEDWEKFKVRVLSGNRMNGTKKRNLLRESFTEKDMEDFISRDLNNTRYATRHIAEYLRKYFSFETSKHSMPDANRIRVFGGGITAKLRHMWGLDKDRDESNLHHAQDAIVIACTSFSNIYYICSVLKELEQKGTHPKKQQLVPWTSFRDDVKQSLDKITVSQMLRCSATGQAHKQPVKYDTGTEITRKGAQNTINVSLDTMFRYDIYHSGNGYYCVPIYAIDLSKKNDKFKHIIQPSPKKGEECEAVAEEFVFSLYKGAYIKIVTEDDEVLEGYISQYNAVSGQFYIESVNGDRVYEINTSTLEIGDYIKLKLENNFTRMVLVVSYDTDNKKLALISAEGDEFFVEAEEKLDKKGKGSGKYATTHPYTKVDKEKKISLSVIKDLQKYTIDRLGNLTRVKKEKERFSNKLKSNAQRYREKQAKKAKQQLQGS

SEQ ID NO: 5277 - protein, 1532 aa, synthetic construct
  REGION 1..1532: note = Synthetic
MSKTLGLDLGTNSIGWAVVDDQSDTPIVEKGVIVFPEGVKIEKGTEKSRAAERTGFRGTRKLKFRRKLRKYETLKVLSKFNLCPLTLVEVEDWRKSNFKEYPNKPAFIEWLKTDDKTNKVPYFFRNKFSREVSAWGNDETLRHQLGRAFYHLAQRRGFKSNRLEQSDENLISDVKEFIQDALADSQNGVELLIQLATIFEEYNFDTRKADELDSTEQKLKSIRKYIFGVLENKIKNKDYSSYQTAKKEIDRYINRPENLGAVKGGIKELSKKIAEKDCQSLGQYFWLLYQKDRKVENHKIRSNYTSREEHYETEFNLICKTQNISDKLKKMLYQAIFFQRPLRSQKGLVGKCTLENNKARCPVSRTEFEAFRMWSFLNSIKIKTKTDTSLRELTMVEKELLIPKFYRRKSTFKFDDLAQTLSKHYGDKFVHFKDTVPNGNTNLINFKLNTTVNGCPVSAMFNYFFGANWETKKFIYETLDIDGLKQVHEIDYKDIWHVLSTFDDDKKLYSYAIEKLRLEEKEAKKFSKLSFQQGYANLSLSAINKILAWLKQGLKYPHAVFLANMEKVVRPEIWSDKTDKKMLIDAVGTILNEHSFEKKRNRTINALIAQYNAEVNQVQMSEESSPIIKNELKVLLSKTFGQSLSDPILDDAFNLLKKQLEKDSFSIAFIPDKRLDEMLHEFLESNNLIKDTNKLKKLYHPSDLESFQPINAKNRAGEYILVDNEPLKILNSPKTGAIKNPVLMRTMHQLRNLINELLLQEKINAKTRIHIELAREVNDSNKRAAYKTWQDQKQAENEEIASIIRELFKESGKKEVTIGSEDIKKVKAWTEQLKDENEKPVDVFELGKTKKEMVQKYKLWKEQKGYCIYTGKTINLTQLFEGTAFDIEHTIPRSVSWDNSMENKTISDATYNRETKRNKIPSELDAHPEILGRIRHWKTHWKKLDDQIKRINTATIIDKEAKDRMIRKKHLLRFEYDYWYQKYDRFIMRDVPSGFKNSQLVDTGLITRYAKSYLGSLFQNKNGNSNVSVVKGSVVYEFRKAWGVQKLQEKKSRSNHIHHCIDAVTIACMTRSKYNTFVQAWKENEEGSKLLTRDTTPIKKPWVTFTEDLLKIETEVAIVRAFRDNKSNQTKKKVRKRGKIEYKIEFEKDNDAVYLRADDGNKIPVLDQSGNPKKIVDRDGKAIPRYETGDTAKGSLHQDTFYGAIKTAKRDKNNIPLRDENGNFVFEADKKGNPLINYVIRKPLDSLTDADLKKIVDPTTREIVIKARAEEKTLKKELDSLKKELKKELIEIEVKELSERIERLEQKIKNDLYVIPPKKGKRIITPIRKVRINAKMTEPLPDFKKHKDISKHPHKREYYVQNDENYCLALFENKANKKRKAEIINLMNAVNYFKKSNSKENHVLIPESKKGFELCGILKPNTMVLFYEELPEEVWDLDKTEQLKRLYYVRKMSKDGRATFQFHQEARIDEQLKQDYLKQNNVEAPKSLTNGESKIDFSNLPTPKFLLSPNNMQFLIENVDFKVSVTGEIIKL

SEQ ID NO: 5278 - protein, 1271 aa, synthetic construct
  REGION 1..1271: note = Synthetic
MKKILGLDLGTTSIGWALVNEAESAEEKSSIIRMGVRLVPLDNFKNSEGKDIKQKKEDAFCAGISMSTRAARRNARSARINNERYKQRREELKKIFRSAGWIENDTPLCEDGKGSTYELLRLRAKAVSEEVSLAELSRILLAINKKRGYKSNRKLKAADEGEAIDGMTLARELYDKGLTPGQYVYRQFLDGKKYVPQFYPSDLKSELEKIWNTHVPAFPQLTVDIWDNLLGKNGKATWAILDEALQLEGIKKPDRQKLYEWRASAVTTPLDKEQFATVVQMINTEISNTSGYLGEISDRSKLLYFKHQTIGQHLWSIIQDNPHTSLKCKVFYREDYMDEFEHIWETQCKFHPELTEELKRKIRDCCIFYQRPLKSQKGTLDFCTFERHEKKKTIHGKEVTVVEGLKVCPKSSPIYQEFRIWQVLNNLELIDKRAYTVRPLTQDEKEIIFAQLNMSDKMTKNEVLKLIVSTPRKYDLNYEVLPGNTTRARMYEAFVKMLPVIGHDEIDLKKARAKDVEAVVRGVFKTVGFNTAILDFDATLEGEEFQQQPSYRLWHLLYSSEGKNLKENISDLCGMGEYDECAKILSKISFVNDYGSLSTKAIRKILPHMKAGMKYDEACEKAGYRHSPRSLTREERDRRVMPDLLPQYRNGSLRNPVVDKVLAQMTNVVNAIIREYGKPDEVRVEMAREMKKNASERRKMSDAIQENTKEAKRISKLLKDEFGIQNATRNQILRWRLYEELAFNGYHTLYSNQPIPQEKVLTKEIEIEHIIPQARYFDDSFANKTLEYASVNLEKGANTAYDYICGKYDQEKVEEYEKRINDAFVDKKISKRKRDYLLMKQENIPDDFVQRDLRETQYITRKALEMLESVIPSVVATCGSITDYLRKEWQLIGVLKELNADKIKISGLQDTWTKRADNRHHAMDALTVAYTKRGFVQYLNTLNAHYNEGKPRKITPPMPVGELRHSALLHLGNILISARISKKVATAHYNKKTGQMCMTPRGPLHAETYYGRVVIDGEPVYTTRKVVDDKLDVSLVVNERVRKVLEHRLAEYGGDAKKAFAALDSNPIWLDRENGICVKKVTIRATRVKEPIPIHTKHNHHGLPVMDKESNRIPCDFVAPDANHHIAFYKDAKGKLHENTVTFFEAFERKRQGADVIDTNYRKEDGWQFLFSLQRGEYVILPDKDNGFAPKDYNLTDPDNLAIISRHLFIVQKLSKKDYWFRHHLDPTSDEIAELRGINWERIQSISNLDGIVKVRIDSLGQIKETTLLEV

SEQ ID NO: 5279 - protein, 1078 aa, synthetic construct
  REGION 1..1078: note = Synthetic
MHKHYKYALGLDVGVGSVGYALLKLDEADQPCGLLKANSVTFPMSQDRTGNTLASIARNYRSGRRLNRRRKLRKQLVSNLFTKNGLINRNDVYSPYTKHPNFDLYRIWHDSFNQQISNQDLYRLLYYFAGHRAFKSNRIHQLKSSGDKDTTKLLSSIDTNKEYFNNSQYNHLGEMFYCDPKFAQRKHNKGYDDGYLFNIDRGTLLSEIKEILNAQSKFGNPAINDDFKARYLKILSQQRNFDVGPSNPSRFALVDSSGNIKLRNKKDKLNLSFKTSAKASYTFQKFQILQKLANTRYKLNSQSKYQSLNAETIDKIFNKAITKANYKYSQLKKDLKLPDSARFNMVMYETSDDKSAKQAETKTFIIKDNTYYILSKILSDKLQHDYTVIDQIAEILTRYTSDEPKAKALKRQLGEKLSDEKIESLLALNFTQYGSYSIDTMQCLIPYLAKGYDVTTAIDAFNEDQASLENGHSPLIDASMNYHEIISSIKNPALLQSFTKTVKVVKALIRRYGNPYTIHIEMARELSLGNKGKAELIKKQNENRKRNDKVITEMKENFPNVSINGENIIRLKLYHEQNGIDIYDGRMIDYQHVLDNNYEVDHILPYSISFNNSFNNKVLTSSRNNQLKRNRTPYEWLHNDKVRWDTFTSIAENVRNYPKKNNLLKMHYDESDMKKWKTRSLNDTRYATRLLYNYFKHNEQYFDAKPSVMTMNGSMTAQLRYYWGIVKQRAASDKHHAVDACVIATCSNSMVNLISKYHTAREKEQLSSKFPMPWPDFRNDVMNAKQQMNVKRIFSHSIAGKVNEDGLKGARYINTDKVVVIHEKLANLKLKKVGDDYIIVGHGNSRYLRPDDLTSISNRNSKNDLNSVIYDHIYNALSKDKKAFEKQPYLEFEHKGHKYTVRRVKVISDYKGGVILNRDADGNPISVANRGKMVRNDIFKCLDKKERVVYRFVPIYEHQILDTHLPNQYAPFAKNIFVNDKDQFICSLSKGDAVEVKLSTPKKVENCDEPYVCDHFIGYFDGSDISSNRIKINALDNSCSIRASMSKLISIQKCDVTIFGSIHKVHEKVRQPFNLKHK

SEQ ID NO: 5280 - protein, 638 aa, synthetic construct
  REGION 1..638: note = Synthetic
MQCLIPYLAKGYDVTTAIDAFNEDQASLENGHSPLIDASMNYHEIISSIKNPALLQSFTKTVKVVKALIRRYGNPYTIHIEMARELSLGNKGKAELIKKQNENRKRNDKVITEMKENFPNVSINGENIIRLKLYHEQNGIDIYDGRMIDYQHVLDNNYEVDHILPYSISFNNSFNNKVLTSSRNNQLKRNRTPYEWLHNDKVRWDTFTSIAENVRNYPKKNNLLKMHYDESDMKKWKTRSLNDTRYATRLLYNYFKHNEQYFDAKPSVMTMNGSMTAQLRYYWGIVKQRAASDKHHAVDACVIATCSNSMVNLISKYHTAREKEQLSSKFPMPWPDFRNDVMNAKQQMNVKRIFSHSIAGKVNEDGLKGARYINTDKVVVIHEKLANLKLKKVGDDYIIVGHGNSRYLRPDDLTSISNRNSKNDLNSVIYDHIYNALSKDKKAFEKQPYLEFEHKGHKYTVRRVKVISDYKGGVILNRDADGNPISVANRGKMVRNDIFKCLDKKERVVYRFVPIYEHQILDTHLPNQYAPFAKNIFVNDKDQFICSLSKGDAVEVKLSTPKKVENCDEPYVCDHFIGYFDGSDISSNRIKINALDNSCSIRASMSKLISIQKCDVTIFGSIHKVHEKVRQPFNLKHK

SEQ ID NO: 5281 - protein, 1165 aa, synthetic construct
  REGION 1..1165: note = Synthetic
MGLGWGIDVGVASLGFAVLDLDEAGQPQEIVDGVAHVYDAPTGAVERRLFRSMRRQNQRRRRRLATLKAALVQNLGLDPGFDQVVPDDETVRKGHANGGLSRVRPRALGLEVALSPEDLGRALMHLARNRGRRLSRGLRDARPDDAPEPDPKAGTPQDVKKGRGAKKAKADPESPEGMAAAARRTQDLLAALGRELGQGEPATPGQWLRREEERGNPTRQSRHTPDTPVFTRRMMQDEARRLLEAQASFHPGLTAETRASLFGLIFHEETTDGPRVGKCRYRVRGPDGAIEDRLPLASDLFQTKRILEEIAHLVTLTDPITGTKEPLTLAQRDGLRDKALAGEDLTAAKVRAWLKLGRSAEAPVLGLEVAAGAAAKKAGKGRKTEARIAGHALAKAFREAGAHDLWHGASLAERDRLACLLRTVDDREELTEVLEGEFGLEAPVAAALAQARVPQGYSAAGATATRHIIEQMQAEVIPVSEAVRRAGLRDALGTPEEDRPPRTAPLPYYGEVLPEACMGGTGEPGDPPEKRFGRVPNPVVHVALNRLRVVANEFLKRYGPPDRIGLELARDMHKSIEEREAQEKENQARQKENDRRAEMLISQGLPATRDALKMMRLWEWQKHKCLYTGQEISLEDLGRGVVEVDHILPWAETMDDRMGNLALCLREVNAFKGKRAPHAAFYPRFPRGDGRDRDYAHLLKQVQEDRPGSLWRFEPDALERVRGQERFQERFLNDTRYVGKLARAYLARLVPRESDVLCLNGAITAQLRRQWGCSTLIREIMIDEGRLDPDLFAPQGDPPADEAARAEHAKALAERVRARGKIRWDDRHHLLDAIVAGCVTRSDVQRLQTLSARGVAGEDAATVLAGIRRGVGDAAPAGFCWRPDFSPRVKAFLTTLTPEQPTRVTRKPDHDPKGALHKQTQLGVICENPDRPGLFVTLARQEVAALGAPCKDRAAFQERLEERLGIGGPARAALAAAVKAGRPVWWGRQKATDPSDAPLAALGNLERANTQLQEALLAAWDRAAETLDDKGKPKSGPLLAREAVAEVLKQAKQYRFTRVEHQKVRVLRRNKDGRPCVSYVTGSNHALVCFKRLDGSPDLEVITTLDANDTRFVPTWRRLGGHLLFTLQQGDLVEMTPPSLRSDDEEENFWGGNAQFTGWPRFLET

SEQ ID NO: 5282 - protein, 1102 aa, synthetic construct
  REGION 1..1102: note = Synthetic
VVPLQIKLCYTHSALCINICQAGGRNLMLVNDNLCLGLDIGIGSLGWALVAYEDGDNASLLYLPTNGGGSNAAMGVRTFDVPENPKTKELLNKHRREVRRQRITIRRRAKRMRDVRRLLRRHGLFHAQPGGVAADCGADPWALRAAGLNRLLLPEELAVVLLHMAKHRGFKSNSKADKASASSSDTGKMLKAVGALQEAVRENGYRTVGEYMARQERKRNRSGPDGKPVYENTMLRSLLEEEAAVLFSRQQDFGSTHATSELLEAYLKAAFFQRPLKSWEDSVGQCLFEKDQKRAPALSYTAERFRLAQRLVNLRMRMPDGGLERIPSDKVWSVIGQMGKWRGLSFIRLKKLIGYDHVTFEGLNYGRRDKKGEIVDPEKQDVCGVSAGCAQGVYTLAGVLGFDGVRDLASRRTLEGRSLLDAVAVVLTMHDDMEKIGALLRELPLTGGESEKLLNALEQGAFAVFRRFFKLSLKAMERILPHMIDNGDYALGCEMAGYDHAKARPVDLRAVRNPVVLRIVSEVRRQFTTIVRQAGVIPGKVCIELLRDVGKSVEERNAIQKGLERRYLEKQGNRKRFADLVQKKPEEVSPTELLRYELWKEQGERCAYYFLWKDLGGERAYEARHGMIAVNELLDGPNAAQIDHILPRSRTFDNRFINLCLARVEANQAKGDRTPWEWLGSRNPQQWHVFEEWVGSLHVKGLKKRNYLLKNLDADMEGRFHERNKHDTSYAARLVQQWIAEEYERLGAPMERERGGAIRRVFARPGRVTADLRKAWGVESLKKDASGRRLGDRHHALDALIVALCTESTLQRMTRAYKQMEQWREKNRLVPNIAPPWETFREDVAKALGSVFVSRKERGKERGRLHEDTLRQIRSETGQDGRQVEMLYERVPVRKLALADLERIKDVERNGWLRDILRHWIERGKPVSAPPRSPKGDVIRRVRVRRGPYTSGMLVPRGDGRAQADNAAIIRTDVFIKKNRYFLVPVYASRIAAPAPPNLAIVPGKEEKDWLEMDADCAFCFSLMKNSYVVAEKGNGEVVEGYFVNTDRSVAAITIAMANDHGISTKIGVKTLKSFIKCRVDRLGGVHPVKKETRTWHGEACT

SEQ ID NO: 5283 - protein, 1258 aa, synthetic construct
  REGION 1..1258: note = Synthetic
MDDGIKYSLGLDIGTTSVGWAVVNLDKERIEDLGVRIFERPENPKNGKSLAEPRRTARSTRRRLRRRRQRLNYLKQFFINQGLLTKQEVDDIISSAHTKAWHQAHDPYQLRVKGLTEKLSPDELLIALYHIAKRRGYKSNRKSIEQSDTTGDGKKVNSAISKNDQILSEMKYSSVSQALLADDRFRERKRNTIDDYRYSFSRVDFLDEIRHILDRQKDFYPNELSIDHINQLLGIDVYHDENGQPIPIDHKLTNNDINRLTKHGQTTLNGIFYQRPFMTSELINRMRGKCPLEKDQPRAPKASYSFELFRLAEDLSHLQYTLDFVETGTDWQVRKERKRQAQFLTADQIKACVDKCLKTQTVKYSAIREVLGFKDDNSFQFTYIRGKSPDEKTLAKDPLAKEKNTFAQLRFYHGVKSVLKDLPNDWQDVSSDQDLFDKIGEVLTCNKDDYSIREGLIEVNKDRSAQGKAELSDEAINAIVNSKLSFAGFGHLSLVALRKITPYLLKGNGMTYDKAVEEAGYQFNAKLSGHKNLLPPLSEEESHQITNPVVKRAVSQTIKVVNAIIHKYGAPYRIGIECAGELAKSFKEREDIKKRQDKNAENNQEAVKELRSGKLVSDGEQFEAQIAPTGTSITKLNFYKQQDCKCPYCGEPINLSKIFSDDNYAEIDHIIPFSICGNDTKANKVLVHTTCNQIKGNQTPYQTWGNDPERWKIIEATARANHKLGAAKRRRLLTQTLPDEDWSLHAINDTRYISKFISRYIKSNLKFRPMDDTDDDGHTQRQRVIMPTGAITSYLRRMWHIGRKDREEDCLHHSVDAVIVALTTQAIIQDCSVYSAYIDDHTKMQLGDNASQTGSAKLVRALQQITDPATGEIKEADYKELMQDMLPWPRFDEELRKREEQPDPVNDNLAIWRNKFSDLYKDQDSDFINRIHPIFVSRMPKRQGAGAVNKETVRSNKTKDDDGKTRSARVKLRDLTPKQLSNSAISSNEGVYEQIKQYIIDRDKWKDEIKAWRKAKKASKQTSNTDEANDGKDEPSVPAEPREPKVYKSNRRFDRNGNPISPIKSIKVYDPHPMTSGFLVNNDTAYVNNGSMVRLDVYKRPNKKGKIEHFFVPVYAHMIKKGHPEIRPTKILPEPKKGTPKEIDDSFSFVCSLFPNDYVKVTLGNEVQEGYYVSYDIQSARLTLLPHAGTRKDLPTKKKDETNDDQTNQLTDETDGNDKKKTKVKHPNRYPAFRIAPRSATKIERLDINVLGDNYKWD

SEQ ID NO: 5284 - protein, 1133 aa, synthetic construct
  REGION 1..1133: note = Synthetic
MKYSLGLDIGTNSCGWSVINLDKKRIEDLGVRIFNEAEHPKTGQSLAAPRREKRGMRKRLHRRRIRLNFLKQFFIQQKILSSQQIESLLAPHKNQIDPFIVREKALSEKLTPEELFVALYHISKRRGYKSNSRTESSSDASENKKTLSAIAANQEFLKDYRTVAEALNHAEKFKAHKRNKPDDYSNSFARADFENEITRIISKQAEFYSFLNEDSIKDLLYRPNFGVFFQRRFLTPKQIEGMRGKCQFEKDKPRAQRASYSFELFRLASDLVHLTYNMGNKLTIDEIAACIEKAKELSVLKYSHIQKILAENTSEEINFDYVRGLKRKDLLKDEAEAKKKALEQKFGELKFYHAIKKALKDQPAEWRDIESNIELFDNIGFVLTANKEDDSVREELEKLGLNPSVIDGISNIKQSFAGFCHLSLEVLRKITPFILQGETYDKAVVDAGYVFTAKLSGDMNHLPALSKEENNQITNPVVRRAVSQSIKVVNAIILKYGAPTRLHIECASELAKSFEKRNEIIKTQDENRENNEKIIARLKDEFHILSPTALQVTKFKLYEQQDGKCLYSGHPIDLNQLFSDEHYCEIDHIIPKSRCGNDSMINKALVFNQKNQEKRDQTPFEAWGSDEKRWQSFVARVESNPKIFAKKRARLLAKTPPKEDWNSRALNDTRYITRFLSNYFKQNLKFADYIEGKKVVYTPTGDITSYLRHVWHIGKKDRSKNLHHAVDAVITALVTDEVVRQCALMNKMIELGAKYKTKGINLADYQNGMLTATDPVTGEIVDLAKYEEVCESVLPWPNFDHEVRFRATPLACFITEGREDKKKTEVGQLSEEAKAHLQNASINTLAEWRDQFREIYKDQDEEFKNSIHPIFVSRMPKRKGTGSLHDDTFRSPKGILIDQKTGIISANPNRSSFIRKKIQDIKLADLENSILRQSDAVLYQQLKSLLEANGDDPKKAFKEPVYKNNVKVDKNGRPLSPVTTIKVNDDKNVKSGILLNRGTQFANNSPGSMVRLDVYQKEIKGNKKLFYVPVYTHQVRRGSNRILPTTCGYDFVDGTFKKLFSLYPNDYLIMKKGDEIFQGYYIKYNISSSVITYISNIDEGGDKKNETTGRALLELYRLDISILGDNYPWERLY

SEQ ID NO: 5285 - protein, 1133 aa, synthetic construct
  REGION 1..1133: note = Synthetic
MKYSLGLDIGTTSCGWSVINLDKKRIEDLGVRIFDGAENPKNGQSLATPRREKRSMRKRLHRRRIRLNFLKQFFIQQKILNSQQIESLLIPHKNQLSPYTVREKALSEKLTPEELFIALYHISKRRGYKSNSRAESGSDASENKKTLSAITVNQEFLKEYKTVAEALNHAEKFKSHKRNKPDDYNNSFARTDFENEITKILSKQSEFYPAINEDNIKDLLYRPNFGVFFQRRFLTPKQIEEMRGKCQFEKDKPRAQRASYSFELFRLASDLVHLTYNMGNKLTIDEIAACIEKAKELSILKYSHIQKILAQDTTDEINFDYIRGLKRKDLLKDEAEAKKKSLEQKFGEMKFYHAIKKALKDQPAEWRDIESNIELFDNIGFVLTANKEDDSVKEELKKLGLKSSVIDSISNIKQSFAGFGHLSLEALRKIIPFILQGETYDKAVVDAGYIFTAKLAGDLNRLPALSKEESNQITNPVAKRAISQSIKVVNAIIQKYGIPTRLHVECASELAKSFDKRNEIIKAQDENRENNEKIIARLKDEFHVLSPTALQITKFKLYEQQDGKCLYSGKPIDLNRLFSDEYYCEIDHIIPKSRCGNDNMINKALVLNQENQEKRNQTPFEAWGNDEKRWQSFVARIESNPKIFAKKRVRLLAKTPPKEDWNARALNDTRYITRFLSNYFKQNLKFAEHTAGKKVVYTPTGNITSYLRHVWHIGKKNRSNNLHHAVDATITALVTDEVIRQCALMNKMIELGAKYATKGIDLANYQNGILAVTDPVTGEIVDLAKYEEIRESVLPWPNFDREVRFRATPLACFITEEKEDKKKAEERKELPSNEAKTHLQNTSINTLAEWRDQFREIYKDQDEKFKNSIHPIFVSRMPKRKGTGSLHDDTIRSPKGILIDEKTGIISVNPNRSSFIRKKIQDVKLADLENSILKQSDAVLYQQLKSLLEVNGDDPKKAFKEPVYKNNVKFDKNSRPLSPVITIKINDDKNVKSGILLNHGTQFVNNGSMIRLDIYKKEIKGKNQLFYVPVYAHQVRKDSTRILPTTCGYDFVDETFIKLCSVYPNDYLIMKKGDEILQGYYIKYDITNAVIAFASNLIAGNSIFDRISCRSLSELHRLDISVLGDNYPWERLY

SEQ ID NO: 5286 - protein, 1131 aa, synthetic construct
  REGION 1..1131: note = Synthetic
MKYSLGLDIGTNSCGWSVINLDKKRIEDLGVRIFDGAENPKNGQSLATPRREKRGMRKRLHRRRIRLNFLKQFFVQQKILSRQQIESLLTPHKNQIDPYIVREKALSEKLTPEELFVALYHISKRRGYKSNRRTESSNDSSENKKTLSAITANQEFLKEYQTVAEALNHADKFKAHKRNKPDDYSNSFARADFENEITKILSKQAEFYPALNEENIKDLLYRPNFGVFFQRRFLTPKQIEEMRGKCQFEKDKPRAQRASYSFEFFRLASDLVHLTYNMGNKLTIDEIAACIEKAKELSVLKYSHIQKILAEDVEDEINFDYVRGLKRKDLIKDETEAKKKALEQKLGELKFYHAIKMALKDQPAEWKDIESNIELFDNIGFVLTANKEDDSVREELEKLGLKPSVIDGISNIKQSFAGFGHLSLEALRKITPFILQGETYDKAVVDAGYIFTAKLSGDSNRLPALSKEENNQITNPVVKRAISQSIKVVNAIILKYGAPTRLHIECASELAKSFEKRNEIIKTQDENRENNKKIIARLKDEFHVLSPTAMQIIKFKLYEQQDGKCLYSGSPIDLNRLFSDEHYCEIDHIIPKSRCGNDSMINKVLVLNQENQEKRNQTPFEAWGSDEKRWQSFIARVESNPKIFAKKRARLLAKTPPKEDWNACALNDTRYITRFLSNYFKQNLKFADHTDGKKVVYTPTGNITSYLRHVWHIGKKDRSENLHHAVDAVITALVTDEVVRQCALMNKMIELGAKYKTKGINLANYQNGMLAATDPVTGEIVDLVKYEEVRESVLPWPNFDHEVRFRTTPLACFITENTKDKKKAEADQLSEEAKTHLQNVSINTLAEWRDQFREIYKDQYEEFRSSIHPIFVSRMPKRKGIGSLHDETIRSPKGILIDEKTGIISANPNRSSFIRKRLQDVKIADLENSILKQSDKVLYQQLKSLLEANGDDPKKAFKEPVYKNNVKFDKNGHPLSPVTTIKVNDDKRVKSGISLNHGTQFVNNGSMVRLDIYQKDIKGEKKLFYVPIYTHQVRNGSNRILPTTCGYDFIDNTFTKLCSVYPNDYLIMKKGDEISQGYYIGFDTDSARISYVSNLLSGNSVFNRVSGRSLTEVYRFDISVLGDNYPWEKMY

SEQ ID NO: 5287 - protein, 1098 aa, synthetic construct
  REGION 1..1098: note = Synthetic
MKYSLGLDIGTTSVGWAVVNLDENRIEDLGVRIFEKPENPKDGKSLAEPRRTARSTRRRLRRRRQRLNYLKEFFIDNKLLSAEQIEEILTPHKGAKNPYELREKGLSKKLDNEELFIALYHIAKRRGYKSNRKSVEENDKETGEVLKSISENKVLLEKYSTVVVTLNKDSKFKAHKRNKAGDYSNSFIRENFEAEIKAILTAQQKFYPELTDEKIDELLFKNYILEYDVKKKNGKELSEDKIKHLKVKMAVGLFAQRPFVDKELIEKMRGKCPFEPSEPRAQKASITFEMFRLASDLAHLTYNGGQKLTEEEIKKCIEKCKTTGKVTYKAIRETLGYKGDDTFEFDYIRGKDPSKEDLEKDKFVKEKNTFAELKFYHGVKKALKDLPDDWAKVESGADLFDEIGYILTANKDDEAIKNELGKLGKLSDKAITELMKLSFSGFGHLSIKALRKITPFILQGKTYDQAVAEAGYVFNAKLSGEKSKLPPLNEDEAHQITNPVVKRAISQTIKVVNAVIRKYGAPTRIGLECAGDLAKNFKERDKIKKAQDENAAENEKIVERLQNEFGVANPTGLQITKFRFYNEQNGKCPYCVESLDINQLFSDEHYGEIDHIIPFSRCGNDGRGNKVLCHNECNQNKRNQTPYETWSADTERWAKIENFARATYFGKTHGKQKRLLTEKLPKEDWSQRAINDTRYISKFMSNFIKKNLKFIDNEKQQKVIMPAGGITSHMRRMWRIGVKNREENNLHHAVDAVIVALVDQGKIQETSTYSRWTGLGAGSFKYQSALAKVTDPLTGEIINKTAYDALRESILPWENFDKEVRLRTSQPKTGDKLEIWQDQFRDLYKDQDDKFREKVHPIFVSRMPKRNGTGTANQETIRSPRGVLDKEKISYIRTRLDKVTLEILENSSVKQDDKVLYEQLKTLLEQNGNDPKKAFAEPVYKGGKTHDKNGKPLSPVSTIKVDDSKNVRSGFLINNDKQFVNNGDIIRADVYKFVGDCRPKSNIRYKYIPIYMSQLHKPKTLDDTNFEFVFSLYKNDYFVAVFDNKVIEGYFNNYPGKSRIVYTDHTSSQPGNKYIDTGKALAIRRHDITVLGDNYKWS

SEQ ID NO: 5288 - protein, 1103 aa, synthetic construct
  REGION 1..1103: note = Synthetic
MKYSIGLDIGTTSIGWAIIDEDNKRIEKVGVRIFEKPENPKDGKSLSEARRTARSARRRLKRRRQRLNFIKRFFRDNNLLTKEQIEELLKPENKLDPYKIREKALNEKISNEELFIGLYHIAKRRGYKSNRKSAEENDKENSKVLSAISKNEKLLKEYKTVASALNSNEKFIAHKRNKAEDYSNSFVRANFEDEVKLILKIQEEFGLNLSDEKINFLLFGNEKEGNFNGIFSQRPFMTSELIMKMRGKCNLEKSESRAPKASYSFEMFRLAENLSHLRVVINKEERGLTEEEISKVIEKAKDIKVLKYQHIREVLGYKKDENFSFPINMIRGEIKKDSKNNGEENKFGELSFYHKVKAALSNTPEDWQKVCDNNYRMLDELGEILSCNKDDENLRKEISKFNLSEDAVEALMMINVSGFGHLSFKALRKILPFLLKGNIYSDALKNVGYNTKQQLSGDKNKLPPLSKEESAQITNPVVKRAVSQTIKVVNAIIREYGAPYQIKIEAASDLAKNFKERNKIKKTQDENASYNESIKERLKNEFNVLSPTGLQITKFKLYEQQNGKCVYSGKSLVLENLFSNEHYAEIDHIIPFSRCGNDSLMNKVLVFTEENRQKGNLIPFEAWGTNESRWADFEARINSMNLPFRKKERLLAKVSPKEDWNSRALNDTRYISKFLSRYLRKNLKFAKFENENPAQRVIVPNGSITSYLRRIWRVGSKDREENNLHHATDACIIAAIDQSVIQKISRLNKYFELFKYSAEDEVIDKITGEIFSRADFEQTFEDIEPWKDFGKEVRKRTAHYESPMELRNELIGLENYDEEFRNKTTPIFVSRMPKRSGKGNINKETIRSPKIVKGYVDSKGKLAIARKQRVRLINVDLKTLHNSPVRETDPALYEILKARLNEFDNKPEKAFGDPSNPVYKPTKNSGCGNIVRSIKVYDTQNSKSGFLINKGKAFVNNGDTIRLDVFKRKNYKGEFEYYFSPIYAHLLNAKKVEILPTPNGRSTAEKADFNKIRDENGKIFATEENGFVKQFSLYPNDYVRIYTGNKIVEGYYVKYGIADGTLNLMNHDQTSKDNLSLKHIGRGTITFIERYDISVLGDNYRWI

SEQ ID NO: 5289 - protein, 1130 aa, synthetic construct
  REGION 1..1130: note = Synthetic
MKYSIGLDIGITSCGWSVINLDKKRIEDLGVRIFNAAEDPQKHTSLALPRREKRSSRRRFHRRRARLNYLKQFFIELNLLDKSEITQLLTPHKGQLNPYILREKALEEKLSTDELLIALYHIAKRRGYKSNRRAESSSDENENKKTLHAISENQKLLIDYQTVAKALNQNEKFAAHKRNKPNDYSNSFARADFESEITTILNKQAEFYPELTEEKINDLLYRQNYGLFFQRPFMSPELIAKMRGNCQFEKDTPRAQKASVSFEIFRLASDLAHLTYNNGQKLTSEEITTCIEKAKEVVTFKYSHIDKILNQTHPEEIIFDYIRGLKKKDLNSDTDEAKKKALNQKFSELKFYHAIKKALANLPEEWQKLEKNLKLFNEIGFILTANKEDESIIKHLKELNLSKQAIENITSIKQNFTGFCHLSILALDKITPYILEGNTYDKAVVLAGYNFNDKLSGDQNRLPALTEEESQQITNPVTKRAVSQTIKVVNAIIHKYGAPTRLHIECASELAKSYDKRRQIEDNQKDNQATNQKIVDILKNEYHIVTPNYLQITKYKLYLEQDGKCLYSNQPIDLDRLFTDEHYCEIDHIIPKSRCGNDSLINKALVFNRENQEKRNQTPFEAWGGDTERWQQFKTNVQSNLKIHPRKKLRLLAEVPPKEDWNSRALNDTRYITRFLSNYFKQHLKFSEDSHSKKKVFTPTGGITSYLRRIWHVGSKDRSGNLHHAVDATIIALVTEDIIKQCALMNKYIELGANYATKGINLSKFHHDIHSVIDPVTGEIIDLAGYEKIKEEVLPWPNFDTELRFRATPLAIFVNELPKNKKEPKPELAESAKLQQKNKSINTLAEWRDQFREIYNDQDELFKNSIHPIFVSRMPKRKGTGSLHQDTVRSPKGIIVDPKTQKITTNPNRSSYIRANLENIKLADLENSIIKTDDKSLYQQLKQLLEENDNDPKKAFKEPVYKNNIKVDKNGKPLSPVRTIKLIDDKNVKSGILLSRGTQFVNNGSMVRVDIYQKEVKGKNQLFYVPIYTHQVKKGSTRILPTTCGYDYVDETFKKLFSLYPNDYIIMKKDNNTIQGYYIKYNTSNSVITHISNLMPGSTNFKETTGRSLTEIYRLDISILGDNYPWEKLY

SEQ ID NO: 5290 - protein, 1133 aa, synthetic construct
  REGION 1..1133: note = Synthetic
LYTNRNTSLENLQHNIVGDGRLYFWYNVSMKYALGLDLGTTSIGWSVVNLDKNRIEDLGVRIFEKPEDPQDGKSLAVPRRTARSARRRLKRRRQRLNYLKQFFVKNSLLTDQQIEQLLTPHAGQLDPYVIRQKGLTERLSPEELFVALHHIAKRRGYKSNRKAVEENDTKGDGKKVLTAINENKVLLNSYKTVGSALLNDPKFSTHKRNKGTSYQNSFIRANFEAEIRQILTEQQQFYPALTDQNIQLLLLGDVEQGNKNGLFYQRPFMTPALIKKMRGKCPYEKGQPRIQKASYTFELFRLAQDLSHLTYSHRDEDGAIKEKIQLTPEQIQACIDKCKATRKVTYRAIREVLGHKDDNNFSFDYIRGKEPKREEYEKDHNAKEKNTFAELKFYHDVKKAAKDTPADWTKIEADIDLFDYIGEALTVNKDDATIEKELRGLITFGGAPVNLSDTTISNLMQLSYSGFAHLSAKAIRKITPFILQGNTYDKAVILAGYEFNQQLSGNSLKLPPLNEDEQNQITNPIVKRAISQTIKVINAIIHKYGSPMRIGVESAGELAKNFKDRQRIKKEQDDNAAVNEKIVTRLKEEFHVVNPTGLQISKFKFYLEQDGKCLYSGEPIDLNRLFDDSSYCEIDHIIPFSRCGNDSRANKALVLNHENQDKRNMTPFEAWGHTDRWPEFCTRVNTNPKLSPYKKKRLLAETLPKEDWNVRALNDTRYVEKFLAQYLRRHLKFEKYDDSDPDDKRRQHIVTPAGQVTTFFRRAWGIPHKDRDADCLHHSVDATIVALTTQGTIARLSRLNQWREVSKYLPIDTKTAVDKTTGEVVEYISSKDILPWPEFTKELDLRESQPKEGDSLATWRDQFRDIYKDQDEEFKNSIHPIFVSRMPKRRGKGSVNKDTVRSPKSKNGMRTVRTELNKVNLKTLDSSVLPESDLALYNQLKKRLAENGNDPAKAFAEPVYKNNKKFDKNGRPLSPVSTIKVYSKNPDTSGFLVNNGKAYVNNGSMIRLDVYKRINEKGKTEHFFVPIYAHQVKTGSKRILPEPKRGPKFIDDSFDKVCELFPNDYMRLEYIDKNGCKKLEQGYYMAYDISGCKIWLKPHLSSGNAMSYRVAPRSATTIQRLDINVLGDNYKWE

SEQ ID NO: 5291 - protein, 1133 aa, synthetic construct
  REGION 1..1133: note = Synthetic
MNYSLGLDIGTTSCGWSVINLDKKRIEDLGVRIFEGAENPKNGHSLAEPRREKRGMRKRLHRRRIRLNFLKQFFIQQKILSSQQIESLLAPHKNQINPYTVREKALSEKLTPEELFIALYHIAKRRGYKSNSRAESSGDADENKKTLSAITANQVFLKEYQTVGEALNHAEKFKSHKRNKPNDYSNSFARADFEDEIKKILNKQSEFYPVLNEEKIQELLYSENFGVLFQRRFMTPELIEKMRGKCQFEKEKPRAQRASYSFELFRLASDLVHLTYNMGNKLTIDEIASCIEKAKELSVLKYSHIQKILAEDMEDEINFDYIRGLKRKDLLKDEAEVKKKALEQKFGELKFYHAIKKALKDQSTEWAEIESNIELFDNIGFVLTANKEDDSVRKELEKLGLKPQVIDSISNIKQSFSGFGHLSLEALRKITPFILQGETYDKAVVDAGYVFKAKLACGLNRLPALSKEENNQITNPVVKRAILQSIKVVNAIILKYGTPTRLHIECASELAKSFDKRNDIIKIQDENRENNEKLVVRLKEEFHILSPTALQITKFKLYEQQDGKCLYSGKQIDLNRLFSDEHYCEIDHIIPRSRCGNDSMINKALVLNQENQEKRNQTPFEAWGSDEKRWQNFIARVESNPKIDAKKRARLLAKTPPKEDWNARALNDTRYITRFLSNYFKQNLKFAEHMAGKKVVYTPTGNITSYLRRVWHIGTKDRSENLHHAVDAVITALVTDEVVRQCALMNKMIELGAKYKTKGINLADYQNGMLATTDPVTGEVVDLAKYEEVRESVLPWPNFDREVRFRATPLACFMVEDKENKKKAEEKKAQLSDDAKARLQNVSINTLAEWRDQFRDIYKDQDEKFKNSIHPIFVSRMPKRKGTGSLHDDTIRSPKGILIDEKTGIISANPNRSSFIRKKIQDIKLTDLENSILKQSDTVLYQQLKSFLEANGDDPKKAFKDPVYKNNVRFDKNGRPLSPVTTIKINDDKNVKSGISLNHGTQFVNNGSMARLDVYQKEIKGEKKLFYVPIYTHQVRRGSNRIIPTTCGYDFVDETFKKLCSVYPNDYLIMKKGDEVLQGYYIKYCINNSAISYISNIKEGRSDFVNATGRALSELYRLDISVLGDNYPWERMY

SEQ ID NO: 5292 - protein, 1223 aa, synthetic construct
  REGION 1..1223: note = Synthetic
MDDGIKYSLGLDIGTTSVGWAVVNLDKERIEDLGVRIFERPENPKNGKSLAEPRRTARSTRRRLRRRRQRLNYLKQFFINQGLLTKQEVDDIIGSAHTKAWHQAHDPYQLRVKGLTEKLSPDELLIALYHIAKRRGYKSNRKSIEQSDTTGDGKKVNSAISKNDRILSEMKYSSVSQALLTDDRFRERKRNTIDDYRYSFSRVDFLDEIRHILDRQKDFYPNEFSIDHINQLLGIDVYHDEKGQPIPIDHKLTNNDINRLTKHGQTTLNGIFYQRPFMTSELINRMRGKCPLEKDQPRAPKASYSFELFRLAEDLSHLQYTLDFVETGTDWQVRKERKRQAQFLTADQIKTCVDKCLKTQTVKYSAIREILGFKDDNSFQFTYIRGKSPDEKTLAKDPLAKEKNTFAQLRFYHGVKSVLKDLPNDWQDVSSDQDLFDKIGEVLTCNKDDYSIREGLIEVNKDRSARGKAELSDEAINAIVNSKLSFAGFGHLSLVALRKITPYLLKGNGMTYDKAVEEAGYQFNARLSGHKNLLPPLSEEESHQITNPVVKRAVSQTIKVVNAIIHKYGAPYRIGIECAGELAKSFKEREDIKKRQDKNAENNQETVKELRSGKLVFDGEQFEAQVAPTGTSITKLNFYKQQDCKCPYCGEPLNLSKIFSDDNYAEIDHIIPFSICGNDTKANKVLVHTTCNQIKGNQTPYQTWGNNPERWRIIEATARANHKLGAAKQKRLLTQTLPDEDWSLHAINDTRYISKFISRYIKSNLKFRPMDDAEDDGHTQRQRVIMPAGAITSYLRRMWHIGHKDREEDCLHHSVDAVIVALTTQAIIQDCSIYSAYIDDHTKMQFSDNASQAGSAKLVRALRQITDPATGEVKEADYKKLMQDMLPWPRFDEELRKREEQPDPVNDTLAIWRNKFSDLYKDQDSDFINRIHPIFVSRMPKRQGTGAANKETVRSNKTKDDDGKTRSAKVKLRGLTLKQLNNSAISSNEGVYEQIKQYIIDRDKWKDEIKAWRKAKKASKQTSNTDEANDDKNEPSVPTEPQEPKVYKSNRRFDRNGNPISPIKSIKVYDPHPMTSGFLVNNDTAYVNNGSMVRLDVYKHPNKKGKIEHFFVPVYAHMIKKGHPEIKPTKILPEPKKGTPKEIDSSFSFVCSLFPNDYVRIHLMGEVREGYYVKYNIANGAMQLLPHYASGKSTNNLIQVYGKNAPKIERLDINVLGDNYKWD

SEQ ID NO: 5293 - protein, 1061 aa, synthetic construct
  REGION 1..1061: note = Synthetic
MCLGMPSPHELTPFCLKQTINPDDVGLCNLILQKILSRGHMETIWGLDLGTTSIGFSVVRMDIKKEQGEIIKTGVRIFPEGLNNDHEPRNKRRRDMRLHRRQLRRRRIRRIELSRKFKEMDLLPEFSSDCWNKLMEQDPYVLRNKGVSERLELHQFGRAIYHLVQRRGFLSNRRSTGSEEGKEEEGIVKSALQDLDQELGESTLGQYLSEQEIKRGRYLDRNRVIEEFKRLWQCQRAYHAEILTEKIEKELYEFIFHQRPVFWRISTLGNCRLLPDSRLCLKGSWLGQQYLLFQELNSLRLDGSNEPLPNEERQQLIDALLDEGELSWAACRKILKTSWQKRGIPLKTKFNLEFGGKSKLAGNRVVSSIRSVLKENSIEVKEIEKLYQLLPQWHFEILYKEVGEGRNARIVMRNNQEIEQKERFFVNQLMSEIKLEEKIAKKLVSLDFPAGWLSHSTDAIERLMPYLEQGFVYSDACDRAFPSHRVVEGEGLEFLPSDQSYLKEVRNPTVKRALNELRKVVNNLIRTYGKPDRIRVELARELKLPSTKRRDYQKKTKQRENERTQARDAIRKANFRGNSLEIEKYLLWKESDEKCLYTNQSISFSALFEEGKYEIEHILPYSVTLDNGFMNKTLCETNFNGFKSNRIPFEAFKNSGGEEEWKKFVERVKKSKLPDPKKRRLLAQKIEDLVGDDPAERQLRDTAFIAREARDFLMKLFTKKEDKAIPVETSNGMITAQLRQLWGMNQLLAEGDKKNRDDHRHHAVDAVVVAMVHPGTVRHMSFLSKNWLRGERTQFPAPWQNFYQDVQKSIESIIVSHKVRSKVNGKLHDELVYGKRKDQTGSKKGSSVYKRRVNLQSLSKSQLQKLKDGTLEAAWDGGGNVQQILRNHLEHNKDFSTLPFFNLEHGEKRFIKSISLLYNKKDHLVEDLHGKQSTFVDKNENHHVAVYENGDGEIRFEVISRMDAAKNLSQLGSPVIREIRGGFRFKFSLVINDAVISYDEENRPNVLIVQSIWDSGNVVFRDHRDAGNKDRGINKSISTLISEGWEKCAVDPIGRLAKKND

SEQ ID NO: 5294 - protein, 1088 aa, synthetic construct
  REGION 1..1088: note = Synthetic
MKYIIGLDIGIASIGYAVMLLNEKDEFHKILKMGSRIFEAAEHPKDGSSLAAPRRINRGMRRRLRRKRFRKEQIKELIVRKGIMPYEEIDNIYNSRKELSDIYEIRADALDKKLTKEEFVRLLIHLSQRRGFKSNRKVDAADSKSEAGKLLNAVKSNKALMDEKGYRTIGEMLYKDEHFSKNKRNKADDYSNTFARSEYEAEINTIFDCQKTFGNQYASDELKEEYLKIYLSQRSFDEGPGGDSPYGGNQIEKMLGKCTLEPEEFRAVKASYSFEYFTLLSKVNSIKLKTPDEKRFLTKSEREAVVALAFNKKSITYASVRKELKIPENTYFNISYGNGEKTPEDIEKKTKLTYLNAYHTFKKAYGDVYTKWSTEKKNYLGYAIAVFKNDKKIIEYLTEHNFDKSEIEIALTLPSISKTGNLSIKAMDKIIPYLEEGMLYNEACEAAGYNFKADETDKRMYLPANEKDAPELEDIRNPVVRRTVSQTIKVINAIIREYGESPCFVNVELARELSKDRKERNEIEKRQLDNKKRNDEVVEELKSTFGLIQPTGQDIVKYKLWKEQDGICPYSLKPISIEKLFDVGYTDVDHIIPYSISFDDTYNNKVLVLSSENRQKGNRLPMQYLSGKKKDEFYLWVDSSNLRNRKKKNLLKEEISEDDISGFKKRNLQDTQYISRFMLNYLKKYLALQPNAAKSKHTIKAVNGAATAYIRKRWGINKIREDGDTHHAVDAVVIACATDSMIQTISKYSKYREERFVHPEIGKEIDFETGEIIDKFPMPYKWFRDELLMRTSNNPSRILHEKPLPNYGIDEEVEPIFVSRMPNHKVKGAAHMETIRKKYEEDGKSYSVAKVPLSSLKLKNGEIEGYFNPASDMLLYNALKERLAEFGGDGKKAFADSEEPFYKPKSDGTPGPIVKKVKIINKSTLSVPVLKGTAIADNGSMVRVDVFYVEGEGYYLVPIYVSDTVKPELPNKAIIAYKSYEDWKEMKEEDFVFSLYPNDLIHIKFKKEMKLSLTQKESTLSKNLLLKEGYFYYKQTGISVASIKIINHDNTYKVDNLGVKTIPIIEKYQVDVLGNIRKAGKEKRMRFK

SEQ ID NO: 5295 - protein, 1086 aa, synthetic construct
  REGION 1..1086: note = Synthetic
MSYGLGIDCGIASVGSGTVLLNEKEEPYKIDFMGVRTFDKAETGTGKSLAAERRTFRGSRRTHRRKTHRKDRIKKLICDTMNVDFKYIQSIYERKNLSDIYEIRYEALNRKLTKDEFIRLLIHLSQRRGFKSNRKIDAKNKNSDDGKMLKEIEKNKSIFTDNGYRTIGEMLFKNEKFIQRKRNKSDYSMTFLRVDYENEIKVIFNQQRKFNNQHATESFENEYLKIYLSQRNFDDGPDESSPYGGNLIGKMVKNCTFEPTLKAAPKASYSFEYSNLLTKVNSMKILYNGNRRPLTKEEREKVVNLAFKKNKITYSSIRTELGLSNEEFFNISYNSKDYTETEKKTKFSYLTAYYEFKKAYGSSYLEWSVEKKNTLATILTLHKNDSKIIEEMKEKNFLEDEINVALTIPSFTKFGNLSIAVLNKMIPYLEDGMLYNEAITALGYNFKDDDKCQQMYLPSNPKDAPELDEIRNPVVRRTVSQTIKVINSIIREKGESPTYINIELARELAKSYKERKNIESNQKSNREKNEKSFEELKKLGVVKPTAFDLVKYKLWKEQDGICVYSQKPLKIEKLFSEGYAEVDHIVPYSISFDDSYSNKVLVHTNENQNKGNRIPLNYLSGKERDEFIVWVKNSHLSFRKKQNLLKEKISEDDFDGFKNRNLKDTQYLSRFLLKFIKKYLKFAPSSTNRKETVIAVNGAITSYIRKRWGIEKIRANGDAHHATDAIVIACVTKSMIKRISEYSKYKETLYIKNNNETLDVDKITGEVKNYFPMPYKWFRTELDIRCSKNPERLLASNPIPTYARDEKVKPIFVSRMVNRKVTGPAHQDTLRRMVVENGQKYEVVKTDLNKLSLDNNNEIANYYNPDDDRLLYDALKNHLIKFKEMHKEENGKKKVEDAFTEPFYKPKSDGSKGPLVKSVKIIKKITSSVTLNNNTTIAKNGDMIRTDVFRTEDGYYLVPIYVADTVKNELPHKAIVQGGEWKAMNDEDFLFSLYRNDLIKIKSNSDVTFSLMNESSSLPKTESLREEFVYFKGTSINTASIRVVTHDNCYIKKSLGVKNLQSLEKYQVDVLGNVSKVKKEKRIGFR

SEQ ID NO: 5296 - protein, 976 aa, synthetic construct
  REGION 1..976: note = Synthetic
MKYIIGLDMGIASVGFATMMLDEKDEPCRILRMGSRVFEAAEHPKDGSSLAAPRRENRSMRRRLRRKRHRKERIRSLIVDNGIMTLEKIDGIYDAKNPLTDIYQIRAEALDRCLSVEEFVRLLIHLSQRRGFKSNRKVDAQEKKSEAGKLLTAVSANHQLMTEKGYRTIGEMLYRDKKFFECKRNKADDYSNTFARSEYEEEIKAIFRSQQGLGNPYATDKLMDDYLAIYLSQRSFDEGPGGESPYGGNQIEKMIGKCTLEPSEKRAAKATYSFEYFNLLTKVNSIKIISDREKRTLSDGERQAVIQLAFSKNAINYASLRKTIHMTDSERFNISYSQSDKTADEIEKKTKFTYLTAFHTFKKAYGKAFVDWPTEKKNRLAYALTAYRNDSSIITYLTDNGFDKTEIEIALTLPAFTKWGNLSEKALNKIIPYLEQGMLYHEACTAAGYNFKADDTEKRMYLPTRAHIPPEHRKSAEQIEAPELDEITNPVVRRAVSQTIKVINALIRERGESPCFVNIELARELSKSRADRNKIEKGQKENQANNDRIMERLKKEFGLLSPTGQDLIKLKLWEEQDGVCPYSLKPISIERLFEPGYTDIDHIIPYSLCFDDTYNNKVLVMSSENRQKSNRIPMQYLEGKRRDDFRIWVQNSHLRFKKKQNLLKETLTADDLSGFKKRNLQDTQYLSSFMLKYLKKYLALSPNSTGRKNTIQAVKGSATAYMRKRWGIQKIRENGDTHHAVDAVVIACVTSGMIKRISEYAKYKETKYQNPDTGEYFDVDKRTGEVINRFPMPYSWFRDELLMRCSEDPSRVLHEKPLPNYATDEQIAPIFVSRMPKHKVKGSAHEETIRKPYEQDGQQYTISKVPLTSLKLKNGEIENYFNPGSDTLLYDALKERLLTFGGDAKKAFAEPFHKPKSDGTPGPVVKKVKLKKRATLSVPVQQNTAVADNGSMVRVDVFYVEGEGYYLVPIYVADTV

SEQ ID NO: 5297 - protein, 1087 aa, synthetic construct
  REGION 1..1087: note = Synthetic
MKYIIGLDMGITSVGFASMMLDDNNEPCRIIRMGSRIFEAAENPKDGSSLAAPRRENRSMRRRLRRKRHRKERIKNLIIQNNMMTADEIDAIYNSGKELPDIYKVRAEALDRKLDTEEFVRLLIHLSQRRGFKSNRKVDAKEKGSEAGKLLSAVKSNKELMVERNYRTIGEMLYKDEKFAEFKRNKADDYSNTFARSEYEEEIREIFRAQQEYGNPYATEELKDSYLEIYLSQRSFDEGPGGDSPYAGNQIEKMVGSCTLEPDEKRAAKATFSFEYFNLLTKVNSIKVVSSAGKRSLNEDERKRVIKLAFAKNAISYASIRKELNLGDGERFNISYSQSDKSIEEIEKKTKFTYLTAYHTFKKAYGSVFNEWSAEKKNHLAYALTAYKNDNKIKKYLTENGFDAVETDIALTLPSFSKWGNLSEKALNKIIPYLEQGMLYHDACTAAGYNFKADDTDKRMYLPAHEKEAPELGDITNPVVRRAISQTIKVVNAIIREMGESPCFVNIELARELSKNKAERSKIEKGQKENQARNDRIMERLRNEFGLLSPTGQDLIKLKLWEEQDGICPYSLKPIKIENLFDVGYTDIDHIIPYSLSFDDTYNNKVLVMSSENRQKGNRIPMQYLDGKRRDDFWLWVGSSNLSRRKKQNLLKETLSDDDLSGFKKRNLQDTQYLSRFMLNYLKKYLTVAPNATGRKNTIQAVNGAVTSYMRKRWGIQKVREDGDTHHAVDAVIISCVTAGMTKRISEYAKYKETEYQNPETGEYFDVNKNTGEVINRFPMPYAWFRNELLMRCSEDPSRILHEMPLPNYATDEAVAPIFVSRMPKHKVRGSAHKETIRQSFEEDGKKFTVSKTPLTDLKLKNGEIENYFNPESDVLLYNALKERLIAFGGDAKKAFEAPFHKPKSDGSEGPLVKKVKLICKSTLTVPVLKNTAVADNGSMVRVDVFFVEGEGYYLVPIYVSDTVKKELPNKAIVAHKPYEEWKEMREENYVFSLYQNDLIGIKLKKEMKFSLVQKNSTLPKNINVKDGLFYYKGTNISGANISVINNDNTYTVESLGVKRIPVIEKYQVDVLGNVSKVGKEKRVRFQ

SEQ ID NO: 5298 - protein, 1087 aa, synthetic construct
  REGION 1..1087: note = Synthetic
MKYAVGLDIGISSVGYAVMMLDETDTPSAILKMGSRIFDAAENPKDGSSLAAPRRNNRGMRRRLRRKRFRKEQIKDLIVKNGIMSYSDINEIYNSGKVLSDIYSIRAEALNRILTKEEFVRLLIHLSQRRGFKSNRKVDASDSKSEAGKLLDAVNKNKSLMEEKHYRTIGEMLFIDEKFAKNKRNKAEDYANTFARSEYVAEINTIFDAQKVFGNEYATDELKEDYLKIYLSQRSFDEGPGGNSPYSGKQIEKMLGKCTFEKKEFRAVKASFTFEYFSLLSKVNSLKLKSSTEKRFLTKAERDAVIALSFNKKNISYASIRKELNLPNDTLFNISYGNGDKTVEEIEKKSKFTYLNAYHTFKKAFGDSYINWSTDKKNHLGYAIALYKNDNKIAEYLSEHGFDKSEIKIALSLPSIPKAGNLSLKAMNKIIPYLEEGMIYNEACKAAGYNFKADETDKRMFLPANEEDAPELGDIRNPVVRRSISQTIKVTNAIIREFGESPCFVNIELARELSKTKKERNEIEKNQLENRNHNEEIVKELKSTFGLLQPTGQDIVKYKLWKEQNGICPYSLEPILIENLFDIGYTDIDHIIPYSISFDDTYNNKVLVLSSENRQKGNRIPMQYLTGKKKDDFWLWVDNSNLRARKKKNLLKEEITDDDISGFKKRNLQDTQYISRFMLNFLKKYLNTQPNSSGKKNTIIAVNGAATAYIRKRWRINKIRENGDTHHAVDAVVIACVTDSMIKKISEYSKHKETEFVHPETKEIKDIDLRTGEIINKFPMPYNWFRDELVMRTSNNPTRILHEKPLPNCGTDQKVEPIFVSRMPNHKVKGSAHEETIRKKYEEDNKTYSVSKVSLSSLKLTNGEIENYFNPSSDMLLYNALKQRLAMFGGNGSKAFEEPFYKPKSDGSQGPLVKKVKIQSKSTLSVPVLKGTAIADNGSMVRVDVFFVEGEGYYMVPIYVSDTVKPELPNKAIIANKPYTEWKEMKEQDFLFSLYPNDLIRIKFNKEKQFSLVQKDSTLAKNLLLSEGYFYYKKASISSASITIINNDNTYTVASLGVKRIPLIEKYQVDVLGNIQKVGKEKRMRFR

SEQ ID NO: 5299 - protein, 1095 aa, synthetic construct
  REGION 1..1095: note = Synthetic
MKYSIGLDIGIASVGSAVMLLDTNNEPCKIYRLASRIFPKAEESDGSSLAMNRRINRGMRRRLRRKQHRKERVRNLICEKFHIDDSYIVSLYCEEKLSDVYKIRFDALERKLSNDELIRLLIHYSQRRGFKSNRKVDVSEKDEKTEEGALLGAVSENHKLMERKGYRTIGEMLYCDEKFSVCKRNKGGCYSNTFSRKDYENEIRTVFSLQRKYGNEYCTEELEEKFISIFLSQRSFDEGPGPGKDSKYSGNQIEKMLGKCTFEKEEFRAVKASYTFEYFNLLCKVNAIKIITNKSKRCLTDDERETIKQLAFSQKEITYSTLRKILHLNDSELFNISYILTDDNKKKGANDKPFAARDSVEKKTKFNYLKAYHAFKKAYGDVYNSWNKDKRNKLAYVLTVFKTDRKIKEQLAKAEFSDEEIKTALTIPSFTKTGNLSVKAMDKMIPYLEQGYLYNEAAEMAGYHFRADEKCAGMYLPVNAAKAPELHDIVNPVVRRAVSQTIKVINAIIRDMGCSPTYVNIELARELAKSYDQRSKMEKENKNQMAQNEKLMEELRKEFKFGNPTGQDLIKLKLWNEQNGHCMYSGKPIERARLFEDSYAEIDHIIPYSISFDDRMTNKVLVLAKENRDKGNRLPLEYMTGKTADDFRIRVKTSTLRNKKKMNLLKEKLTEEDTEVFKQRNLTDTQYISKFLTNFIKKYLKFEGDSKVVSVAGGATAYIRKRWGIKKIRADGDCHHAVDACVIACTTQGMVQRISLYSKYKETEYTDENGNIFDVDHKTGEVIDRFPLPYATFRKELEMLTSNDPKRLLGELNLPNYRGDEELKPIFVSRKTNRKITGQAHEETLRKPVVEDGERYVVQKVALTTLKLDKNGEIANYYMPQSDTLLYNALKARLTAFGGKADKAFSEPFYKPKSDGSRGPLVKKVKTIEKRSLSVPLANNTAAADNGSMVRIDVFYIDGEGYYIVPIYVADTVKKELPNRAIVAFKPYEKWKLMDDNDFVFSLYPNDLIKVTSKKKMKFSLVRKESTLDKEYLTQTEYLYYKYTGISTASIKVINHDNTYKIDNMGVKTLLSIEKYEVDVLGNIHKVNKEKRMGF

SEQ ID NO: 5300 - protein, 1087 aa, synthetic construct
  REGION 1..1087: note = Synthetic
MKYIIGLDMGITSVGFATMMLDDKDEPCRIIRMGSRIFEAAEHPKDGSSLAAPRRINRGMRRRLRRKSHRKERIKDLIIKNELMTADEISAIYSTGKQLSDIYQIRAEALDRKLNTEEFVRLLIHLSQRRGFKSNRKVDAKEKGSDAGKLLSAVNSNKELMIEKNYRTIGEMLYKDEKFSEYKRNKADDYSNTFARSEYEDEIRQIFSAQQEHGNPYATDELKESYLDIYLSQRSFDEGPGGSSPYGGNQIEKMIGNCTLEPEEKRAAKATFSFEYFNLLSKVNSIKIVSSSGKRALNNDERQSVIRLAFAKNAISYTSLRKELNMEYSERFNISYSQSDKSIEEIEKKTKFTYLTAYHTFKKAYGSVFVEWSADKKNSLAYALTAYKNDTKIIEYLTQKGFDAAETDIALTLPSFSKWGNLSEKALNNIIPYLEQGMLYHDACTAAGYNFKADDTDKRMYLPAHEKEAPELDDITNPVVRRAISQTIKVINALIREMGESPCFVNIELARELSKNKAERSKIEKGQKENQVRNDRIMERLRNEFGLLSPTGQDLIKLKLWEEQDGICPYSLKPIKIEKLFDVGYTDIDHIIPYSLSFDDTYNNKVLVMSSENRQKGNRIPMQYLEGKRQDDFWLWVDNSNLSRRKKQNLTKETLSEDDLSGFKKRNLQDTQYLSRFMMNYLKKYLALAPNTTGRKNTIQAVNGAVTSYLRKRWGIQKVRENGDTHHAVDAVVISCVTAGMTKRVSEYAKYKETEFQNPQTGEFFDVDIRTGEVINRFPLPYARFRNELLMRCSENPSRILHEMPLPTYAADEKVAPIFVSRMPKHKVKGSAHKETIRRAFEEDGKKYTVSKVPLTDLKLKNGEIENYYNPESDGLLYNALKEQLIAFGGDAAKAFEQPFYKPKSDGSEGPLVKKVKLINKATLTVPVLNNTAVADNGSMVRVDVFFVEGEGYYLVPIYVADTVKKELPNKAIIANKPYEEWKEMREENFVFSLYPNDLIKISSRKDMKFNLVNKESTLAPNCQSKEALVYYKGSDISTAAVTAINHDNTYKLRGLGVKTLLKIEKYQVDVLGNVFKVGKEKRVRFK

SEQ ID NO: 5301 - protein, 1084 aa, synthetic construct
  REGION 1..1084: note = Synthetic
MKYSIGLDIGITSIGYAVMLLDGNDQPCRIMRMGSRIFDAAENPKDGSSLAAPRRENRGMRRRLRRKRFRKERIKSLIEQSGIMSVKEINSMYQTAAELPDIYEIRCRSLDSELCKEEFVRLLVHLSQRRGFKSNRKIDSQDKKSEAGALLSAVEENKRLLESKGYRTIGEMLYKDEKFSEFKRNKSDNYSNTFARQAYCDEIKLIFSRQREFGNVLASEKLENDFLEIYLSQRSFDDGPGGESIYGGNQIEKMLGKCTFEKGELRAVKASFSFEYFNLLSKVNAIKIVSASGKRALTDNERNKIISLAFSKNCITYKSLRKELGLSDSEHFNISYGEKSVEDTEKKMKFTYLNAYHTFKKAYGESFTKWNTDKKNELAYALTVYKNDSKITAHLADKGFDDAEISIALTLPSFSKTGNLSVKALEKIIPFLEQGQLYNEACLSAGYNFKADEQCKEKFLPANPETAVELKDLTNPVVRRAVSQTIKVINAIIREFDDSPVFVNLELARELSKNFKDRKDIEKSQKDNQAANERIMERLRNEFHRPKPTGQDLIKLKLWEEQDGICPYSLKPISIDRLFEIGYTDIDHIVPYSISFDDTYNNKVLVLSSENRQKGNRLPMQYLSEDKKDSFYLWVDNSNLRSRKKKNLLKETITDDDLSGFKKRNLQDTQYISRFLLNYLKKYLQLAPNTKDRKNTIVAVNGATTAYVRKRWGISKIRENGDVHHAVDAVVIACITQAMIKRISEYSKYHENEYINNNGEYFDIDKRTGEMINRFPTPYPYLRDEIDILCSNDPSRYLLESPLPNYSVGEDVKPIFVSRMPKRKITGAAHKDTIRKPYEIDGKNYAVSKVALTSLKLKDGEIENYFNPSSDILLYNALLKRLKQFNGDAKAAFAEEFNKPKSDGSKGPRVKKVKIIEKSTLTVPVHNGTAIADNDSMVRTDVFYVEGEGYYLVPIYVADTVRKMLPNKAITRDRSYCDWKVMDEKDFLFSLYPNDLIHIVSKKDMKFSLVNKDATIAKNYISKDIFVYFKGTDISTASITAINHDNTYKLRGLGVKSLLSMEKCQVDVLGNVTKSGREKRMGFR

SEQ ID NO: 5302 - protein, 1096 aa, synthetic construct
  REGION 1..1096: note = Synthetic
MAYGIGLDIGIGSVGWAILALDHEENPWGIIDLGSRIFDVAEQPKTGASLALPRRQARSMRRRLRRHRHRLERIKNLMISFKLVTQEQLDSLYEGQLEDVYELRVRALDEKLSNEELARVLLHLAKRRGFKSNRKADAASEEAGALKKAISLNQAAMDENHYRTVGEMFYKDPRYADYKRNRGGNYLNTVDRSMVEDEARKIIESQRQLGNPVMSPEFEEGYLSILLSQRQFDEGPGGKSHYGGNQIFNMVGSCTFEKGEKRAPKACYSFEYFNLLQKVNHFRLTSSKDNRPLKDTERKQLIELAKTTADLRYSKIRKELNIDESYRFADIFYKADPDVEEKKAKFNYLPFYHQIKAKLKSAGENVAEYSVPKLDKIGEILTFYKGDDARRKNLKEAGIPDTAIEALLLLTGARKFGHLSLKALRKITPFLEQGMVYNEACDAAGYDFRAHEAEKSMYLPANSDKAPELDDITNPVVRRAIGQTIKVVNAIIRKQGASPLYVNVELAREMAKDFQERKQIEKTYKENRDNNDAIMAKIKEEDHQLNPSGLDLLKLKLWEEQDGKSPYSQKSIDRARLFETGYVDIDHIVPYSISFDDSYKNKVLVFSSENRDKGNQLPYPYILKKYGQEAADAFKVWVNNSVRDFRKKQRLLKEYLTEDEMKGFKERNLQDTKYLSRFLYNFIRDHLEFAPSETGKKKRVLAVNGLITSYLRKRWGIRKIRANGDKHHAMDAVVIGCTTDKMIRDLTLYSEERENEYDAGYRESLLVDGKTGEVLKKFPMPWEGFRQELEARCSENPAGRLAGLPFYMNKDWNSIKPIFVSRMPRRKVTGAAHKDTVRSARHIQEGITVSKVPLETLKLDKNGEIDGYYNPDSDRLLYEALKARLEKFDGKGKEAFSKPFYKPKADGSQGPLVKKVKIQTKATLAVPVNQKTGVADNDSMVRVDVFYVEGEGYYLVPIYVADTLKKELPNRAIVQAKPYENWKIMLDKDFQFSLYPNDVIYVESKRKINFKVTKDKSEDSTLKPQFDCLSVLGYYEGTDIATGAINVITHDDSYLKHGQGVKTLVSLKKYQVDILGNVHPVKKEKRQAFSIKQKAK

SEQ ID NO: 5303 - protein, 695 aa, synthetic construct
  REGION 1..695: note = Synthetic
MKEKNFLEDEINVALTIPSFTKFGNLSIAVLNKMIPYLEDGMLYNEAITALGYNFKDDDKCQQMYLPSNPKDAPELDEIRNPVVRRTVSQTIKVINSIIREKGESPTYINIELARELAKSYKERKNIESNQKSNREKNEKSFEELKKLGVVKPTAFDLVKYKLWKEQDGICVYSQKPLNIEKLFSEGYAEVDHIVPYSISFDDSYSNKVLVHTNENQNKGNRIPLNYLSGKERDEFIVWVKNSHLSFRKKQNLLKEKISEDDFDGFKNRNLKDTQYLSRFLLKFIKKYLKFAPSSTNRKETVIAVNGAITSYIRKRWGIEKIRANGDAHHATDAIVIACVTKSMIKRISEYSKYKETLYIKNNNETLDVDKITGEVKKYFPMPYKWFRTELDIRCSKNPERLLASNPIPTYARDEKVKPIFVSRMVNRKVTGPAHQDTLRRMVVENGQKYEVVKTDLNKLSLDNNNEIANYYNPDDDRLLYDALKNHLIKFKEMHKEENGKKKVEDAFTEPFYKPKSDGSKGPLVKSVKIIKKITSSVTLNNNTTIAKNGDMIRTDVFRTEDGYYLVPIYVADTVKNELPNKAIVQGGEWKAMNDEDFLFSLYRNDLIKIKSNSDVTFSLMNESSSLPKTESLREEFVYFKGTSINTASIRVVTHDNCYIKKSLGVKNLQSLEKYQVDVLGNVSKVKKEKRMGFR

SEQ ID NO: 5304 - protein, 1066 aa, synthetic construct
  REGION 1..1066: note = Synthetic
MCKDTHPSSHVKEFARVITDAKSSKDELILGLDLGVASIGWALIAPQNKKRPIAAMGVRRFEAGVEGGAAKIEEGKATSRAKVRRDKRQVRRQGFRRARRLANLFYLFQQNGMLPAGPSKKPEERHAILQRMDAELGKKFTDRCNAHVVPYYLRASATDSNQDLSLLEIGRALYHLAQRRGFKTNLKAANDEEDGVVKQGIGQLYQEIEGANCQTLGQYFATLDPEQLRIRGRWTSRQMFLDEFELIWKTQAGSHPELTNELKEKVHHAIFFQRPLRSQKHLIGHCELETAKRRAPAASLEFQEFRYLQKLNDLTYWDEDCQPQQLSDQQREELITELEANGDLTFKGIRKVLNLKTSKQNPSLHIFNFEEGGDSKIPGNRTASKLSAILGTQWTSMPPVERGGLVDSILSFQSAPALRKHLVSKWGISDENAQRIVDCRFEDGFGSLSRKAISRLLPHMRQGLNYYQAENAEYPEARKMDAIYDRLPPVNVVFPSLRNPAVVRVLTELKKVVNALIRKYGQPTKIRIELARDLAKSNRQKQAIFKRNRENEKSRERAIKGLLAEMGEKYVTSGNVLKVRLAEECNWDCPYTGRRMEMATLVGENPQFDIEHIQPFSRSLNNSFLNKTLCYHEENRSRKKNRTPWEAYGETESWDEMLMRVKNFIGPARNKKLELFSAHAIEEGFAQRLLSDTQFVTKTAADYVGLLFGGRQDSDGKLRVEARTGMLVSYLRDVWQVNRILHGGNQKNRADHRHHAVDALVVACSTNGTVKQLSDAAKRAEELGIRHKFDDVELPWKNFIEDATTAVNEVIVSTRVHRKLNGQIHDESNFSPPCVDPENKKTYHRIRKPLSSLSANEVDAIIDPAVRDAVKTQLDRIGGVPAQAFKDEANLPYIRGRNGRFVPIKKVRIRSRILPKLVLGKGDSRRYVAPGNNHHAEFLLKFDNDKERAVWDFTVVSLYDSMLRSKKGQEGPCEVIQKDHGPGAKFMFSLVPGEHLEVEIEPGQRQVVRCLSFSDGDLELILPEDARPSTERKASRIRIRSAKRLTEIQPRKVLVDPIGQVFPAND

SEQ ID NO: 5305 - protein, 1116 aa, synthetic construct
  REGION 1..1116: note = Synthetic
MLRYSLLHPPVKRVKAMDTMDSTDESVPYILGIDLGSASIGWAVLTRPAAGENALLTNGVRVFDPGVTGEIGDIEAGKDEARGKARRQARQSRRQTWRRAWRMKKLFRELQSAGLLPLTAPGEHQDEATARYATIEALDGELRARWLAPQPLAVPGSANGAGAAPALQPAPAPEHVLPYLLRARALDMRLEPFEIGRALYHLAQRRGFLSNRLTAPKEDEEEGQVREGISSLEEEMRQAQARTLGEYFSRLDPTEERIRRRWTARSMYEGEFDLIWKAQAVHHPQLLTPQLRKRLHSAIFYQRPLKSASALIGECEFEKGRRRAPWACLEAQRFRLLQKVNDLEVVTQGQRHLTGDERAALLAALETRADMKFAEIRRLLGLKNQRFNLEAGGEKKLKGNLTAAVMTRCFGERWETFKDEERARIVEEWRTIEKPETLVRRLVDVWGAPEPPARQLSGERAPNGYCHLSRKALRKLLPLMEEGVQYMAAVDKVYGTSFSGGLVSDRLPPVRELLPQLRNPAVGRALTELRKVVNAIVHEYGKPAEIRIELGRDLRRPREERARIWRENRSRQDERERVRSILREEVGVPQPSRDDIDKYLLWQECGNFCPYTGRPISREALFGAAPQFQIEHILPLSRFPDDSFQNKTLCYHEENARKKNRTPFEAYGADPDNWARLLERVGKFKNREKLRRFEMQQTETEALLQQFSSRQLNDTRYSAKVAAQYLGALYGGRDVADPATPTGSRRVVFTSTGQVTATLRREWRLNGILPAPAGLTEPAEKARHDHRQHAIDAIVTALATPAWVKRLSDRAAGNQRQSGRASFRGLEGPWPNFADSVREAVLSITVSHRPEHKLSGQLHEETNYGRPYKHIEKGRETDRANVRKPLSAIKPGEIARIVDPAVREAVERRLEGLGGDLKKLQLAATPPRHRPAGAAPEPPPFLKARDGREIPIFKVRVWQALTPQKVGEGSRERQVALANNHHAEIFALLDEQGQEQRWDAVVVSRLEAMRRKRSGQPLVQRDQGPSCLFKFSLMLGDTVQIEDEGHRTLFVVRKISESGKGRIEFAFARATDARRAKDIKLGKGRDWPRPSPDGLRKLGCAKVSVDPLGRVRPAND

SEQ ID NO: 5306 - protein, 1104 aa, synthetic construct
  REGION 1..1104: note = Synthetic
MTGTTGSDTATPYVLGIDLGSASVGWAILRQPAPSGNDLVATGVRVFDPGVTGEVSDIEAGKDEARGKERRDARQARRQCWRRAWRMKRLFRELQAAALLPPTLPGEHPDEPTSRYATIERLDAELRERWLNAGSAASPAPAGAGAAAQPAQATVAAPSQVLPYLLRARALDQRLEPFEIGRAIYHLAQRRGFLSNRLAAPKDDEKESEVYSGISALAAKMQEANARTLGEYFSRLDPREERIRDRWTARRMYEREFDLIWAPQAAHHPQLLTARLCKRLRRLVFYQRALKSASGLIGQCELEKGQRRAPWACLEAQRFRLVQSVNNLRVTSQGSRELTPDERSRLLAALEGRKDMTFEAVGKLVGLRGERFNLEAGGEKKLKGNRTAALMTACFGDRWQTFADQDRARIVGEWCNIGNSEKLVSRLVGVWGAAEPQARKLAGERPPKGHCHLSRQALRRLLPLMERGMPYMTAVDEVYGVRYSGGQVYGQLPPVREILPQLRNPAVARGLTEFRKVVNAIVREHGKPAEIRIELGRDLRRPREQRKRIWKESRAREDERDRARRLLESEIGIPKPTRGDIEKFLLWEECGHFCPYTGQPISREALFVEPQFQVEHILPLSRFPDDSFQNKTLCYHEENARKRNRTPFEAYGADPEWPRILERVKNFNNHEKLRRFQMQETDAGQMLEQFSSRQLNDTRYGSRVAADYVGALYGGRDVADPAMPDGKQRRVVFTSTGQVTAILRREWRLGAILPPPPNVTNPAEKARHDHRQHAIDAVVTALATPAWVKRLSDRAAGNLRQWGRASFRGLEGPWPDFVDAVRESVLSINVSHRAEHKVSGQLHEETNYGKPYERTEGGKASVCSNVRKPLSGITRAQIACIVDPAVRQAVERRLQELGDDLKKLQSSGTPRGPEASDALEPPFLVARDGRRIPIYKVRIRQVLSTEKLGQGSRERHVALGNNHHAEIVAELDESGEEGRWEAVVVSRFEAAARLEDMRRKRSGLPVVQRDHGSSRVFKFSLMNGDTVEMADGERRALFIVHKISRFATGQVEFAFCRATDARRVKQIQEGKGVDWPRPGPDGLRKLGCVKVSVDALGRVRPAND

SEQ ID NO: 5307 - protein, 1202 aa, synthetic construct
  REGION 1..1202: note = Synthetic
MKKVLGLDLGIASIGWALIAQNSENEEISHIIDCGVRVVPLSTDEHSEFAKGGSVPTNQIRRRARGMRRNLQRYRWRRHRLYCVLGQLGMMPDQRLMTRLSPLELYSLRSRALSEPLSLQEIGRILIHLNNWRGYRSNRREAVKDDEKSRYLKEIKNNEDQLKVEDKTIGQFFAERLHQGDRQRIRGRIFGRNTYIDEFNRIWDAQAQYHPSVLTEEHRRLIRDRIIYYQRPLKSAKGLVGTCALEWYYALYKETRQPKYENGRKKIVRPKCAPKSSPLNQECKVWESIHNLRIYRRDRNGRRESQPIALTLEQKKHLFWYLQESKKNLKAEEALRLLGFSAGAYAVDDHTLENNRTLSRLKEVFKKLGIRRDDLLRFDPAIEEVEWDDLETGERRRRLQVRGDFDREPLYQLWHLIYATEDEGDLIQLLEERYGFTTEQAREIAKIDFTSEGYARKSHRALRRLLPHYREGLDYTKACEAAGYRHADYITKAENEARILSERLELLPKNALRNPVVEKILNQMVHLVNDLMTTYGRPDEVRVELARELKQSAQERKKTHELNQKRRRENERIKKDIADHLAIPPEKVTRAQIEKYRFYKEIDGISLYTGKRFSLADVLNGDTVDVEHIIPRTLRFDDSYHNKTLCERNINQEKGNMTACDYMRSRGAQEYEAYLERVKAFYEKNGREVRLKYKNLTTTQEDLLKDNEFLQRQLRESQYIARKAVEVLREVCRNVYTTTGSITDFLRHRWGWDEVIPYLRLPQFKEAGLTEIIPVQNGQKTKEVIKGWSKRDDHRHHALDALVVACTRQSHIQRINELSPILAGTYGEERRQQLLDIVRDKYIAGKIPFSFRQVCEAMNQVLVSHKQRTRVATRNCPKGSQKVQITLTPRGRLHEETIYGRIRRYKKVSLDGKFSVAMLDDMVHPHQRELVEARLAQYANNPKAAFKDLDKNPIRYGPNGEKHLREVTVWEYIMVSRKALDPKATGKALKGIIDPVVHQVVKQHFEAGNVGGLPFRHVRVENRAKEWIRLPRGYAEPGSNHHIAIYRDADGKKHEHVVTFWEAFQRVHIGLPPIITDVAGALEYLSHLPGELPELHLPENPDWQFVVSLARNDMFVFGLDPADIDLRDLKNRSYVSKHLFRVRKISSGDYWFSYHLESKALDDRDSKSANRYKRCRSIASLAGAIKVTVNRLGHIVAVGQPI

SEQ ID NO: 5308 - protein, 1065 aa, synthetic construct
  REGION 1..1065: note = Synthetic
MEKRIFGFDIGIASLGWAVVDFDDTADPENNIYPTGKIVKSGVRCFPVAENPKDGKSLAFPRRQKRLQRKLCRRKARRMAGIKALFVANGLIDRASLFDEKENIYKARDKADVWDLRVKALTEKLTTVEFIRVLTHLAKHRGFKSYRIVQEKADKENGKVLAAVKANRALLENSKTLAQIIVEKGGPKRNRDDREGNSTYENSIPRDEIEREAKLIFEKQRELGLTAATEKLQRDFVGIAFRFREINGKKIEKMIGKCLFEKDEPRAPKNAPSAEFFVAWTKINNCHVRDNDGKLRFLTQEEKDAVFELLKNKKEVKYADIHKKLFPNRPDIRFADVEYNPKPVFDKKTGEIKEPSEPESLKFFALKGWHDLKSAIDVSAYPNEWLDKAVTVIATQKNDANISKELKNLGFSASDAENLAGLSFSKFISLSLKALYKILPEMQAGKKYNEACEAVGYDFKSTGESFAVQKGKFLPPIPESLATTVPVVNRAMAQFRKVYNALVREYGTPDQINVELARDVYNNHDERREIAAKQNEYAEEKKKVKASACSKLELADISGRDLLKFRLYEQQDGKCIYSGEKLDLRRLVEQDYCDVDHIIPYSRSLDNSQNNKVLCLSRENRQKSDKTPLEYITDPVKQAEFIARVKSMKGLGSKKRDRLLIRDFNEKDVDFRERNINDTRYMARYIMKYLDDCIDFSQSKTDVKDRVQARNGALTDFLRHQWGLKKDRSESDKHHAQDAIVIACATNGYTQYLAHLSKIFENKQAYANKYGEPWYKAFKQHVKQPWDGFYQDVQASLAEIFVSRPPRKNATGEIHQDTVHTLNPKKKNRWGELVYSAKDVKSGLNVRGGMAGNSNMFRCDVFEKGGRFFIVPVYLADFCEKNRSDCFCPKDKEHEKPDETYKFLFSVFKDDYLSIETNKGEKFYGYMNQYITSTGQFYIGSNDSSPMYSISTSSFEKQDILLYRIGEKFEKCSVVDFDSEKQEMKVASLEDGSIHKIKASAKVNKKGETQKIYKTDKPYEKLDKGKTISSATFKRIRKYQVDPLGRYVEVKSEIRLPLNIKKGKS

SEQ ID NO: 5309 - protein, 997 aa, synthetic construct
  REGION 1..997: note = Synthetic
MKKRIFGFDIGIASLGWAVVDFDDTADPENDIYPTGEIVKSGVRCFPVAENPKDGSSLAQPRRQKRLLRRLCRRKARRMAGIKNLFVANGLIGKDALFNEKSNIYKARDNADVWDLRVKALTDKLTTIEFIRVLTHLAKHRGFKSYRIAAEKADAESGKVLEAVKANRALLENGKTLAQIIVEKGGQKRNREKMIVKNGKTEKQASYENSIPRDEIERETRLIFEKQRAFGLEAANEKLQRDFEKIAFRFREIKSKNIEKMIGKCEFEKDEPRAPKNAPSAEFFVAWTKINNCRVREPDGKIRFLTQEEKENVFNLLKDQKEVKYSALKKALFAKRPDVQFTDIEYNPKPVYDKKTGEIIEKTENPENQKFFSLKGWHDLKSVIDVSSYPVETLDKIATVIATKKNDTDIAKGLKELNLPDAEIEKLTSLSFSKFIRLSLKALYKILPEMQKGMKYNEACDAVGYDFKSTGESFAAQKGKFLPPIPEALATTVPVVNRAMTQFRKVYNALAREYGTPDQINIELARDVYNTHDERKKIADKQKEYGEERKKARDLAQEKMEIENISGRDLLKFRLYEQQDGKCIYSGETLDLRRLTEQDYCDVDHIIPYSRSLDNSQNNKVLCLSRENRRKSDKTPLEYIIDPVKQAEFIARVKSMKGLSAPKRDRLLIRDFKEKELEFRDRNINDTRYMARYIMKYLDDCIDFSGSQTDIKDHVQSRIGSLTDFLRHQWGLHKDRNENDRHHAQDAIVIACATNGYTQYLAHLSKIFENKQAYANKYGQPWYKAFKQHVKQPWDGFYQDVQASLAEIFVSRPPRKNATGEVHQDTIRTLNPNKPQYSEKDVKSGIKLRGGLANNGDMLRVDVFSKKNAKGKEQFYLVPIYLADRIKPELPNKAIVANKSESEWIIMDATYSFKFSLYMDDLVSVIKGDKKIFGYYKGTSRSTASITIEGHDRNFIQPSIGVKTVDNIKKYQIDPLGRYVEVKSEIRLPLNIKKRKS

SEQ ID NO: 5310 - protein, 1010 aa, synthetic construct
  REGION 1..1010: note = Synthetic
MKKRVFGFDVGISSLGWAVVDIDDDKDPEKQEEITGEIIAAGVRTFPEAENPKDGKSLAMPRRQKRLARRVCRRKALRKKDLKKLFVEKGLVGETDFVRKNVPLADVWDLRVQGLSRRLSGEELARVLLHLAKHRGFKSYRKAQEKEEEGGKVLEALSKNKALLSENENKTLAQIFVERGGKKRNFCRTVTKNGTEKTEACFDNLFTREEIIREAGLIFDRQRTFGSEFASPEFEEAFGEIAFRHREVDVQGVEKMLGVCPFEKDEKRAPKEAPSAEFFVALGKINSMSVLEGGRKRPLTEGERAALFDLLKARKKVTYRDIRQKVFNSPSEDDFRFSDVEYNPRPKYDKKTKELIVNKKAPEEKEFYSLKGYHALKGLIGEAYDIPTQDKIVSVIAIQKNDKNIEGQLKELGIHPDDIETLKGVSFSKFIGLSLKAVYRLLPEMEAGKKYNEACKAVGYDFKSTGEPFSREKGPFLPPIPQKLLTRVPVVNRAVSQFRKVYNAMVRTYGTPDQINVEMGRDIYNNAQDRKKIQKAQEEFRELKDAARQKAEERLGYGNVSLKVLLKFRLYEEQDGKSVYSGRSIDLDRLAKEPDYCDVDHIIPYSRSLDDSLNNKVLCFSSENREKSNRTPLEYLPVESHADFIGRVMSMKGIKSAKRDRLLIENFSAKEAEFRERNINDTRYMAKYLIKYLDDCIDFSGSSAILKDRVQSRSGGLTDFLRYQWGLKKDRSENDLHHAQDAIVIACATNGYTKYLAHLSKIFENKQRYAEKYGEAWYKAFKRHLKAPWDGFYEDVQKALAKIFVSRSPRKNATGELHKETICTLKPSSGKFKEENVKSGFKIRGGIAGNGEMLRVDVFSKKNKRGKEEYYLVPVYLKDMAAKVLPNKAVVAGKPEEEWLEMDESYVFKFSLFPDDLCFVQKGEKIIFGYYKGANRATASITLEGHDRSFMKEGIGVKTQDRIKKFQVDPLGRYVEVKSEKRLPLKPKSAEQRRRDRWKNDFYKKHPDTK

SEQ ID NO: 5311 - protein, 987 aa, synthetic construct
  REGION 1..987: note = Synthetic
MEKRIFGFDIGIASLGWAVVDFDDAADPENNIYPTGKIVKSGVRCFPVAENPKDGSSLALPRRQKRLLRRLCRRKARRLLGIKRLFAASGLIDEKSLFDEKSNIYKARGNDDVWDLRVKALTEKLTTVEFIRVLTHLAKHRGFKSYRIAAEKADAESGKVLAAVKANRDLLENGKTLAQIFVEKGGQKRNRKDEKGNPTYANSIPRDEIERETRLIFERQRAFGLEAANEKLQRDFERIAFRFREIKSEDIEKMIGKCQFEPDQPRAPKNAPSAEFFVAWTKINNCRVKESDGKIRFLTQEEKETVFDLLKNQKEVKYSALKKALFAKRPDVQFADVEYNPKPVYDKKTGEEIKRNENPENQKFFSLKGWHDLKSVMDVSACSVEKLDKIATVIATRKNDADIVKGLKELDLPDAETEKLTSLSFSKFVRLSLKALYKILPEMQKGLKYNEACERVGYDFKSTGESFAAQKGKFLPPIPESLATTVPVVNRAMAQFRKVYNALTREYGTPDLINVELARDVYNDHDERKKIAEKQKEYGEEKEKARALAQAKTGIENIGGRDLLKFRLYEQQDGKCVYSGEALDLRRLTEQDYCDVDHIVPYSRSLDNSQNNKVLCLSRENRQKSDKTPLEYIVDPVKQVEFIARVKSMKGLGAKKRDRLQIRDFDEKELEFRDRNINDTRYMARYVMKYLDDCIDFSGGQTDIKDHVQARNGALTDFLRHQWGLRKDRNENDRHHAQDAIVIACATNGYTRYLAHLSKIFENKQFYAQKHGEAWYKAFKQCVKQPWDGFYQDVQASLAEIFVSRPPRKNATGEAHQDTIRTLNPNKPQYSEKDVKSGIRLRGGLANNGNMLRVDVFSKKNAKGKEQFYLVPIYLADGVKSELPNRAIVANKPESEWIVMDETYAFKFSLYKDDLVKIQADIMGYYVSTHRGTGAITITAPDRSQTWAGLGVRNLEYIKKYQVDPLGRYVEVKSEQRLPLNIKKGKR

SEQ ID NO: 5312 - protein, 986 aa, synthetic construct
  REGION 1..986: note = Synthetic
MEKRIFGFDIGIASLGWAVVDFDDAADPENNIYPTGKIVKSGVRCFPVAENPKDGSSLAQPRRQKRLLRRLCRRKARRMAGIKNLFVTNGLIGKDALFDEKNNIYKARDNADVWDLRVRALTERLTTVDFIRVLTHLAKHRGFKSYRIALEKEDAESGKVLEAVKANRALLENGKTLAQIIVEKGGQKRNRKDKKGNATYANSIPRDEIERETRLIFERQRAFGLAAANEKLQRDFERIAFRFRPIAGVDKMIGKCQFEPDEPRAPKNAPSAEFFVAWTKINNCRVKDEDGRSRFLTQEEKETVFNLLKDQKEIKYSALRKALFAKRPDIKFADVEYNPKPVYDKKTGEIKEPPTPENLKFFSLKGWNELKRVIDVSAYPVETLDKIATVIATQKNDADISGELKQLGLPDSDIERLQGLQFKEFIRLSLKALYKILPEMMRGKKYNEACDAVGYDFKSTGESFAAQKGKFLPPIPESLATTVPTVNRAISQFRKVYNALAREYGTPDQINVELARDVYNDHDERKKIEARQKEYAEEKEKAKALAQSKTGIENIGGRDLLKFRLYEQQDGKCVYSGEALDLRRLTEQDYCDVDHIIPYSRSLDNSQSNKVLCLSRENRQKSDKTPLEYISDPVKQAEFIARVKSMKGLNKAKKDRLLTRGFDEREVEFRDRNINDTRYMARYVMKYLDDCIDFSQSKAAIKDRVQSRNGALTDFLRHQWGLRKDRAENDRHHAQDAIVIACATNGYTQYLACLSKIFENKQAYANKYGEPWYKAFKQHVKQPWDGFYQDVQASLAEVFVSRPPRKNATGEAHQETIRTLNPDKPQYSEKDIKSGVKIRGGLANNGNMLRVDVFSKKNAKGKEQFYLVPIYLADGIKPELPNKAIAQGKPESEWIVMDETYAFKFSLYKDDLVKAKGKELYFGYFDGCDRATGNFHIEAQDSSQYWKGLGPRNLEYIKKYQVDPLGRYVEVKSETRLPLNAKKGKS

SEQ ID NO: 5313 - protein, 1033 aa, synthetic construct
  REGION 1..1033: note = Synthetic
MIRTLGIDIGISSIGWAVIEGKMENGNLESKKIIKSGVRIFRTAENPKDGKSLALPRREARSSRRRNARKKGRILQVKSYLSQILKIPLEEMLGGEKLSPMFQTSKDFVSPWELRSEALCRCLAPRELARVILHIAKRRGYDDITYGLDDKEGGKVIKAIQENQAMLVQKGYKTIGEMMYQSYYQKPREGVVGQMESVRNQDGDYKRCVGRSELREELEIILDTQKKLGNPYVNDDFKRMLLGDKSAIKKKEAEGLVFFQRPLKSFEDKIGKCQFFKNENRSCKDSPSAERFVALTKIINTLAYITNTCGILWEDKRAIISQILAKAMEKKSGVSYADLRKILNLPQTFAFKELDYSKDKAENAKFFELKSTHELLKANPNIPLQRQDKIAEILGEEKNWERIQAKLEKESFSAEEITRIKEANLKFSKHLNLSLKALYFLLPLMEEGKRYDEAVEILQKQGDLPIKKSEKSHLLPPLQELAKEDSYFDIANPVVNRALSEFRKIVNALIEQYGGFHFFNIELTRQVGRSFLERVKIKKEQESNKDLNLQALSLVKEYGLSENAKNILKLKLWILQGERCIYSGKKITKEHLRDEASLDIDHIFPLSRSLDDSQANKVLCLKSENAQKKNRTPYEYLGEDETKWQEFVARVFSTKFDRNKKGRLISKNFKDRNVGERAEFLARNLVDTGYISRVVSRYVEENLEFLPLEGRARRVRIVSGSLTTAMRAYWGISGKSREHHLHHAQDAIIISCINDGTIQKFSNYLKEKELSYKDLEYKVQQLNEAEYKTKLALRYPMGDFSKNILESISEIFVSHAPSHKVTGALHKETIYPREHFYQSFGGEEGVKKAIEFGKVREINGGLVENGEMVRVDVFKNKAKGGFYAVPIYTYDFAIGRLPNKAIVTGKNGNIIKDWLEMSDEYEFCFSLFKNDYVKIQAKGMQNPIIAIYTGTGVATASMNFYHHSGFEFASEDERKFFTDIDKKTQIPQFSRTNCGIQTLKVFQKVQVSPLGEIKECKPSKRQTIRLKTSPKNV

SEQ ID NO: 5314 - protein, 1026 aa, synthetic construct
  REGION 1..1026: note = Synthetic
MEQAMKIKTLGVDIGIASIGWAVVEGEYIDGNLKNEQIIDSGVRIFTKAENPKTKESLALPRRNARSARRRNARRRARVQQVKSYLCQTLGLDSKDFIQEGNLAPIFQTSKDFLSPWELRERALYRVLDREEFARVILHIAKRRGYDDITYGIEGKDDDGKIKKAIKENNALLIESKSQTIGEMMFKQYYSQSLNVRNKKENYNRCVGRSELRDELEKIFATQQKLGNPYITQDFIHKLLGNPNAESKQVKEGLIFYQRPLKGFQDKIGRCQHIKGESQAYRACKNAPSAEEFVAITKIINFLANLKNLYGDVSLSPKEGIQKIMLEAQKNKKGLTYSKLKALLDLPSDFEFAGLDYSGEKSPEGAVFLSLPSTFELSKIIAEREMQDKIADILGANKDWEIILKEFKKLDLSQDQIQAIKDAKLSFSKHINLSLEALYHILPLMREGKRYDEAVQILQEQGIFSKPQNKNLQLLPPLSELVKEDSYFDIPNPVLKRALSEFRKVINALLEKYGGFHYFNIELARDVSNGKKRRNELERINKENQKENDEATTLLRTLGIPNTSKNRLKCKLWRQQGEQCLYSGVNITADHLRDEKLLQIDHALPLSRSLDDSQSNKVLCLTSSNQNKLDQTPYEWLGGDEKKWNAYVGRVYASKFSSSKKRKLTLKNFKTKTTDDFLARNLVDTGYIGRVVKEYVKTSLSFLPLPDGKKEYIRIISGSMTSAMRSYWGIQDKNRDHHLHHAQDAIIIACIQPNMIQKYTKYLQDKETHKLKSSEKAQLLKEGDYKTKLTLRWSMSNFGEKMQESIQKIIVSHSVSYKVTGALHEETVRKKEFYYKSFGGEEGVKKALEFGKIRAVNHGIVDNGAMVRVDIFKSKDKGSFYAVPIYTYDFAIGKLPNRAIVQGKSNGVLKDWIEMDENYEFCFSLFKNDCIRIQTKEMQEPALVIYKSTDASNATIKIEHLSKYSCTQDEKILFKLKDNKLPMQGKQGIWGLKLFQKVKLSPLGEVIECKPRNRQPISLKSTPKNV

SEQ ID NO: 5315 - protein, 1024 aa, synthetic construct
  REGION 1..1024: note = Synthetic
VIRTLGIDIGIASIGWAVIEGEYTDKGLENKEIVASGVRVFTKAENPKNKESLALPRTLARSARRRNARKKGRIQQVKHYLSKALGLDLECFVQGEKLATLFQTSKDFLSPWELRERALYRVLDKEELARVILHIAKRRGYDDITYGVEDNDSGKIKKAIAENSKRIKEEQCKTIGEMMYKLYFQKSLNVRNKKESYNRCVGRSELRDELKTIFQIQQELKSPWVNEELIYKLLGNPDAQSKQEREGLIFYQRPLKGFGDKIGKCSHIKKGENSPYRACKHAPSAEEFVALTKSINFLKNLTNRHGLCFSQEDMCVYLGKILQEAQKNEKGLTYSKLKLLLDLPSDFEFLGLDYSGKNPEKAVFLSLPSTFKLNKITQDRKTQDKIANILGANKDWEAILKELESLQLSKEQIQTIKDAKLNFSKHINLSLEALYHLLPLMREGKRYDEGVEILQERGIFSKPQPKNRQLLPPLSELAKEESYFDIPNPVLRRALSEFRKVLNALLEKYGGFHYFHIELTRDVCKAKSARMQLEKINKKNKSENDAASQLLEVLGLPNTYNNRLKCKLWKQQEEYCLYSGEKITIDHLKDQRALQIDHAFPLSRSLDDSQSNKVLCLTSSNQEKSNKTPYEWLGSDEKKWDMYVGRVYSSNFSPSKKRKLTQKNFKERNEEDFLARNLVDTGYIGRVTKEYIKHSLSFLPLPDGKKEHIRIISGSMTSTMRSFWGVQEKNRDHHLHHAQDAIIIACIEPSMIQKYTTYLKDKETHRLKSHQKAQILREGDHKLSLRWPMSNFKDKIQESIQNIIPSHHVSHKVTGELHQETVRTKEFYYQAFGGEEGVKKALKFGKIREINQGIVDNGAMVRVDIFKSKDKGKFYAVPIYTYDFAIGKLPNKAIVQGKKNGIIKDWLEMDENYEFCFSLFKNDCIKIQTKEMQEAVLAIYKSTNSAKATIELEHLSKYALKNEDEEKMFTDTDKEKNKTMTRESCGIQGLKVFQKVKLSVLGEVLEHKPRNRQNIALKTTPKHV

SEQ ID NO: 5316 - protein, 1023 aa, synthetic construct
  REGION 1..1023: note = Synthetic
MGIKTLGVDIGIASIGWALIEQNEKDIDIIDSGVRIFTKAEHPKDKSSLALPRRIARGARRRNQRRKARILQVKKYLIKALNLPSNLFFAKEDSLPPIFETSKDFISPWQLRLEALKRKLKNEELARVILHITKRRGYDDITYGLEDSDSGKILKAINENRKELLEGKYETIGSMMCEKYFQKKRKDSSKFEFCNVRNRGEENYNRCIGRSDLKEELEIILERQKKFGNEMITQEFERELLGDRDAKSKQKLEGLIFYQRPLKSFEDKVGKCQFFATKERACKNSPSAERFVALTKILNTLLYISKETGIVWDKPAMIAQILEKAKSKKRGINYQELREMLELPQEFQFRDLVYESDKTESKTFIALENTLKLLAANPDICLKTQDEIAQILGKNKDWEKIARDLASLGLTKEQIQNIKTAKLSFSKHLNLSLEALGHLIPLMEKGIRYDEALKILEDQKIIIPRKALEQDFLPPLKEIAKQDSYFDITNPVVNRALSEFRKVFNAIVKKHGSFHYLNIELAREVGLSKKQRGDLEKSQKDNEAINLQAIQEMKKHNLTKNDILKFKLWILQNEQCIYSGKKITIQHLLDEKMLDIDHYFPLSRSLDDSQMNKVLCFRDENQNKLNKTPFEFFGSDEKRWNEFVARVFSTKYDKKKKMRIISKSFKERKSGEKIDFLTRNLVDTGYINRVVSLYVKNYFKFLPLDSKRDRIRVVSGSLTSAMRSYWGLVSKNRDHHLHHAQDAIIIACINDSVIQKYSKFLQDRELAYKETDYKIQKLNKDGDYMTKLKLRYPIPDFKIKIEESIKKIIVSHNVSQKISGALHKETIRKRSEYYKRFGGEIGLQKAIKYGKVREVNGGIVDNGEMVRVDIFRSKDRGLFYVVPVYTFDFAKKILPNRAIVSGKNKDGVIKDWIEMNENYDFCFSLFKNDCVLIQAKGMQEPILAIYKSTDTRNASLSFEHLSKYELKNESEEIFFKKENKKLFSKTECGIQKLQVFKKVKISPLGEIKELGEMKRVGIINKNV

SEQ ID NO: 5317 - protein, 970 aa, synthetic construct
  REGION 1..970: note = Synthetic
MMLNVLLNNVIEGIVMKIRTLGVDLGIASIGWALIQEEGERLDIIDSGVRIFTKAEHPKDKSSLALPRRIARSARRSIRRKRARILQVKKFLASTLDIKLEGMLSDTQMLAALFDTRKDFLSPWQLRVEGLDRRLSDAELARVILHIAKRRGYDDLTYGIEDNEKGKVLKAVKQNQALLLKYRSVGEMMVQEFFQKPREGYIGQWENVRNHPEQGDYKRCVGRSELRAELKLILQTQAKLGNTKVTDSFVSMLLGDEQAQSKSQKEGLIFYQRPLKGFADKIGHCVHLPSQKRACKGAPSAEEFIAVSKIINTLLYISNQTGVQWELPVLIDQILSKAYELKSGVSYAKLREILQLPEAFEFRELTYSKEKVEQNTKFIELQATHKLLKANPTLPRHIQDEIAAILGANKDWETIQKLLANLNLTQEQISRICDAKLQFATHINLSLEALAKLLPLMKEGKRYDEAVGILQQRGEFVVPNICKKDSLPPLCELAKEDSYFDIPNPVVNRALSEFRKVVNALIAKYGKFHYFNLELTREVGQSKKERSEVERRQRENEALSVQALDQLKTLGMAENSKNLLKCKLWIQQNEYCLYSGKKIPSGALKDPNLVEVDHCFPLSRSLDDSQDNKILCFKTENQNKRNQTPYEYFQEGRWESYVKFVYQSKFSTKKKKKLVNKLFKDRECGDRASFLTRNLVDTGYIARVVSLYVKNYLDFEPIANKKEHLRIVSGSLTSALRSYWGLVDKNREHHLHHAQDAIIIACINPSTINKYSQFLKEKELGYKDSAHKAQKLSEAEYKTKLALRYPTKDFKNKVEESIQKIIVSHSVSHKVSGALHQETIRKREAYYATYGGEEGVKKAIAFGKIREINGGLVDNGEMVRVDIFRHKLQGGFYAVPIYTFDFAKGVLPNKAIVAGKKDGVIKDWLEMDENYEFCFSLSKNDCVKIQTKEMEEPIVAVYKKNRFCYRNNGF

SEQ ID NO: 5318 - protein, 899 aa, synthetic construct
  REGION 1..899: note = Synthetic
MVARTLGIDIGISSIGWALVEIENDSIQSNGGKIIASGSRIFPKAEHPKKSSLALPRREARSKRRLVKRRAQRMLQIKRYLSDRLGLGDMIDQDNKDKYQLFKKGDKSVWELRALALDKKLEPRELARVILHIAKRRGYDDITYGMDEKQDDKKILSCIKENQRQLQESGYKTIGQMFYHKFYRRLRPNGQMDNIRNRKRNKIVSYKYSIARSELRSELEMIFEVQKSLGNKFVDDEFCKTLLGDKQALKKEKREGLIFYQRPLKGFGDKVGKCEFFDNEKRAFKDTPSAQKFIALTKTINLLRYITNTHGIEFDMPQTIKQIFTEAMKLKSGLSYKKLKALLELPDSYQFKGLDYSKDKPENSTFIEFGSSIKLASLGIDEARQDALVSLLAENKNWDDIVLELKKIGLESKAQEIRAQNFKFSKTINLSLKALSFIIPLMQKGMRYDEAIKELYNQGVFKLKRVLQRGDLPSLSEIAKEDSYFEITNPVVMRALSEFRKVVNAILQKYGKFHYINIELTREVGLSKEERNKIERKQNDNAKLNSQATEFLKDNNMEITSKNILKAKLFKMQNETCIYSGKKITLNDLRDDNSVEIDHILPLSRSLDDSQNNKILCLKSSNQDKRNRTPYEWFGDDEKRWDAFETLIKTMMLGKERIKKLLNKNFKDRNQGARAEFLARNLADTGYIARVVSKYVRNYLEFLSIGDKKEHIRIISGSFSSFLRHYWGIGKKDRANHIHHAQDAIILACVNPSSIQRFSEYLKDKELRYKKNQQKIEDLDEQTKYALRWPMNDFRQKVEESIANIMVSHRVSHKVTGALHAETITSFKDKKCQATYGGIEGIKRAISLGKLRVVNEGLVMNGPMVCIDVFKSKDKGQFYFVPVYTYDIAIKKISNKACV

SEQ ID NO: 5319 - protein, 895 aa, synthetic construct
  REGION 1..895: note = Synthetic
ITYELEDKEGGKLKGAIQNNQKILQEKNFKTIGEMMYESYYQKPRFGITGQMDNVRNKNQKDKDGKKSIVDYKRCIGRSELRAELEMLLNTQKELGSAYITDNFKKIILGNQNANNKIGQEGIVFFQRPLKSFEDKIGKCQFFKDSNRACKFSPSAEEFVAVTKIINTLLNISNKTGIIWENKQEIIEQILQEASNKKLTYKHLRKILELPQSFAFKDLDYSKADKSENVAFLEFKATYQLKKANSHLSQIKQDKIAEILGEEKDWARIESKLKKESFTTQEIDNIKQANLKFSKHINLSLKALYQILPIMKEGKRYDEAVAILQEKNIFPKTTSQKTNLLPPLKDIAKEDSYFDISNPVVNRALSEFRKVINAIIEKYGAVHFCNIELTREVGKKYAERDKEAKQQKENQIINQEALNVLRSYGLSENAKNILKCKLWILQGEQCLYSGDKITQEHLRDEASLDIDHFFPLSRSLDNSQGNKILCFKRENAQKGNKTPYEYLADNTDKWEKYITRVFATRFDKYKKQRLISKNFKDRNIGDRAEFLARNLVDTGYIVRVVSCYIDKYLEFLPLEGRKRRVRIVSGSLTSALRAYWGISTKDREHHIHHAQDAIIIACINDSTIQKYSQYLKEKELGYKDSRHKANSLNQADCVTKLALRYPIEDFKNKIADSIAKIFVSHASSHKITGALHQETIRKRESYYKSFGGEEGVKKAIAFGKVREVNGGLVDNGEMVRVDVFRGKKGFYAVPIYTFDFALGKLPNKAIVQKGKGEVLKDWIEMDENYEFCFSLFKNDYVKIQTKEMQNPVIAVYTTTGTATASMSFIHHSRFAFASEDEKSFFKDVDKKEDKMLFSRTNCGIQGLVVFEKVQVSPLGEIKVCKPSKRQEIALKRHKK

SEQ ID NO: 5320 - protein, 729 aa, synthetic construct
  REGION 1..729: note = Synthetic
VIRTLGIDIGIASIGWAVIEGEYTDKGLENKEIVASGVRVFTKAENPKNKESLALPRALARSARRRNARKKGRIQQVKHYLSKALGLDLECFVQGEKLATLFQTSKDFLSPWELRERALYRVLDKEELARVILHIAKRRGYDDITYGVEDNDSGKIKKAIAENSKRIKEEQCKTIGEMMYKLYFQKSLNVRNKKESYNRCVGRSELRDELKTIFQIQQELKNPFINEELIYKLLGNPAAQSKQEREGLVFYQRPLKGFGEKIGKCSHIKKGENSPYRACKHAPSAEEFVALTKSINFLKNLTNRHGLCFSQEDMCVYLGKILQEAQKNEKGLTYSKLKLLLDLPSDFEFLGLDYSGKNPEKAVFLSLPSTFKLNKITQDRKTQDKIANILGANKDWEAILKELESLQLSKEQIQTIKDAKLNFSKHINLSLEALYHLLPLMREGKRYDEGVEILQERGIFSKPQPKNRQLLPPLSELAKEESYFDIPNPVLRRALSEFRKVVNALLEKYGGFHYFHIELTRDVCKAKSARMQLEKINKKNKSENDAASQLLEVLGLPNTYNNRLKCKLWKQQEEYCLYSGEKITIDHLKDQRALQIDHAFPLSRSLDDSQSNKVLCLTSSNQEKSNKTPYEWLGSDEKKWDMYVGRVYSSNFSPSKKRKLTQKNFKERNEEDFLARNLVDTGYIGRVTKEYIKHSLSFLPLPDGKKEHIRIISGSSQDLQRSQKRKYLS

SEQ ID NO: 5321 - protein, 1124 aa, synthetic construct
  REGION 1..1124: note = Synthetic
ISTSYQTKSDAPPVSYSFLIVHLASHSLTNRHKSSPFFSGTQQRQNKILRGQPKNSISSILFYVRLGELTLQHAYRLGIDLGTNSIGWAAVKLNDRLEPGPMLDMGVRIFSDARNPKDKSSNAAQRREPRSLRRNRDRRLQRKQRFMNALVAQGLMPVEREGRKRLEAVDPWILRAKALHQQLTPFEIGRALFHLQQRRGFKSNRKTDAGDSEAGKVYSGIAASKERLRASGKDSLGDYFGSLRLAQEEANSKLDQGQRLPMPQSRVRTTGQGSNAAYDYYPQREMILDEFDLIWESQKHYHPDLLSPSAHEKLRGILAWQRPLKAQPKGKCTLLPGCPRAAKAMASSQFVRIAQEVNNLTVGVVGESKRPLSPEERSIVAEALLKPTAKSARKSFDQIRKLLKLPASVKFNLESEKRTFLEGDVTAARMMQTTAWGQDWFELSIEKQDLIVENLLETEDETQLVGWLESEFNLSGETALNVSRVRLPDGYGKLSTKANTRLAPELSKGLLYDQAVNAAGMGDHSQRGDGVVHEDHLPYYGEVLNRHTALEKANPKNDEERFGRVANPTVHVALNELRKVVNDLIRRYGPPTQVVLEMARELPMSDRGLNDLERDQRLNQHANEQRREQLASLSVSDTHENRLKLRLFEELDPLRKACVFTGQPISLSTLFSDEIEIEHLLPFSRTLDDSFANKVLSLRQANREKGNRTPFEAFNSSAGYDWEAITQRAEVLPSNKRWRFNPDAMEKFEADSDFLPRMLNDTRYITSLGKSYIEGLFGGQGSPGQTNSVWVVNGRLTADLRHFSGFNGILSDSNRKDRSDHRHHAIDALVVALTDRSMIKRVADLAKLDDKPRYSEVMNELAEPLKRYFKPVSDWRDKMTVSHKPDHGFQAGMHNDTAFGLTGETDSKGQPILVTRKPLSSFANPKDLLSIRDPDLRDELYAASEGLSGADFVNAVVTTGLQMHPQVKSARVITPMKSTSFVTISNGKDGVKAYKGDSNYCYDIWVDQKGKWTGNVVTTFEAYQRAQTDPDWWRRPTLENGTKLIMRLRKGDMLELDGPSGRRKVIVFKFTTGKIDMAEHYQANASARVRANHLEAIRMAPSALQRASAVVLHVSPSGRVKKAY

SEQ ID NO: 5322 - protein, 1063 aa, synthetic construct
  REGION 1..1063: note = Synthetic
MKYRIGIDLGTNSLGWAAIELSGDAPDALTPGPLLGMGVRIFSDARNPKDKSSNAAQRRGPRSARRNRDRKEARGRAMLHALTAAGLMPPEGAERKALEELDPWILRAKALHQSLTPFEIGRALFHLQQRRGFKSNRKTDGDDEGAMFAAIEAAREKMRATGANTLGEMFGAPRLAQLEANRKTPAGSRAPMPQARVKAHREGSKMAYDYYPSRAMILDEFEQIWNHQAPHHPTFMTADAHDTIRHVIVYQRKLKPQQAGKCTFLPDQPRAPKALPSTQYARILQEVNNLSVGATGEVSRTLTRDERAQLVDFLVHPSSKAAKRTFKAIRKRLNLPNSQKFNIESAKRDHLVGDTTGAILMQTDVWGDGWFDLNRTTQDEIVLKLIETEQEADLVDWLTRKHGLSEDQAKAVSRARLADSHGKLSAQALSRVIPRLEAGERYDEAAQAEFGDHRAMGDGVIHEDGLPYYGEILSRHTAFERDNPRNDEERYGRVANPTVHVALNELKKVINDLIRRWGPPEQVVLELARDLPLSDRRRRELEALLKKNQDLNDKRNAYLTANGYSPNYENRLKLRLYEEAMDAFGGTVVCAFSGTPINKTDLFSDDVEIEHILPLSRTLDDSFANKVLATREANRIKRNQTPFKAFGDSPAGYDWEQISLRASDLPASKAWRFDPDAMEHWEARGGDFLARQLNDTRYIARLSKTFVEALYGGQGVKGQSRKVWVVPGQLTADLRHFAGFNTLTGLTGGNRKDRTDHRHHAVDALVVALTDQAMVKRASDLAKQEDAAAHHEIMQAMAEPLKRYRASAEDRLSKLVVSHKPDHGFQDAMHNDTAYGITGQSDAKGQMILVTRKLLSDLEPKDLDSIVDPQLRDHFNTETQGLSGKDFTQALCETGEGMRPPVRRVRVATPMKESSFVTIKHGKNRQHSKAYKGDGNYCYDIFQDQKGCWTGEVVTTFQAYQLAQADPDWWLKPTRQDGQSLLMRLRKGDMLEIDSPAGDRRCVTIYKFSAGKINMADHHEANASARVRAKELAGYQMSPSSLQRANAVRITVSPSGKIKRHKA

SEQ ID NO: 5323 - protein, 929 aa, synthetic construct
  REGION 1..929: note = Synthetic
MKEHDARTLGELFGRPRHEQKQANEDAPHRGGKPMPQARVKARVEKSKMVYDYYPDRAMILDEFEQIWEAQTPYHPDILTGEAHDSIRHVIEYQRPLKPQKAGRCTFLPEQERAPKALPSAQYARILQEVNNLKVGATGEVSRPLDREQCQTVIDFLIRPSSKTAKRTFKLIRKKLKLPESQRFSHESPKRDHLKGDLTAAGLMQKEAWGPDWFDLGRATQDDIVMKLLDTEQEQDIVDWLVGEYGMDEPRAQHISRLNLPDAHGKLSRAALDRIIPRLEAGERYDEAARQEFRDHRAMGDGEIHEKLPYYGEILNRHTAFEKDDPQNDEEQYGRVANPTVHVALNELRKVINDLIRRWGPPEQVVLELARDLPLSDRGMRELEREQVKNQEANDKRNTWLEEQKLPTNYEHRLKLRLYEEAEEAFGGIAQCVFTGKTISKTALFSADIEIEHILPVSRTLDDSFANKVLCIRDANRVKKNQTPYEAFGHSPPGYDWENIGLRAAELPGSKGWRFAPDAMEQWESRGDFLDRQLTDTRSIATLGKKFVEGLYGGQGSAGQTRQVWVIPGQLTSDIRHFAGFNTLTGLTGSNSKDRTDHRHHAVDALVIALTDQAMVKRAAGLAKREDAAAHHDIMRKMADPLKRYRRSAEDRLSKLTVSHKPDHGFQDAMHNDTAYGLTGETDEKGNALLVTRKPLDSLSKPADLDKIRDEHLRRFLMLKLISPALGSADLDKIPDERLRKEFARATMGLTGKDFTQALTQAGRHMSPPVYSVRVLDPMKPASFVRVEHGDGHSKAYMGSSNYCYDIFMGEKGKWSGEVITTFQAYQMARDNPDWWHNLGGRDGHPLIMRIRKGDMLELETDPGKPIRVVVYKFSTGKIFMHEHFEANASARIAEKELLGYQMAPSSLQRAKAVRLTVSPSGKVTRHRL

SEQ ID NO: 5324 - protein, 1618 aa, synthetic construct
  REGION 1..1618: note = Synthetic
MAKILGLDLGTNSIGWAVVDDMDKKIIDSGVRIFPEGVVAKTIGTGDKEESKNASRRNSRQQRRGFYRKRLRKIKLLRTLINLDMCPLKNEELDIWSKWDKQKKKEGRMAPEIHLPESHSYCLWLKQNPYLLRDKSLNEDLTLQEFGRILYHLIQRRGFLSNRKGKDDGKIYKGKDGVKGIEETQKELQNSTLGKYLFNILPKDGEPFKLIQDENGNELRVRSRYTLRDMYVAEFEAIWNRQACNLGLETIKCSNEKKVLLKGGLKSKRNNSKIEHLKKIKGEENIEVIELNDKLSKNDKQKYLLKIKTKLSLKEFLAGRIDKDEEGVVKFKSNESVLFWQRALRSQKGLLAKCRFEPDLKDENGKFIQKGKTPCHISHPLYEEYRALQYINNIEYGKKQRLEESQRLQVLELINSKDKKFDFIEIKKKLKLEYETFNYEDDSLVVGNYTTKYLNALFPKSILEKEFLIIVNKEEKLEYGYERIWHLFHFCEDNDKLICSLEKLIKETKIDYILNKAIIEKIEKVNLKEDYSSVSLKAIKNILPYLKKGLRLSDAVILAGVRNAFGKKWELYKNDHIELEKDLLKINHEKSNKEGEAIEKIKVYLIENKYGFVEEDVRFKKLYHHSQEIIQVKQKDKIDTVQNLRNPIVQQGVNETKRIVNELIAQKGKFDQIRIELGRDLKNSKTKREELGYKIRENDKKNEKAKELLIEFGLRQSRENIQKVLLYQEMPISICPYTNKTININDLLGRGNKFQIEHIIPKSISLDDSFANKTLCDSKFNGLKGNRTPHDFYEINKDPNLWGGAKSWEEIERRVFKVLPYPKAKRFVSKTKFETNDFIQRQLNDTRYISKKTSEILSQVCSDVRVMPGSLTAELRRLWGLNNILQPIITVDIPNLHIEENKHIPHYVVLDNDKKPVLSQRIYYDRPTTNKNETLLSGNIDKGVFKSKEQYVKFQVDAPDLENGDYWAKLVLSRPKNIVQVFKDKPSTLENEIVLRGKIERDKFKNDGLNAINATGKENGIYWATFTIEKKEFKKPAKEEQPKKNGKQILLFGEVKDGLFSSYIYECETEIEDGKYWLIIDVDFEKVDFEKALNERPLVRENQILIQGTTNDENIFVSDMDNQHHFEMEEGKGKYYVLFDIVSEVTEFSPVKTAKPVLEEGQTIVEGTTWIDKYTGEIKFDPIKNREDHRHHAIDALVIALTKESFFQRLSKQNASTENKKRGNEHEKEHLDFPEPWNGFHNDAKNVINGILISHKQNKNILTKITKKITKNGQTFKSEGMAVRGQLHETTFYGKNLHCKEKEIIQRLPISKLKFAPAKGGGASIYDIIDDNIRKLIISSVTNSFKQILQKYNDVSTTFEEIKELKKKYNKGKIDEAIEKLGVIEKMETDSNRLQKKSEIDKNQKEINRIKSTISETIESFLKDETFYLPNEGKRFKRLNKIDVGKERNPVPIKKVRIKKVMKNAETINQKIGQYVNPGNNHHILIYKDENEELKDDITNFWKVVERVKQKDEIYKLPEIEIDKPAPKELILTFQENDMFLLGISNDEYNDNKLDHTFLSNYLYRVQKISDGDYSFRHHIASTVTNKMEEIRITSMKKYHEMNPIKVEISVLGKISKM

SEQ ID NO: 5325 - protein, 1588 aa, synthetic construct
  REGION 1..1588: note = Synthetic
MLQIYKTFLNVYSEKTFFLKYFFQYIYKKFENTKMAKILGLDLGTNSIGWAVVDDTKNKIIDAGVRIFPEGVKSDTIGKGDKEESKNAKRRTSRQTRRGFYRKRLRKIKLLRTLINFNMCPLKHEELDVWSKWDKIKKKEGRMAPELFLPDNHPYCLWLKQNPYELRNKALIEDVTLYEYGRVLYHLIQRRGFLSNRKGKDDGKIYKGKEGIKGIEDTQKEIQNSTLGKYLFDILPKEGEPFKIIQDEKGNELRVRSRYTLRDMYIAEFEAIWNRQAPQLGLDKIDYLNEKKILLKGGLKNKRNNNKIEYFKKSKGIDNVEIIEIKDELSNTDKEKFILKVISKIPLKEFLGGRIEKDEDENIKFKSNDSVLFWQRPLRSQKNLLSKCRFEPDLKDDNGKFIQKGKTPCHLSHLLFEEFRAYGYINNIEYGKKQKLEETQREQVLELINSKDSNFKFSEVKKKLKLEYETFNFDDDAPVNGNYTTKHLNSLFPKEILEKEYVIKVNNIDIVEYGYERIWHLFHYCDDNDVLIEKLQKEYGLEEKNIEKVSKTNLKEGYSNVSLKAIKNILPYLKEGRRLSDAVILGGVRNAFGKKWELYKEDHKELEKDLLKINQDKSNKEGEAIEKIKHYLIENKYGFVENDIRFKKLYHHSQEVIEVKQKDKIEDIDNLRNPIVQQGVNEVKRLVNLLIEEHGKFDQIRVELGRDLKNNKMKRQELTYKISQNTAKNENAKQLLTEYALRHSRENIQKVLLYQELQERGTIAVCPYTNKTINISDVLGRANKIQIEHIIPKSISLDDSFANKTLCDAKFNGLKGERTPYEFYQINKDVNLWGGAKTWEEIERRVFTVLPYPKAKRFTSKTKFDKNDFIERQLNDTRYISKKTAEILSQICGDVRVMPGSLTAELRRLWGLNNILQPAFTIDIPNLHIDENKHIPHYVVLDKDKNPIASQKIYNEKPKLKPNETTLFGKVDKGIFKSKEQYIKFQVDTPELINGEYWAKLLLSNPKSIVRVFKEKPENTEDEIVVRGKIEKEKFKHEGLNTINAQGKDNGVYWAKLTISNKEFKKPIKEDQPKKNGKQILLFGEVKEGVFSSYVYQCDAEKVEDGKYWLVLDIDFEKVDFEKALNDKSTVKENQIVIQGITNDDNVFVSDMDNQHQFTMNEGKGKYYVLFDIISEVDDFYPVKTEIPKIEEGQALVEGTVWVDKYSGEIKFDPKKNREDHRHHAIDALVIALTKETYFQQLSKHNASSENKKRGIEYDNDQLDFAEPWNGFHTDAQKTINSILISHKQNRNILTKITKKITKNGKTYKSEGMAVRGQLHKEFVFGFRTPPNGDEGYHIRKSVESLVTDKQINKIVDTSIREIIIKARRAEIPLYKEIENLSKQLKNPRLSEIEEKNINDKISQLRNDIKQLYTLPNKKGDPIPIKKVRVAEEMGKAQKLKSSINQFVNPRNNHHIVIYKDEEGQLKDTVTNFWKVVERVKQKEEIYRIPSPVVGQSVPKELILTFQENDMFILGLSEDEYNDNINNSSFLSNYLYRVQKISDGDYSFRHHLASTVTNKKEEIRIASMKKFQEMNPIKIVVNILGKNK

SEQ ID NO: 5326 - protein, 1564 aa, synthetic construct
  REGION 1..1564: note = Synthetic
MAKILGLDLGTNSIGWAIVDDKNSKILDTGVRIFPEGVVAKTIGSGDKEESKNAKRRESRQTRRGFYRKRLRKIKLLRTLINFKMCPLEHFELDVWSKWDKIKKKEGRMAPELFLPENSAYNLWLKQNPYILRDKALSKDLTLTEFGRVLYHLIQRRGFLSNRKGKDDGKIYGGKEGIVGIDKTNEQIKNSTLGKFLFKILPKEGEPFKIIEDELGNELRVRSRYTLRDMYIAEFEAIWNRQAKHLGLDNIYYSNVKNVLLKGSLKNKKNERKINHLKKIKGNGNIEIITLNNNLSKNEKPKYLLKIATKLPLKEFLAGRIEKDEDGKIKFKSNESVLFWQRPLRSQKKLLAKCRFEPDLKDDNGKFIQKGKTPCHLSHPLYEEYRAYQYVNNIEYGKKQRLEESQRKQVIDLINSKDGNFKFSEIKKKLKLSYETFNYSDDSSVNGNYMIKNLNSIFPKEILEKEFVVNVNKEDIIEYGYERIWHLFHFCEDNDVLIKKLQDNFDLSENDIEKISKINLKEGYSNVSLKAIKNILPYLKEGKLLSDAVILGGVRNVFGKKWHEFIDFHEKIEKDILYINHQKSNKEGEAIEKIKKYLIDYKFGFTENDNRFKKLYHHSQDVVEVKLQKKIGPVEDLRNPIVQQGVNEVRRLVNELLDVHGKFDQVRVELGRDLKNNKSKREEIGYKIRENTAKNEKAKELLIEYGLRQSRDNVQKVLLFQEMLDRGTVAVCPYTNKTINISDVLGNENKMQIEHIIPKSISLDDSFANKTLCDSKFNGLKGERTPYEFYQINNDANLWGGSKSWEEIERRTFRILPYSKAKRFTSKTKFETNDFIQRQLNDTRYISKKTKEILSQICEDVRVMPGSLTAELRKLWGLNNILHPAFVLDLPALHIDANKHIPHYVVLDEDNVPILSQRIYNDKPILKANQTSITGFVDNEIFKSKEKYVKFEVKAPNLSNGEYWAKLLLSNPKSIVRVFKEKPKSTENEIVVRGKIEKEKFKHEGLSGINAEGKENGTYWAKLSIVDKKFKKPKKDDQPKKNGKQILLFGAVKEGVFSSYMYECDADLEDGKYWLILDIDFENVEFEKALNERPEVLENQILIQGITNDENVFVSDMDCQHQFLMNEGKGKYYVLFDIISEVNEFYPIKTKSPELENGQSLTEGTIWVDKYTGEIKFDPKKNREDHRHHAIDALVIALTKETYFQQLSRRNASSENKKRGNEYEKEQLDFAEPWKEFHVDAQKSINSILISHKQNKNILTKITKKITKNGKTYKSEGMSVRGQLHDKTYYGHNKNCKADEYVYRVDINNLSFSQLTNIIDLNLKAVIVEGVIKKFEESEKLLFKKMNSKVQNLDKSKVKKIKAKVDKILKETSFFMPNEGKRYIRLNIIEPANFERMPVPIKKVRIRKVLRNAEKLNNEIKQFVDPQNNHHVLIYKDENGNLKEEVVTFWTVVERKRTGEPVYKLPSDGKKIVTTLQINDMFLLGLNEDEINWENPNYNHLKEHLYRVQKFTSGDFYFRIAKTSSIQNGEEKQQINSFGLGKNGWLTHNPIKVKISVSGKILKV

SEQ ID NO: 5327 - protein, 1558 aa, synthetic construct
  REGION 1..1558: note = Synthetic
MAKILGLDLGTNSIGWAIVDDVDKKIIDSGVRIFPEGVVAKTIGTGDKEESKNASRRNSRQQRRGFYRKRLRKIKLLRTLINLNMCPLKNEELDIWSKWDKQKKKEVRMAPEIHLPENHSYCLWLKQNPYLLRDKALNEDLTLQEFGRVLYHLIQRRGFLSNRKGKDDGKIYKGKDGVKGIEDTQKELQNSTLGKYLFDILPKDGEPFKVIQDENGNELRVRSRYTLRDMYVAEFETIWNRQAANLGLETIEYLNEKKVLLKGGLKNKRNNSKIEHLKKIKGENNVEVVELNDELSKNDKQKYLLKIKTKLPLKEFLAGRIDKDEEGVLKFKSNDSVLFWQRSLRSQKGLLAKCRFEPDLKDENGKFIQKGKTPCHISHPLYEEYRALQYINNIEYGKKQRLEESQRLQVLELINSRDKKFDFIEIKKKLKLEYETFNYEDDAPVIGNYTTKHLNALFPKSILEKEFSITVNEEEKTEYGYERIWHLFHFCEDNDKLIRGIEKLIKESKIDYVLNEAIIEKIEKVNIKEDYSSVSLKAIKNILPYLKMGLRLSDAVILAGVRNAFGKKWELYKNDHIELEKDLLKINHQKSNKEGEAIEKIKVYLIENKYGFIEDDVRFKKLYHHSQEVVQVKLKDKIDTVQNLRNPIVQQGVNETKRLVNELIAQQGKFDQIRVELGRDLKNSKTKREELGYKIRENDKKNEKAKELLIEFGLRQSRENIQRVLLYQEMPISICPYTNKTINISDLLGGKNKFQIEHIIPKSISLDDSFANKTLCDSEFNGLKGNRTPHDFYEINKDPNLWGGAKSWEEIERRVFKVLPYPKAKRFVSKTKFETNDFIQRQLNDTRYISKKTSEILSQVCSDVRVMPGSLTAELRRLWGLNNILQPIMTVDIPNLHIEENKHIQHYVVLDNDKKPVLSQRIYYDRPTTNENETLLSGSIEKGVFKSKEQYVKFQVDAPDLANGDYWAKLVLSNPKNILQVFRDKPSTLENEIVLRGKIEKDKFKNDGLNAINTTGKENGTYWATFSITNKDFKKPVKEEQPKKNGKQILLFGEVKEGLFSSYIYECEAELEDGKYWLIIDVDFEKVSFEKALNERPLVKENQILIQGTTNDENTFVSDMDNQHHFEMEEGKGKYYVLFDIVSEVTEFSPVKTTKPVLEEGQTIVEGTTWVDKYTGEIKFDPIKNREDHRHHAIDALVIALTKESFFQRLSKQNASTENKKRGNEHEKEHLDFPEPWNGFHTDAKNVINSILISHKQNKNILTKITKKITKNGQTFKSVGMAVRGQLHKENLYGNRTPPNGDSGFHIRKSIDSLKTDKQIEKIVDIKVKEIIIKARKAEIPLYKEIEQLSKQLKSPKNTEIEEKELKENIEALHTKIKLLYTLPNKNGEPVPIKKVRVSEEMSNAQQLKSKVKQYVNPRNNHHIVIYKDENEELKDDITNFWKVVERVKQKDEIYKLPEIEIGKPAPKELVLTFQENDMFLLGLSNDEFNDNKQDFTFLSNYLYRVQKISDGDYSFRHHLASTVTNKMEEVRIASMKKYQEMNPIKVRISFTGKIEKL

SEQ ID NO: 5328 - protein, 1551 aa, synthetic construct
  REGION 1..1551: note = Synthetic
MGKILGLDLGTNSIGWALIDDIENKIIDSGVRIFPEGVVAKTIGQGEKEESKNASRRNSRQQRRGFYRKRLRKIKLLRTLINLKMCPLSHSELDIWSKWDKKKKKDGRMAPEIHLPENHPYCIWLKQNPYLLRDRALNEDISLQEFGRVLYHLIQRRGFLSNRKGKEDGKIYKGKDGVKGIEDTQKELQNSTLGKYLFDILPKDSEPFKVIQDENGNELRVRSRYTLRDMYIAEFEAIWNRQAYNLGLDIIEYTNEKKILLKGGLKNKRNNSKIEHLKKIKGENNVEVIELIDELSINDNQKYLLKIKTKLPLKDFLAGKIEKNEEGELKFKSNESVLFWQRPLRSQKGLLAKCRFEPDLKDENGKFIQKGKTPCPLSHPLYEEYRTLQYINNIEYGKKQRLEESQRLQVLELINSKEKKFDFIEIKRKLKLEYETFNYADDSPVIGNYTTKQLNVLFPKSILEKEYSITVNDQETIEYGYERIWHLFHYCDDNDILLEKLQTIYGLTDTDKEKISKINLKEDYSSVSLKAIKNILPYLKKGLRLSDAVILGGVRNAFGKKWELYKNDHFELEKDLLKINHEKSNKEGEAIEKIKDYLIENKYGFAENDIRFKKLYHHSQEVIKVEQKDKIDTVENLRNPIVQQGVNETKRLVNELITLHGKFDQIKVELGRDLKNSKTKREELGYKIRENDKKNEKAKELLIEFGLRQSRDNIQKVLLYQEMPISVCPYTNKTINISDVLGRENKFQIEHIIPKSISLDDSFANKTLCDSKFNGLKGNRTPYDFYEINKDPILWGGAKSWEEIEIRAFKVLPYPKAKRFVSKTKFETNDFIQRQLNDTRYISKKTSEILSQVCSDVRVMPGSLTAELRRLWGLNNILQPIMTVDIPNLHIEENKHIPHYVVLDNEKKPILSQRIYFDKPITKENETLLSGSIEKGVFKSKEQYVKFQVNAPELANGDYWAKLVLSNPKNIVQVFKDKPNALENEIVLRGKIEKEKFKNDGLNAINAIGKDNGTYWATFSIINRDFKKPVKEEQPKKNGKQILLFGEVKEGLFSSYIYDCEAEIEDGKYWLIIDVNFENVSFERALNEKPLVKENQILIQGTTNDENIFVSDMDNQHHFEIEEGKGKYYVLFDIVSEVTEFSPVKTTIPVLEEGQSLVEGTTWVDKYTGEIKFDPIKNREDHRHHAIDALVIALTKESFFQRLSKQNASNENKKRGIEHEKEHLDFPEPWNGFHNEAKNVINSILISHKQNKKILTKITKKITKNGQTFKSNGMAVRGQLHKENLYGYRTPPIGEAGYHIRKSVESLKTDKQLEKIVDVKIKEIIIKARKAEIPLYKEVEQLSKQLKSPKNTEIEEKEIKEKIVALHTKIKSLYTLPNKNGEPVPIKKVRVSEEMGKAQQLKPSIKQYVNPRNNHHIVIFKDENEELKDDITNFWKVVERVKQKDEIYKLPDLEIGKPAPKELVLTFQENDMFLLGLSNEEYNDNKQDLVFLSNYLYRVQKISDGDYSFRYHLASTVTNKKEEVRITSMKKYQEMNPIKVNISVLGRIEKL

SEQ ID NO: 5329 - protein, 1529 aa, synthetic construct
  REGION 1..1529: note = Synthetic
MAKILGLDLGTNSIGWAVVYDENNEIAGMGSRIFPEGVVAKTIGTGEKEESKNAARRNSRQQRRQFYRKRLRKIKLLRTLIDLNMCPLSHAELDIWAKWDKSKGKIGRIAPNSKSYIEWHIQNPYYLRNKALHKDLTLFEMGRVLYHIIQRRGFLSNRKGNDEGKIYKGKEGMVGIDQTQKSIVGSTLGSFLNSIYPVEGEPFKLITDENGNELRVRARYTLRDMYVEEFDKIWTIQAKQLGLLGKVGEKNKLTFLKGNLSSNRNKKKIEKLYKKYGEENVNIEEIKNGKSEKSTFKIVTKSILPLKEFFGGEIEYDEEGKVRYKSEDSLLFWQRPLRSQKGLLSKCRFEPTVEKGGVYLQKGKSPCHLSHPTYEEFRAYQYINNIEYGKKQKLNGIQRLIVLDLINCKDSNFDFSEIPKKLKMPYEKWNYSDDQKVPGNYTTKHLAGLFPKEIWENHKNKIWHCFYDFKDNDILVKKLISDFGLDEKLYDKVKKINLKEGYSNVSLKAVKNILPFLREGYRMSDATILGGVMNAFGNLISYFKDSEDVLVKDIIKIIRDKSNKEGEAIEKIKIYLVENKFGFVNDDKRFIKLYHHSQDIERKSLKEKLDPVENLRNPIVQQGINETRRLVNQLIKEHGQFDRIQVELGRNIKNSKKGRQEQSNRINENTVKNDAARELLTEYGLKHNRNNIQKVLLYKEMQDRGVVTVCPYTNTSINISDVLGAENKIQIEHIIPRSISLNDSFANKTLCDSKFNTLKGKLTPYQFYQKNNDPKLWGGAERWEDIEQRAYKLLPYYKAKCFTSKIKIEDSDVQSSFIERQLNDMRYISKKTKEIMSQVCDDVRVLPGSLTAELRHLWGLNNILQPVMDLDITNNNIKEDRVYPHYVVMDEDNKAVSTIVLYNKKPALKPRETTITGIINKDVFKTIDDYVNLTYDTRALNNGKYWLKLKLSQPTKMVRIFKERPESTEKELVLRGKIDREKFKNNSVGMINAKNFDNGSYWAKLAIKDKKFVLPEIEKQPKKLRNQVLLFGEVKDNYFTSFIYECETNKIDGKYWLLLDVDLDNANFNRAINEMPAFDLNQIRIEGTLNSEGVFVSEVDTDHRFKSKEKAGKYWVVFDIVEKPNEFNAIENPKPILEDNQTLIEGNIWVDKYTGEIKFDPKKNRGDHRHHAIDALVVALSKQSYFQQLSDYNAQREAKYKGLPYEKEQLNFPEPWTDFHTTAKNKAEKILVSHKQNRKVLTQVRKRIIKNGQTYTSVGDAVRGQLHKENIYGQRQAPFEISKGYHIRKKVSDLKDNQLKKIVDLEIRKIIVNARVEEVKMQKQITILLTQKKKSRTDEEELIIANQIESFQKDIQQLYTLKNKNGEPVPIKKVRVREEMSNAQKVKELNQYVNPRNNHHILIYKDENGELKECINSFWKVVERQKQKQPIYQLPNTYNKGRIINTLEENDMFLLGLTDEEYNDSKMNYDFLTKHLFRVQKISEGDYSFRHHLASTLENKKEQVRIGSLKKWKEMNPIKVKLTEIGSLI

SEQ ID NO: 5330 - protein, 1546 aa, synthetic construct
  REGION 1..1546: note = Synthetic
MAKILGLDLGTNSIGWAVVDDEKKQILGTGIRIFPEGVVAKTIGTGDREVSKNAARRESRQSRRGFYRHRLRRIKLLETLIEFKMCPLTGKELKQWKQYDKKKGQAGKTFPSSEEFNKWLKLNPYKLRAKALNNDISLFELGRIFYHLIQRRGFLSNRKGNEEGKIFSGKDNMTGIDETNKQIKDKTLGTYLNSVIPKEYEPYKNIIDKNGKELRARGRYTLRDMYVDEFEKIWQRQSKQLGLNSIQKEVKKESIISGSIYNKRNKHRIKNLQKSKGKENVEIKGNILTIKEHIHLKEYLAGKIYYDDEGNLKHKSQDSVLFYQRPLRSQKGLLAKCSLEGRKFYDKKDKRWRTAGPTPCPLSHPEFEEFRALQFINNIEYGIKKRLDENQRLILLNLFNRKDTNFDFKLIPKELKLTYETFNYADDLKAPGNYTNAKLSKLFNPDIWEKHKENIWHCFYFYSDNDKLINKLKTDFGLEEKNEEKAAKIKLKDDYANVSLKAIRNITPFLKKGYKLSDAVLLGGVRNAFKTTDTENKPYDRWENFNNEHEKIEKDIIRINKDKKNKEGDAVKKIKEYLHNNCGFEKDDKNFKKLYHHSQEIEQKKIQDKLDKIENLRNPIVQQGLNELRRLVNTLIDEHGKFDKIKVELGRNLKMGKKQRQETEFKIRDNNKKNEEAREKLSEYGLAHSRENIQKYLLWKEIEDRSGTAKCPYTGKTINISDLLGKENKFQIEHIFPRSTSLDDSFANKTFCDAKFNGLKGNKTPYNFYKKNNDAKLWGGAKSWDEIKQRAFKLLPYKKAKRFTAEKVDEKAGGFIERQLNDTRYMSKKAKEILSQICPKDNIRVMPGSVTSELRHLWGLNNILQPVEILDFKEAKINIDKLEKHWVVFDEKGEVLSFYPIHNEKPNLKPNEITISGYLNNKGEFSSKYIALKSVYEELKGDNFKGEYWKKLKLSNKPLQTVKIFTDKPAVDDDEIVLRGKVAKKYFENDTIGKKIKTNFEDGYYWAKFKVNNVKFEKPIPKKQPKKKSGQILLYGTVEDAIFKSYIFECQTGEADGNYWAIIDLDFDTVDFSNTMNPKPETDDNKILIQGSINETGLFSSDIDNKHNFETTLPQGKYWTIFEIEGEDAKLYPQINLEPKLQDKQKVVEGTVWIDKYTGEIKFDPKKNRDDHRHHAIDAITIALTEQSYLQKLSTYNAQLDEKRRGKAKKPTFEMPWDNFYNDAKKAASEMLISHKANNKVLTKINKVIHKNGRTYTSKGYAAGGQLHKENVYGKRQTPGSKKPYYHIRKSVESLTTDKQIDKIVDGKIRAIILHGKAQEKRIKKEIDELNKQFKKAKTDFEKAEIQKQIKQKQQDIKMLFSLPNKNGERVPIKKVRVKENLGNMMQLKDKKVFAEKKGKEVELNQYVNPRNNHHVAIYKNTEGELFEKVVTFWEAVERKKEGLSVIDKNPTEGSVFVTSLEINDMFLLGINEDNINWENPNYSDLTKYIYRVQKVSSSYYTFRHHLASKLDNSKQEISLQSFKAWQEVNPIKVNIDILGRISKVD

SEQ ID NO: 5331 - protein, 1539 aa, synthetic construct
  REGION 1..1539: note = Synthetic
MSKILGLDLGTNSIGWAVVDDTNNKILGIGSRIFPEGVKADTIGKGDKEESKNASRRTSRQQRRQFYRKRLRKIKLLRTLIDLKMCPLTHLELDVWAKWEKTKGKAGRKAPDSPNYEEWHRLNPYVLREKALYEDLTLFQMGRVLYHLIQRRGFLSNRKGKDDGAIYKGKPGMVGIKDTQKQISEKTLGSFLHSIFPKEGEPFKLITDENGNELRVRARYTLRDMYVEEFDQIWNRQAKALGLDDKNATKTKIQFLNGSLKNNRNKKKIENLQNKYGVENVKIEELKDGKSKKTLYKVTTTTNVPLKIFLGGKIEHDDEGNVKHKSQDSVLFWQRPLRSQKGLLAKCRFEPDFKDKNGKYLQRGKTPCHLSHPLYEEFRAYQYINNIEYGKKQKLEETQRLQVLELINSKDSNFNFSEIPKKLKMEYEKWNYSDDQKVAANSTTKHLSTLFSKEIYEANKEEIWHCFHFFEDSDNLIEKLKKDFGLAEKDIEKVDKINLKEGYSNVSLKAIKNILPYLQQGLQMSDATILGGVRNVFGKRWDYFKDAHEQLENDILKINHEKNNKEGEAIQKIKNYLADPENKFGFLKDDKSFIKLYHHSQEIEEKQLQDRLDAVENLRNPIVQQGINETRRLVNQLIGEYGKFDRIQVELGREVKNSKKGRQEQTRRIYDNTTKNDEARKLLTEYGLKHDRENIQKVLLYKEMQEKGVTTVCPYTNKSINISDVLGRENKIQIEHIIPKSVSLDDGFANKTLCDAKFNGLKGNLTPYQFYLKNSDSKLWGGATSWEDVEQRAYKVLPYPKAKRFTSKIKVEDADVKSSFIERQLNDMRYISRKTKEIMSQVCEDVRVLPGGLTAELRHLWGLNNILQPVMLVDLPDYKLEAGKSIPHYVVMDENNKPVLTLPIYNDKPKLGENETTITGKVEKGVFKTSEQFVKLEVKTPELVNGEYWLNLKLSEPKQIIRIFRERPETSENEIVLRGKVEKEKFKNEGIGLVTAKGFDNGSYWAKFTITNKKFEAPEKDKQPKKSGKQVLLFGEVKEGFFKSYIYSCETNELDGKYWLLLDIDTENASFERAINERPIVSDAKIIVEGSVNDEGIFVSEIDAQHQFKTNEKPGKYWFVFDILNELTDFNAIEQPKPLLQEKQTLVEGNIWVDKYTGEIKFDPKKNRDDHRHHAIDALVIALSKQSYFQQLSAYNAARDAKKKLNSFEKEQLDFPDPWNGFHTDAKKEAEKILISHKQNRKVLTEVRKKITKNGKTFTSVGNAVRGQLHKENVYGKRQAPFETTKGYHIRKKVVDLKDNQLDKIVDLEIRKIIINARKEEVTIKKHIDVLEKQKKKVHSDEEETALNNQIQDLKKQIDLLYTLKNKNGERVPIKKVRIREEMSNAQQVKEINQFVNPRNNHHVLIYKKENGDLDKDVVSFWTAVERIKQNNEIVQLPSDGVEVVETFQENDMFLLFLEKDRNIEDLNQKEIFSHLFKVQKIAGADYFMEICFRRHTDSKISTEADYVYIKGFREGKTGWYSFNPIKVQITPTGKIEKI

SEQ ID NO: 5332 - protein, 1532 aa, synthetic construct
  REGION 1..1532: note = Synthetic
MAKVLGLDLGTNSIGWAVVDDDKQKIFGMGSRIFPEGVVAKTIGKGEKEESKNAARRNSRQQRRQYYRKRLRKIKLLRTLIDLDMCPLTHKELDLWAKWDKYRGKAGRIAPSSKVYIEWHRQNPYHLRDKALNEDLSLHEMGRVLYHLIQRRGFLSNRKGKDDGKIYKGKEGMVGIDQTKNSIDNGTLGSFLNSIYPPEGEPFQLITDENGNELRVRARYTLRDMYVEEFDKIWERQAKPLGLLEKTGEKKKLTFLKGNLDANRNKKKIEKLYQKYGEPNVTITEIENKDTRKSIFKVVVKSIVPLKEFFGGEIEYDKEGTIKHKSQDSVLFWQRPLRSQKGLLAKCRFEPTVTKNGKYLQRGKSPCHLSHPVYEEFRAYQFINNIEYGRKQKLNEYQRLQVLALMNGKDSNFNFSEIPKKLKMEYEKWNYADDQKVPGNYTTKHLSSLFSKEVWEKYKHEIWHCFMDFEDNDNLIEKLISDFDLNEKLIDKVERINLKEGYSNVSLKAIKNILPFLREGFQMSDATIFGGVMNAFGDQINYFKDSKEQLKKDVLNIVRDKTNKEGDAIEKIKSYLVENDFGFTPDDKRFIKLYHHSQDIETKELKDKLDAIENLRNPIVQQGLNETRRLVNHLIDEYGKFDRIQVELGRDVKNSKQGRQNQSNRIKENTTKNDAARKLLTEYGLRHTRVNLQKVLLYKEMQDRGVVTVCPYTNISINISDVLGRENKIQIEHIMPKSTSLNDSFGNKTLCDSKFNGLKGNLTPYQFYLKNNDPKIWGGAETWEDIEQRIYRLLPYPKAKRFTSKIKIEDADVQNSFIERQLNDTRYISKKTKEIMSQVCEDVRVLPGGLTSELRHLWGLNNILQPVMNLDINLKNMEEDRVYPHYVVMDENNNLISSLPIYNEKPTLEANQTTITGKVNKGVFKTLNNYVNITVSVPELTNGNYWLKLNISEPKKVVRIFKERPESTENTIVLRGNVEREKFKNNSIGLVSAKAIDNGSYWAKLPVIDKKFIVPEKEKQPKKTGKQILLFGEVKDNYFKSYIYECETNTTDGKYWLLLDLDTEHPVYERAINEKPSFASNQICIEGTVNDQGVFVSEIDAEHQFATNEKEGKYWVVYDIVNEPNEFNAIENQKPPIEKNQSLIEGNIWVDKYTGEIKFDPKKNRDDHRHHAIDALVIALSKQSYFQQLSTYNAQRVAKYKGLPFEKDQLNFPVPWLNFHTSAKKEAEKILVSHKQNRKVLTQVRKRITKNGKTFTSVGDAVRGQLHKENIYGQRQAPAEVSKGYHMRKKVSDLKDNQLKKIVDPEIRRIITKARIEEVKINKEIALLEKQKKQKGVSDEEELVIVDQINSLKNDIQQLYTLKNKNGERVPIKKVRLREEMSNAQKLKEANQYVNPRNNHHIIIYEDKMGELKETIVSFWEVVERQKQNQEIYQLPEFDKHGKIINTLQENDMFVLGLDDEEFNENKLDSKFLIQYLYRVQKISAGDYSFRHHLASTLRNKEEEVRVTSLKRWNEINPIKVNLTETGSIIEA

SEQ ID NO: 5333 - protein, 1541 aa, synthetic construct
  REGION 1..1541: note = Synthetic
MAKILGLDLGTNSIGWAVVDDNANKILGMGSRIFPEGVKAETIGKGDKEESKNAARRNSRQQRRQLYRKRLRKIKLLRNLIDLEMCPLTHQELDVWAKWDKKKGKAGRKAPDSATYEEWHRLNPYVLREKSLHKDLTKFEMGRVLYHLIQRRGFLSNRKGKDDGAIYKGKPGMIGISRTQEQIGSKTLGSFLNSIYPTEGEPFQLITDENGNELRVRARYTLRDMYVEEFEQIWNRQANLLGLDNATAMKTKVRFLKGSLDRNRNKKKIEKLREKYGAENVKIEKLKDERNKKTLFKVTTTTQEPLKIFLGGEIYHDDEGNVKHKSQDSVLFWQRPLRSQKGLLAKCRFESDIKKDGKYLQRGKSPCLLSHPLYEEFRAYQYINNIEYGKRHKLEETQRLQVLDLINSKDSNFNFSEIPKKLKMQYEKWNYGDDQKVAGNKTIKQLSALFPNEVWKNKKEEIWHSFHFFDDDDNLIEKLKNDFGLAQKDIEKIEKVDLKEGYSNVSLKAIKNILPYLQRGLQMSDATILGGVRNAFGKRWHYFKDAQEQLENDILKINHQKNNKEGEALEKIKNYLADPDNKFGFSKNDKSFIKLYHHSQEIEEKQLKDKLDAVENLRNPIVQQGINETRRLVNQLIDEYGKFDRIKVELGREVKNSKKGRQEQSRRIYDNTAKNDDARRLLTEYGLKHNRDNIQKVLLYKEMQEKGVTTICPYTNKSINISDVLGRENKIQIEHIIPKSVSLDDSFANKTLCDAKFNGLKGNLTPYQFYLKNSDSKLWGGATSWEDIEQRAFKVLPYPKAKRFTSKIKVEDADVKSSFIERQLNDMRYISRKTKEIMSQVCDDVRVLPGGLTSELRHLWGLNSILQPAMNLNIDIKNIQEDRVYPHYVVLDEDNKPVLTVPIYNDKPKLGVNETTITGKVDKGVFKTTEKTEKYVKLSAETPELANGDYWLNLKLSEPKEIVRIFKERPEATADGLVLRGEINKEKFKNDGIGLITSKGLDNGKYWAKFTIIGKKFIAPEKDKQPKKIGKQVLLFGEVKEGLFKSYIYACETNEIDGKYWLLLDVDTDNVFFDKAINERAQVTESKIIIEGSVNEEGVFVSEMDADHQFKTKEKPGKYWVVFDILNELTEFNAIEQPKPLLQEKQILLEGVFWVNKDTGEIEFDPKKNRDDHRHHAIDALVIALSKQSYFQQLSAYNAARDAKKKLNPFEKEQLKFPHPWNSFRIDAQKEAEKILVSHKQNRKVLTEVRKKITKNGKTFTSVGNAVRGQLHMENVYGQRQAPFETTKGYHIRKKVADLKDNQLDKIVDLEIKKIIKNARKEEAILKKHIDTLEKQKKKVRTDEEEAQLNLQMQELKKQIELLYTLKNKNGEPVPIKKVRIREKMTNAQQLKESNQFVNPRNNHHVLIYKKENGELDKNVVSFWTTVERMKQNSKVVQLPSDGVEIIETFQENDMFLLFLEKDTNIEQLSQKELFNHLYKVQKIAGAVYFMEICFRSHIDSKISTEADYVYIKGFGDGKTGWNRFNPIKVKITPTGKIKKV

SEQ ID NO: 5334 - protein, 1160 aa, synthetic construct
  REGION 1..1160: note = Synthetic
MRGCVLGVDVGVASLGAALIEVEIINGRMIYRGIIDGVSHIFPSAQGGAERRQQVAMRKSYQRQTLRLNALRKRLAQFFEVSSDFDDQPTDLGQAYVTACKSSDMPVVLSPNSRFRLRATGLTEKLSAGDLARTILHLAKNRGMRLTRAFDNGRDEKAGKQAQTEAVGMAREAQETAGSMKAHGVVTPGAFLWKIEQSASEGHKRPALRHRKGRVGGYLFTRQQVEAEFDAILKAQSGFHPELLTPEKITEIREQVFWEKDAPDPKVGPCLYFIDDLRIPIASDLFQNKRIYEEVNSILIKHSNEARRRLTIAQRELLVAELLAGENLKVSKIKKLLGLDRGLELSLEAGYGKRTEAREIKGHRIIVEFRKVQGLLDMFRSLSPVRQRELVELLRTERDREVAIVQLVSGFGLSDVMAHAVMDEVVLPTGYAATGARATEMLFETLRDEVMPDGEYAGRVMLPWDAEQFLGLERVGAQIVSQSRLPYYGKVFPHLVRDRMTPGDKGFDAATNEQKFGRIPNPVVHVAMTRMRKVVNGLLKKYAATYGQPIRVHVEFSREMSMSDDERAKYERRIQQEHKQNQEDDAEIIRNGGVPSRKARRMLRLAREQNWCCPYSLRQIAPTDLFKDFDLDHILPRAETLDDSLGNLVVVCRDSNRVKGKKSPFEAFGDGRDYERDDGKKISHEQMINYVRSCKGMAHKAWRFGPDAMDRFRDEKSFGERYLNDTRYIAKCAAQYLQCICRPGAMGAVKPVVALNGRIVSDLRYGWGLRKLVEEIAEFQEPDIYAADADGKTGKKDRRDHRHHLLDAIVTALTPYDLVRQLKDLAREKLKAGNDRIGNLVPRHPWEGFQSDIRDFIAQINASHRANRNLNAQMHEATGLGVIARLGDGSYLTRTRKRLDPADFTDPQKLEDVISVPDRIVMEMTKAVGDPKAQVFWSSSDPVGDLQDIAEDLEQVRNDILSLYETQPESETQERTDDEPLIRKLKPEERLGRAIRQYVKQTGRRTVKVFGTAQAVVIDHNDREVPTRTYRPGNNAWLDLYRAEDGKTSFEVVRTIDAMRPGFVPAWSLDGGNHLLLRLYQGDTVEITDKTGQRRRCVFRENSPGDWSFQPVNLAVNVRDTSLRSRLRFRSFKGLLAADPRLVVTDIVGNPVWRSPARNW

SEQ ID NO: 5335 - protein, 1069 aa, synthetic construct
  REGION 1..1069: note = Synthetic
MSSSYRLGIDIGTNSIGWALFALDGKGHPERLVDAGVRIYSSSREPKTEDPLGKARREARQARRQRDRRLQRKGRVMAELVRLGLMPANAAERKELERLDPYELRARALDEALHPHRLGRALFHLAQRRGFKSNRIAEDEREKGKIRHSIDTLREEMERVGARTLGEYWYHRRRRGDRVRGAFWTERAMLEEEFRAIVEAQKRLQPGLAGTLDRALQGESCLFGRIFHQRPLGPQKTGKCTVDGESDRAPWAHPLAQQFRILQELANLRVRVPPDPGFRPLSREEFTFLHRELSKRKELGFDRMRRLLGLPADARFNLESEGRKKLDGDRTAAILGNRKILGKRWHTLSSDEQQRIVERLLAETEEGEIVRFGRSLGLDEAAAKALAAARLPQGHCHLGLAVLKVIIPIMRDRGLGYAEAVKEAGYHHSDLAEKTGRGRLPYYGEVLRRWCLPGQGKTLPDEESEYGRIANPTVHVGLNQLRKLVNAIIETYGRPDEIHVELARELKLGRENRRKVEREQAGNRERNREADEAMRRAGLDPETMGAGSLAENRRRYRLWLELDEAGPQRRCCPYSGRAIGIRALFSSEVEIEHILPFARTLDDSMANKTVAYREANRDKRERTPFEAFGTSPVIDGRRYDWEAIAQRASRMPQNKSWRFASDAMDRFEKTGNFVDRQLTDTTYFARLTRIYLQSLYRREEGDRVVAIPGRLTALLRRKWGLDRLLAEGNWKNREDHRHHAIDAAVVACTDRRTLQAFAREDERGRQRIVIPPPYEQFREELGRRLAGMIVSHKPEHGIAGRLHEETAYGATRLVNEKGTPCYVVRWPTEKFTNERHLDQIRDRHLRRLVKEHVGREIAIGRSFKEALASFRAPNGKAVRRLRVLVPFEEGSLVPIRNGRPEPFKYYPTGANAYLDVLELPDGRWFGWAVSRFEANRLARNPGPPPWKSKHPAARRVMRLYKGDLVAVERDGSREIMKVFQMNQNGRVLFAPHYEGGPLQKRHDDTNDPFRWLMASASTFPKLRLRKVSVDILGRLKDPGFADARKDRGDRQRQPSPVRGQGAPADPRSG

SEQ ID NO: 5336 - protein, 1155 aa, synthetic construct
  REGION 1..1155: note = Synthetic
MSASTAPDIHLAFDVGHSSIGWAVLRSGPGGSPDRAHPSILGTGVVTFGADDCLAVKRRQFRQTRRHVRATRQRIAHIARLLAQLGVLSEQELASRHRQAGGDSFAWRLAADVLVAARTGSPLPAIGWPELWDILRWYAHNRGYFAPPWANRSGERGPGDGDADDTEKVENANTKMGELQTGTMAETIAAYTVWYEREVAKWHQQQRPQKPPHFKGLSMAFPREHVVWPEVRKLLEALRGRLPLLDDALIRTLLGNDVDPLQDPRAWQTIPCPSIKLPKRYHGGLLFGQSIPRFDNRIIGTCPILFGRLHARYLSEGLDEKEARARAEKESKLPSKASPEFLRFRWAMQLANVFGSAAHESVTRPLTAGERKQVTEQAEQGGKLKAGEFKKVVLAATGWSRSNLDNLLMHPDAKESLVLDPVQVAISESPLNDALSSLPDRCSKRLRGKLRDGKTLAGAEVRSWLENEDLARFDSAVATVLDKANSRLSKGKPPATAEGILRQSLAAPFPAGRAPYSRSILREAYDEVMDGRDPRAEKSATQPRGCLCITRELQEAQLHRAVDAQTNNHLIRHRLMILGRLQRDLIQSPEFADGNPRRIATVTIEVNRDIRDLSGKNRKEQEQDLNIRLKDFKLVAAKVEEACKRRGVQVTPGIIRKARIAEDLGWKCPYTGQCFKIDDLVEADSPMDKDHIIPHAHRQSDSLDSLVMTWRTVNKWKGKRTALQFVKEEGGKPVPGMPQLSIMTEKQFTAHVDSLDTKGPSLDDKSRKSRRKKRLLTERHEEKEFTPRDLTVTSHLVRLGAQVLKRAFPDEYRPHVVSLPGSVTGEVRKAWRLIDCLGAANPGIFEPNSTNPRLKNDIRGITQLHHALDACVLGLASLYFPRNGSVWSAMTKAGADREADDERRLWLAMTRRNPSEQEAQLLMATGLYKPDAERRLHMVNIPERLKHELRKRLSEKRVVQHIPAAMSGIKVSETTHGVIGQKDGRVLLRQRSRDQKTGLRSKSEGDDSPSKVLGLNPIGGAGKLFLQKGVRLITSNFGLAILDYANDGNEKFVVIPWHRVWHRLNDLKASNNGRRPRIVRNGALIRISSLDGKLACRNGVWRVYSVMQTLKIDLISPDSVTRESSGDRVWANVRLASIGPERITILDHGYAGSPA

SEQ ID NO: 5337 - protein, 1234 aa, synthetic construct
  REGION 1..1234: note = Synthetic
MAVRTKQKIMPAKAATPDLELAFDVGHSSIGWAVLQSVGRASSRAESLAPGILGCGVVTFGADDCLASKRRQYRQQRRHARATRKRIELLARFLSHHLQGESDPATAQLLEFLKPYLEQTASTRQLQGDGDSFAWQRAAEILAAARNGKPLPDLGWPELWDILRWYAHNRGYFAPPWANRGDEATTADADDEESDTEKVEHANALMRELGTRTMAETIAAYTARYDREAAEWQQGRRKEKPKHFKGLNAAFLREKVVWPEVHALLTALKGKLPKLDDALIRTLLGNDVDPLRDRDAWRTIPCPAIQLPKRYHGGLLFGQVIPRFENRIIGVCPIHFAKRQAELISAGFSPADAQKEAAKQSKLPSKATREFLRYRWAMQIANIFGAIPGEPNTRPLTADERKQLTALAEKQGAFTKGEFKDAVRQITGWPEKPPRDNLDALLLHPDAERALVLDPARQQIHKSKLAAALDALPERFRKRLYGQLWRGKIVKQATVRSWLTGADADAFDAEVQRVLEAANTRRSRKQAPPTREELLAEELRVDWKRVASGRAPYARLVLRQAYDEVMQGFDPRAEKDATQPRGCLCQTNELKEAQLQRRLEEQTNNHLIRHRLLILERLLRDIIAAPEFANGDKSRIAGMTIEVARDLRDLSGKTRKEQEQDLGLRLGDFKRVAAKVEEACQSRGIRVTAGIIRKARVAEDLGWRCPYTGKDYSIDTLLDGVMDREHIIPHSDRQSDSLDSLVITWQEINKWKGKRTAMQFIREEGGKTVPGRPELSVMSLAAFQKHVASLDTRKGHDDDRARKKRRIRRLLTETYEEKEFTPRDLTVTSHLVRLGAQMLQRAFPPEQRPPVNSIPGSVTGEVRKAWKLTGCLEAANPAVMEEVEERNPDSGQLEKVRRVKKKDDIRGTTHLHHALDACVLGLAAHYFPRHGTVWSAMVKAGTEREADDDRRLWLAMTKRRPTPQEAALLRATGLYQADSEGRMHLTDLPEELKQQLRARLAEKRVVQHIPADMSGVKTEENTRRVLRVREDGRVDLRQQAPRDAKTGVRPKPKTTDEPAGKLLGLNPANGDGKLKRQKGVRVITDNYGVAILDHAPEDEEKFVIIPWHKVHTRIFKGLNGEKSLVERNAGKMPRVLRNGQLIRVPRGSRAGIWRVTSTKNTEAYGLALDLSSPDNLKLDRGNAPIEKLCEAGLEIVDCPLVGVDSSQVKVAEVKRRPRNKAADGMTENNLNATA

SEQ ID NO: 5338 - protein, 749 aa, synthetic construct
  REGION 1..749: note = Synthetic
MRESAIGVAAALNDDARRPGTGGTDMVLRFSFDLGTGSIGLAAGRTGADGRLEPLFAGARILPAQPAQAVARLGLRRKQGRYRKRRRERRRQFAACLRKAGLLPPVGKASARLFRLDPYELRRRALDRPVSLHALGRLLMHLHKRRGRPIAGTSPPGEIAGPGLRTLGEHLAIRHRGPVRGRRAVRHRLGLKGIVDPPPEIRRTDVIAEFRAIWTAQRQFSPTRLSDTLFDTIHAAFQDEGRRVERPPREDRRTAVVLAQLRQCMNAMERRFGTPRSVVLERPLPLPSGEGLSARHAMPPWAWDLLRRRGLRPTRHRRVVLALLARQEAAANGQAVCPYSGRNLKRADLFSGLHEIDHVLPVSRGGATAAANLVLCHAFANRQKANRTPEEAFAGQARWRQNTRPGAVAGRNGPMAHAMPDRRAAMQRLAAAAGRMIARRWPGARVQWVHPSGIAALRRSIAPEGQAGPSAKSLADNRNHAVDALLALFLATGRKPDAARVLAFLENATVTHAGGRKKTATGETRYGATLSRDGTAHLHCRRPLTTLSKAQARRIVDPALRERILEALEHRDTGTSRIEALQDLSRTTGIRRVRIARATRMAWPVAGGIAWVMPAGNAFMDIVVLPSGRWVGFCATRAETARKDWRPIWEKGRIGGKLVMRLRTGDLIELDGPEGERVWRTVRQLSAAKARIHLAAPEEGGTLARRHADPDDPFRWELVTAEGLRRAGARALDVTPAGLVRPRRSNLSR

SEQ ID NO: 5339 - protein, 1029 aa, synthetic construct
  REGION 1..1029: note = Synthetic
MRYVLGLDLGPSSIGWAAVKLDNEGNYIGLADIPNGNDLTPAIGVRIFPAGIENINQGQREEPKNKKRREARSVRRMLRRRRARRLKLLVALTANNLMPSDIKKKEEILSQDPYKLRDKAVSEKINLFDIGRIFLHIAKRRGFLSNRKQTEKDKDAGLVKEAIERLANESGNKTLGQFWSEKLRENPFEAIRNRRSNYHWIAQRMQYEYELNKIWDVQAKFYPDILKDNFKKLLFDILFKQIDFELSNLKKRKVVGTCTLIAGKPRLSMASRKAQEFRLLQKINDMKVYRKGKEIPFDKEKLYQELMVSSNRDFKQIRKLLGLEEDDRINQEHSKSNKLIGNQIDAILSGNKFFGKKEWLKLDETQKENIWKEIQRYINNSRITSEQLLKNIKEKYELEIKDKTAIEKLSEPQGNLSYCEQAIDKILPFMRQGKGLYESIEAAKFVKGWTQQKMLPLPSRENGINIPNPIVTTVMFQLRKIVNALIREIGKPEKIVIEFARDLKASKDLRKEIIEEQNENQKDKEDCIKRIREYHKWDEDVKVSPVDVLKYRLWQQQKEVCPYSLRKIGIEKLLSTETEVDHILPYSMSLDNSMHNKIVCYSGENQTKGQNTPIDWLGETSEKFKKLADAIDKGEFNFDKAKRERFFVHNEEIAERYTPDRLLQDTSYIAREVRSYLKRLYSASDSEKCVKTTKGGITAELRNLWGLNAILRDGELGPKNRDDLRHHAVDAAIIAVTEPGIIKKITEKLKDNWPKRPSRARVDEPWNGFGVELAKAIEKINISHKVLRKVNGALHKETNYWKELNECQQKGKFITRKELNGNFTNSWAEQICDNVIKQLVKNRLLEFGNDPKKAFAEDNPLYLENENGKPVPIRKVRVWQTSSNMIQIRPNIWVEPGSNHHIEIFETKDKKGNTKYEGELVTTFEAYKRKISGEPIIQMEHEPDKKFIMSLSQNEMFILKLEDGLEVLHRVQKMSQSKGSISLIFRPHTYGGAMSDYDKPPLIQRKSPSTLFGRKVTVDPLGRIRWAND

SEQ ID NO: 5340 - protein, 1054 aa, synthetic construct
  REGION 1..1054: note = Synthetic
MRYVLGLDLGPSSIGWAAVKADEKGDFCGLATIKDGNNNIPAIGVRIFPAGVDNINQGQREESKNKKRREARSVRRMLRRRRARRSQLISVLITNGLMPTNDAEREQEQDKDPYELRAKAISKKLSLYEFGRIFLHIAKRRGFQSNRRQAEKDTEAGLVKEAIERLTQQIGNKTLGQFWADKLRENPLQAIRNRRGDYHWIAQRQQYQNELNAIWQAQSKFYPNVLTSSLKEKIFEIIFKQINFELSNTKKRKVIGTCTLIAGKPRLSMSSRKAQEYRLLQKVNDLKIYRKGTEVEFDRKKLYEELMISRERNFKQIRKLLDLNDDDRINLEYKKSKKLIGNQIDGLLASNKFFGKKVWIVLSEQKKEVVWDEIQQYLRNSNITGEQIAGKIKNEYGLKIGDINALEKLTEPKGNINFCEEAVDKILPYMREGRDLYEAIEKANFAKGWTQQKFLPLPSRDNGINIPNPIVTTVLFQLRKILNALIRELSRPEKIIVEFARELKASKDFREEIVEEQAENQSKREECIKRIKEYHRWDEDVEVSATDILKYRLWEQQKEYCAYSYPYRNISIGQLLSTDTEVDHILPYSMSLDNSMNNKVVCFANENQAKGQNSPIDWLGETSERFKKIAEAIEKGMFDFDKAKKERFFVHNEEIAEKYTPDRLLQDTSYIAREVRSYLKRLYPASEAEKCVKTTKGGITAELRNIWGLNAILREGEVGPKKRDDLRHHAIDAAVIAITEPGIIKKITDKLQKNWPRRPSRTVVDEPWNDFGPELAKATEKVNISHRVLRKVKGALHKETNYWKETNGPQAGKFITRKALDGKFTDDWAEQICDETIKNLVKERLVQNENDPKKAFKVKEPLYLPNKKGNPIPIKKVRVWQTSNTMVQLRPYIWTEPGSNHHVEIFRVKDEGKYKNKLVKKIWTTWETSQRIKKYCLRNNDNKIPNLIITQENPYPEQFKNVEFIMSLSAGETVKMIDRQGKEVLSRVIKMSGDKDSTTSIDILFWKVQAAKVEGKINQQTPNVYRITTLQDFDKLKMQKVTVDPLGRIRWAND

SEQ ID NO: 5341 - protein, 1032 aa, synthetic construct
  REGION 1..1032: note = Synthetic
MSSCHYVLGLDLGPSSIGWAVVKTDEKGDFCGLAAIKDSNNNIPAIGARIFPAGIDNINQGQREEPKNKKRREARSVRRMLRRRRARKLKLLSVLTANKLMPVGDKEREYELNKNPYELRAKALCEKTSLFEVGRVFLHIAKRRGFQSNRRQAEKDAEAGLVKEAIERLAQEIGDKTLGQFWAAKHPKPGEIPLEAIRNRRSNYHWIAQRQQYRDELNRIWQKQSEFYPKILTNKLKEQISEIIFRQIDFELSNMKKRKVIGTCTLIAGKPRLSMSNRKAQEFRLLQKVNDMKVFRKGREIRFDRQKLYEELMISKDRDFKQIRKLLGLNEDDRINLEYKKSKKLIGNQIDGMLTGNKFFGKKTWVPLNEQQKEAVWNELQQYLRNSNISAEQIAEKLKNEYGLKVGDMAALEKLSEPKGNLNFCEEAVNKLLPYMREGKDLYEAIEKANFVKGWTQQNFLPLPSKDNGINISNPIVTTVMFQLRKIVNALVKELGKPGKIVIEFARELKASKDLRKEIVEEQAINQDERERCTQRIREYHRWDEDVQVPATDILKYRLWERQKEFCPYSLIKIGVEKLLSTETEVDHILPYSMSLDNSMNNKVVCFARENQAKGQNTPIDWLGETSERFIKITDAMEKGMFDFDKAKRERFFVHNEEIAEKYTPDRLLQDTSYIAREVRSYLKRLYPASEAEKCVKTTKGGITAELRNIWGLNAILRDGELGPKKRDDLRHHAIDAAVIAITEPGMIKKITDRLQNNWPRRPSRTAVDEPWNGFGLELARAAEKINVSHKVLRKIKGALHKETNYWKEINGKHAGKYITRKELNGNFTNNWAEQICDEEIKRLVKDRLAEYENDAKKAFAEPLYLPNDKDKQIPIRKVRVWQTSSNMMQLRPNIWVEPGSNHHVEVFETKDKKGELKYEGKLISMYEAAQSIKNKQPIIQTNLGSDKKFFMSLSQNEMILLKLEDGSEVLHRTQKMSQSKESISIIFRPHTYGGKLSDYDKPPLIQRRSPSTLIGRKVVVDPLGRIRWAND

SEQ ID NO: 5342 - protein, 1317 aa, synthetic construct
  REGION 1..1317: note = Synthetic
MIKLNNMKKILGLDLGTNSIGWAVVETEDNKKFELLDKGVRIFQEGVKIEKGIESSKAAERTGYRSARRIKFRRRLRKIETLKVLIENNMCPLSMDELIVWKENKNNYPKNKIFYNWLKTKDPKEGTNGTYINPYYFRTEAIKRKLENTNDVGRALYHLAQRRGFKSNRLESTDEKSRGIVKTEINKLSSELNGRYLGEYFYELYLKGEKIRKRHISREEHYLNEFKKICEVQNFNKELAEKLERAIFYQRPLKSQKGLVGKCTLQNNKHRCPISRPEFEEFRMWQFINSIKYKNSDGKFDFLNKEQRENIIPAFVSNKNATFEFSKIEKILNKGVHIYQFNYKSNHTIGSNQTMINFMDVFDIDRKLTNAWLLCVNKIYELYTAKTKKDGSLKSKSEVITDVWHVLFTFDNEENLKEFARNKLLLDESSAQKFSKINLKQDYSQLSLKAINKILPYLQEGLIYSYAVFIANIENVIGKSIWNIKENQQIIRTSIKKIIDNHKTELDINTITNSLINDFKVNYNNAHKEYKVDDIDLKNIREKIIKYYGNKTWNCLPEDEKLYVKEKVEKLYEKQLKSGKRGIFIEKIRLDDRIENFLKDNFDSSELNLKKLYHPSDVSVYKSVKITDLGLRLLGSPMIPSIKNPMAMRAMHQLRKLINHLIIEGVIDDSTIINVEMSRELNDANMRKAIERYQRQRATENEEFKTKIKELYKKECGTDFEPNNDDIMKYRLWEEQNHKCLYTGKSIGICDFIGSNPAFEIEHTIPRSLSYDNSLENKTLCEKEFNQQVKKNRIPFELSNYKEIISRINNWEIKAEELFKQIQKVKIQSRMAATKEIKDNAIQRKHLLQMEFNYWNGKLSRFTREDVPEGFKNSQLVDIGIITKYARAYLKTVFNNVNTVKGSTVAEFRNIWGLQEYFEKKDRSNHIHHCIDAITIACLTKDKYDFLAHLYHLDEQNNRDAVHRAMIKSKPWENFVQDVKEIENQILVSHYTPDNLPKQSKKILRKRGKIQKNENGDLIYEKGDAVRGSLHKESFYGAIKREIINKKGETEEKVLYVKRKPLEFSDLGFKTISELENIVDDAVRDKVLNAVKDKGLKQALNEPIWMNEEKQIPIKKVRCYTPSVTNPINLKKHRDKSKHEYKQSYHVTNDGNYLMVIYEGKDSQEKVKRDYEIVSNLQAGEYFKQSVHGVLKAQGINNLEGLIPKFKESGKNILPLKYILKTGTMVIFWENYPEEIWDIDKNQLYKRLFKVTQFESDGRIQARFHQIAKPDNELTKVSELDFSNIAEKIRLSKGNLNMLVNGYDFKINVLGHIEKLS

SEQ ID NO: 5343 - protein, 1512 aa, synthetic construct
  REGION 1..1512: note = Synthetic
MAKILGLDLGTNSIGWAIVEYYKENNIQFKLQDKGVLVFDAGVLKDDKGKYKSKTSERTNFRGIRKLKLRLKVRKYETLKVLIENEMCPLEMQQLDVWKKSNFTIYPCSETFLDWLKTDDKSHKNPYYLRNKATKEKLSNYDLGRVFYHLAQRRGFLSNRLDKTDDSKIDNLKEKLKIYVEESDLTTLKLEFENQFIDFELEGRKDLDPTETKIKNIKSKIYKIINNKDIKYSEIDTVKKEINDYLNKPETSGPVKKGIKELDTLLEENKFDTIGQYFYSIYNKEFNIVKEGEKELIVKNAKIRNHYTGRKEHYLKEFNIICQKQEIDKKIKDALIKAIFFQKPLKSQKGMVGYCNFQINKRRCSLSRPEFEEFRMLQFVNNIKIKTPVDEKLRKLTDEEIIKVKKQFYRKTKPTFDFKDLVDELIPKDKTAIYFKNKEAKTAEYLVNYKLNATVSGCPTISNLISIFGQEWKSFEVVTDKLNSKGKYIKYNYIDVWHAWQTFTDAKKLESFASEKLKLDNVKAAKFSSVSLKTGYSDLSLSAIEKINKYLAKGLLYSHAVFMANIENVIKDEFWNDLNKRKEIEFEIGSIIDTYSLEKKYSNAVNDLLSKYYEDKENRVYYSKEAKQIFRKDLWSKFEDVFGRKAWNNNDDKDEYFEYYFNLMLKNLELRKRIKIETLEEKVKNYLLSFEYCDENDLKKLYHPSAIEKFKAKLLKDYDGKAYKDENGNDLLGLGSPLNTSIKNPMAMKSVHQLRKLINTLLIEGKIDKSTIIHVETARELNDNNKRKAIEEYQKERENLRAIYKQKIEELYFKETGSTINPNDDDILKFQFALEQREDKKIVTKEEILKYELWKEQNHICLYTGKTIRLSDFLGENPKYDIEHTLPRSLSQDNSMENKTLADAKFNRDKKKQLLPCELDNSEDVLLRIGHWKNRYISLDKEIEILKKKGSRITDKDKKDKNIQERHKLKMEYNYWYGKYNRFVMQDITDGFKNSQKVDVGLITRFAQNYLKSCFEKVYSVKGTMTDEFRKLWAKDVFYKEENGKLEKNRDNHTHHCKDAVVIACITKDKYDLLAKYWEKEDENKKEEAKEIIRNTIPWKGFAHDLKEIEETVLVKHIKKDVMKVTTYKKLRKKGKLLHIPEYVKDENGEIKLDANNKKIKVTYKHPETGKEIIVYQKDNEGKPLPIIQKSDSARGSLHKQSFIGAVAKRMLDENGKPLQINGKYILQKDSKGNVEKLYVMRKEITKLNASDIEKIVDSNIKMIIQKAVDNKILKFKKEGATIEKDCIIWQNEEKKIPIHKVRLFVKDTPIEIKQQPKQNLQTNKANRKIHKHLIYAQNDDNYMIALYKDDKHKDFEIVNNLDYINLKKENQGFYPTSKIKKVRGKEVIIPIINRNKKDLILKKGQIVIFLEKGEVINDLNTISLLEQRIYKIEGISRQYDKKNDNEYGVLNFKKYDEARKSDTAKKDDYSEDGEFKLNENKPTRKMSHNQFNAFVEGIDFMITPIGKIQKL

SEQ ID NO: 5344 - protein, 1194 aa, synthetic construct
  REGION 1..1194: note = Synthetic
MLVLLKLSITVIWLYNHTQLSTKGISRMAQKSSYSPKKYSLGLDIGTSSVGWAVLDLDKERIHDLGVRVFSGQIENKRRRQFSSAQRINKRKKQRLKHLKAVFINNGLLSSDEINLALKDQRVTENIYSLRAKAATQQISHRELFRVLYLIAKKRGFKSNRKSDPNDSDSSDTKFKKQLAKNSATAKKYQTIGLMLENDPVYANQKHNSKDNYIATFQREDIRKEVEIILNKQFEKELNAPQTSDKYRNIIEAILDETTVDDNGEKQYLGMFTQRPYTNASLIEKMTGFCEFEKTERRYVKASYTTEEYIFLSNLSNIVILDTNNNDEKYYIGKDGIGRLLALAKQKKNIKCSDLRKVLSLDKSICFSSRAIEDTYRDSIKHANKKYSAPQNKEKLAEALETARKIRDRSRKSIERQKVCEKGLETFSIFKRLFKDSVLEQKIDENPYLLDDIAYILTVNIDDESIKTNLQQLEFLSDHDISVIMNMPTDDLRHFSGRSNLSHLAMQNIIKYLKEGYQSHLAIQKAGYDTKEIYQGNNITLPPLKLSDFSQDGDETFEEYGINSKVAQRALSQSIKLINAIIKKYGSPTYVRVELAREFAKTEEEREKIERNNKRNREKNRKYEEIINQIFKDNHKLPPSKIGHIIRKLTLRDQQDCKDIYSGDDIDITTLVLDESAYEIDHIIPRSKRFINDMNNLVLTSTKNNREKSNRLPLSYISDPTKQKEFLERVNLIKDKQKQKNLRLDSCEDQDNMTERALNDTKHIARFFKNYIQRNLLFAGDDEEDGRQRVFAIPGPVTAYLRARWGFEQKDRDANALHHAIDACVIVATTPKLLNRVMYHESHREQGKLYSERQSAEQDTGDFGMQAYLRAKKMYHDSIDNVSGEIIDPHKHNVAYEIMQEHEKLYRYSFPRPWIDFAREVSLRASDIDKKTLQNKLVEINNYDAEFRKTLHPIFISHMRYGKTRGSGHGEQIYKKPYKDDSRIIQHKSIYEISPDDIENSPITISDRKLYELLKDTFSKIELQVNQSEKDKRIDKNTVIYKPSKNPDKSPVVKRIPVYIDKTPISHDVRGGAVLNEKGTVAYSILCQSSTTGHYKVVPVYFRQIHANENIELEEGWKYISRIIPNDFVVIIKKDGSRISGYYKTRKGDTLISILPHQHSDSSRAISQRIGTAKEIRIYNISILGDNAPEEEYK

SEQ ID NO: 5345 - protein, 1158 aa, synthetic construct
  REGION 1..1158: note = Synthetic
MKYSLGLDIGTASIGWAVLDLEKERIHDLGVRLFDSQIKNKERRQYASTRRMNKRRKQRLNHLKAVFIDNNLLSADEIRSALKDQKITESIYPLRARAATQQISNRELFRVLYLIAKKRGFKSNRKSDPNDNESSGTKFKEQLAKNSATAEKYQTIGLMLENNPAYTNRKRNSKDNYIATFQREDIRKEVEIILHKQFEKELDDPQMSYQYEKIIKSLLDEVSINDNGKKQYLGIFAQRPYTNASLIEKMTGFCEFEKTERRYVKASYTTEEYIFLSALSNIVILNTSKNDERYYIDKDGVEQLLTLAKQEKILKCSDIRKALKLGKTICFSNKAIEDTYRDNVEHANKKYSSPQNKEMLAEALEAARKIRDRSRKSVERQKICEKNLETFYIFKKLFKDSVLGQKIEENPYLLDDIAYILTVNIDDESVKTNLQKLKFLSDHDISIIMNMSTNDLNHFSGRLNLSRLAMQNIIKHLKEGYQSHLAIQKAGYDTKEIYQGNNITLPSLKLSDFSQDGDETFEKYGINSKVAQRALSQSIKLINAIIKKYGSPTYVRVELAREFAKTEEEREKIERNNKRNREKNRKYEEIINQIFKDNHKLPPSKIGHIIRKLTLRDQQNCKDIYSGDHIDVTTLVLDESAYEIDHIIPRSKRFINDMNNLVLTSTKNNREKSNQLPLAYISDPTKQKEFLERVNLIKDKQKRKNLRLNSCEDQDSMTEQALNDTKHVAKFFKNYIQRNLLFAGDDEENGRQRVFAIPGPVTAYLRARWGFDQKDRDANALHHAIDACVIVATTPKLLNRVMYHESHREQGKLYSERQAAEQDTGDFGMQAYLQAKKMYYDSLDRVSGEIIDPHKHNVAYKIMQEHEKRYRYSFPRPWTDFMREVSLRAGDIDKKTLQNKLVEINNYDDEFRRTLHPIFISHMRYGKTRGSGHGEQIYKKPYKDDGRIIQHKSIYDISPDDIESSPIATSDRKLYELLKDTFSKIELKGNQSEKDKRIDKNTVIYKPSKNPDKSPVVKRIPVYIDKTPIPHEVRGGVVLNEKGTVAYSILCQSSTTGHYKVVPVYFRQIHANKKIDLGKGWKYISRIVPNDFVVIIKKDGSKISGYYKTRKGDTLISILPHQHSDSSRAISQRVGTAKEIHIYNISILGDNTPEEEYK

SEQ ID NO: 5346 - protein, 1167 aa, synthetic construct
  REGION 1..1167: note = Synthetic
MTQKSSYSPKKYSLGLDIGTSSIGWAVLDLDKERIHDLGVRIFSGQIENKKRRQFSSAQRMNKRKKQRLKHLKAVFINNGLLSPGEIKLALKDQEITENIYSLRAKAVTQQISNRELFRVLYLIAKKRGFKSNRKSDPNDNESSGTKFKEQLAKNSATAEKYQTIGLMLENDPAYTNRKRNSKDNYIATFQREDIRKEVEIILHKQFEKELSTTQTSNEYKKIIEAILDEIIIDSSGEKQYLGIFTQRPYTNASLIEKMTGFCEFEKTERRYVKASYTAEEYTFLSALSNIVILDTNKNDERFRLNEEDLEQLLELAKQEKNIKYSDIRKSLSLDESICFSSRAIEDTYQDSIKHANKKHSSPQNKEMLTEALETARKIRDRSRKNIERQKICEKGLETFCIFKKLFKDSMLGQRIEENPYLLDDIAYILTVNIDDESIKTNLQQLDFLSDHDISVIMNMPNDDLKHFSGRSSLSRLAMQNIIKYLKEGYQSHLAIQKAGYDTKEIYQGNNITLPSLKLSDFSQDGDETFEKYGINSKVAQRALSQSIKLINAIIKKYGSPTYVRVELAREFAKTEEEREKIERNNKRNREKNRKYEEIINQIFKDNHKLPPSKIGHIIRKLTLRDQQNCKDIYSGDHIDVTTLVLDESAYEIDHIIPRSKRFINDMNNLVLTSTKNNREKSNQLPLAYISDPTKQKEFLERVNLIKDKQKRKNLQLDSCEDQDNMTERALNDTKHIARFFKNYIQRNLLFAGDDEENGRQRVFAIPGPVTAYLRARWGFDQKDRDANALHHAIDACVIVATTPKLLNRVMYHESHREQGKLYSERQAAKQDTGDFGMQAYLQAKKMYYDSLDRVSGEIIDPHKHNVAYKIMQEHEKRYRYSFPRPWTDFMREVSLRAGDIDKKTLQNKLVEINNYDDEFRRILHPIFISHMRYGKTRGSGHGEQIYKKPYKDDSRIIQHKSIYDISPDDIDNSPIAISDRKLYELLKDAFSKIELKVNQSEKDKRIDKNTVIYKPSKNPDKSPVVKRIPVYIDKTPIQHDVRGGAVLNEKGTVAYSILCQSSTTGHYKVVPVYFRQIHANENIELEEGWKYISRIVPNDFVVIIKKDGSKISGYYKTRKGDTLISILPHQHSDSSRAISQRIGTAKEIRIYNISVLGDNAPEEEYK

SEQ ID NO: 5347 - protein, 746 aa, synthetic construct
  REGION 1..746: note = Synthetic
LLDGIAYALTVNIDDESIKANLKKLEFLSDRDISVIMNMPADDLKHFSGRSNLSRLAMQNIIKHLKDGCQSHLAIQRAGYDTKEIYQGKNTTLPPLKLSDFSQDGDETFEKYGINSKIAQRALSQSIRLVNALIKKYGSPTYIRIELAREFAKTEKEREKIKNTNKRNREKNREYEEVISQTFKDNHKFPPSRIGHIIRKLTLRDQQNCKDIYSGDDIDITTLILDESAYEIDHIIPRSKRFINDMNNLVLTSAKNNREKSNRLPLAYISDPVKQKEFLKRVKLIKDKQKRKNLLLDSCEDQDNMTEQALNDTKHIARFFKNYIQQNLSFAGDDEEDGRQRVFAIPGPVTAYLRARWGFKPKDRDANSLHHAIDACIIVATTPKLLNRVMYHESHREQGKLFCERQAAEQDTGDFGMQAYLRAKKMYHDSIDKTSGEIVDAHKHSAAYKIIQKHEQRYRYSFPRPWTDFMREVSLRASDLDKKALQNKLVEINNYDDEFRRTLHPIFISHMRYGKMRGSGHGEQIYKKPYKGDDRIIQHKSIYEISPADIENSPIIVSDRKLYELLKHTFQSVELKKNQKEKDRRIDESIIIRKPSKNPDKSPIVKRIPVYMSDKPISHDIRGGAILNGKGTVAYSILCQYTTTSHYKVVPVYFRQIHANENIELGEGWKYISRMVPNDFVVITKKDGGKISGYYKTRKNDTRISILPHQYSDSNKAIFPSISTAKEIRVYNISILGDNAPDEEYR

SEQ ID NO: 5348 - protein, 1637 aa, synthetic construct
  REGION 1..1637: note = Synthetic
LCRLRDGVLLFVLSLRYSADLFSSSCSRVFSPAPPFLIVPFGGILAAVISVAIYQRSGLYSISITIYPLITSLKFKKAFNFLHISKKSSNFAQNCHKQEIIDIMKKKILGLDLGTNSIGWAVVNEEDTKKSISHAGSRIIPMDAKLMGDFESGNSVSQTATRTAARGARRLYERHALRRERLNRVLTILGFLPEHYTCELNRYGQLNQGAEPKLAWEMVDGKYSFLFKDSFLEMVHEFAQVHPELLVNGRNIAYDWTIYYLRKKALTQAITKQELAWILHQFNQKRGYNQARGEEDEQKENKRQEFITQKVISVRDTSEKSKGKSVYEVCLENGWIFTKESKYPLDWEGKTKHFIVSTTLNSDGTDAIDKDGKIRRTFRAPADDDWGLLKLKTQHDIDVSHKTVGEFIYDALLQNPDQKIIGQLVRVVDRKYYKDELKRILDTQKQFIPELQNKELYAECIKALYPQNEAYRNSIAGKDFTYLLLNDIIFYQRPLKSKKSLINECPYEYHVFKEKDGKWQKQYLKCISKSHPIYEEFRLWQFVENLHIYREAANGIGKEDCTAELIANKADLISWLLTQKEVSEKSLLTQLVGKNKIKGLSWNYVSEKDKKYPAAPVSSTIIGTIKEAGGDINTLTDPFEIRKNKHHRKLSGKEQDEKAKKNNRIINNLEQIWHMLYSISDKSQLLAALKHYAETNHLSDVFVEKLGKMKPFSDYGAYSEKATRKLLNLMRCGEYWSEEAIDANTKSRIEHIRTGEVDDAISERVREKLEAMNKIKDFQGLPLWLAEYVVYDVRKNDTKWETPEDIDKYLQSFRLHSLNNPIVEQVVMESLRTVRDIWKQEGQIDEIHIELGRDLKQNAEQRKKTQQRQQENEKANLRAKLLLQEFMNPDMEIEGVHAYSPSQQELFRIYEDGVLSANKPDDETQRIINDLSSLKQPSAQDIKKYRLWLDQKYISPYTGEIIPLAKLFTPAYQIEHVIPQSRFFDDSMSNKVICEAEVNARKERMLGHEFIVKCGGEKITLSGGKVVTILSQEAYEDTIRKNFAGAPRKQEKLMLDDIPEKFVARQMNDSRYISRLMMQLLSNIVREKISNTEYEPEAVSKNLIVCNGATTTRLKKDWGINDVWNKIILPRFERLNRLQNTTVFTAKTANGHIIPNMPLELRQGFEKKRIDHRHHAMDAIIIAFTTRNHVALLSNESALDKDDKARYDLQTLLRKREVWRSADGKEHYKFTDFIAPYDGFQKDVQDTLENIIVSFKQNLRVINKSNNRSVRFVDGKKQMVRQTEGDNWSIRKSLHKATVFGEVNLRKKKYVNLTYALKHVEDIAEKDLRTKLRELLQEGKDEKQIKKYFASEPDVWADVNLKRIEVFYYTKDTNDHYYAVRTALDDSFTADYIRNKVTSEAIQKILLAHLARCNNDPKLAFSPDGIEQMNANILQLNNGVPHKPIYKVRTCEKAEKFAVGQIGAKSKKFVEADKGTNLFFAVYSTKTEEGSDKRSFVTVPFKVAVDCQKRGKKEWRTLLDEWAHSESIVAENAKLQFILSPGDLVYVPTAEEIHSGNIRLDKSRIYKFVSSSGNQVFFLLEYVSAPIINITMERNGEKKTISEYSTLNKMERAITGEMIKEICLPINVDRLGNIIEP

SEQ ID NO: 5349 - protein, 1630 aa, synthetic construct
  REGION 1..1630: note = Synthetic
MKKILGLDLGTNSIGWALIENDFDKKEGKILGLGSRIIPMDAAIMGEFDKGNSVSQTATRTDYRGTRRLRERNLLRRERLHRVLNIFGFLPEHYANQIDFEKRLGQFLNETEPKIAWNKVWNKQKNKNDFEFIFQNSFNEMVEDFKSNGQDIKIPYDWTIYYLRKKALSRKIEKEELAWLLLNFNQKRGYYQLRGEEEEENQNKLVEFHSLKIIDVKADVAYKMMLSNGMEYRYETNNNLFEWKDTERKFVVTTYLNFDETPKKEIDGTNKRSIYMLKENETAAIKKKKDVSVEICDLKIVDVQEDTEKKKDDVWYSLILENGWIYRRSSKTSLFDWKNKVRDFIVTTDLNDDKTVKTDKEGTEKRSFRAPSEDDWTLLKKKTENDLDKYIEKYEEKNKIKGTVGAYIYETLLQNPTQKIRGKLVRTIERKFYKDELKAIVKKQIELQPELFTEDLYNDCIRELYRNNEAHQTILSKRNSFEHLFVDDIIFYQRPLRSQKSSIGNCTLEFRKYKDKDGKEIKEYLKGIPKSNPLYQEFRIWQWLYNLKIYSREDDKDVTADFLKSTDDYTNLFDFLMNRKEIDNKALITYFLNLQGIKGKNADKELKKYRWNYVFDNSKDKEEDKSKKYPCNKTRAQFVSRLAKVENLPLDFLTPEIEQKLWHIIYSVTDKNEYEKALKTFAVKHNLHEVSFVDNFKKLLFEEKDYGSFSEKAIKKLLPLMRLGKYWKWENITFETQGRIEKIITGEYDETIKERVREKAIKLSSENDFQGLQLWLAQYIVYGRHSETENADQWKMSYDIQDYLDEFKQHSLRNPIVEQIITETLRVVKDIWEQYASENNVECIEIYDEKKKKNVKSYGKFFDEIHIELGREMKNTADDRAKITNQVSDNENTNLRIKAMLMEFAEDGYFNNENNENTVRPYSQNQQDILKIYEEDVLRRYSEQELKNEKTGLIEKDDKGKEKEITYYDISKKSQPTKTQIQKYKLWLEQKYCSPYTGKMISLSRLFTPDYEIEHIIPQSRYFDDSLSNKVICEAAVNKLKDRNLGLEFIKKHTGEKVECGMGVVIEIFTEESYKSFVQEHYKNNNAKQKKLLLEEIPDKMIERQLNDTRYISKFVSALLSNIVREEKDDDGVNSKNLISGNGKITTTLKQSWGLNNVWNELILPRFERMNELKGTDTFTSKNTEGHIIPTIPLEFSKGFQKKRIDHRHHAMDALTIACMTREHVQYLNNENAKSQKFHLQKGLAKTLRKYETIEKTIQKKDETGIWRIKKDETGKQITKQIEVPKEYFMPWNNFVEQAKSELEKIIVSFKQNLRVINKVKFAGLTYKESKEKSNNRNWGIRKPLHEETFSGIVQLPWVKVGKGEFTTATRKALDKSFNEDKIEKITDTGIQKILKNYLQSKKNNSELAFSPDGIEELNKNISQYNDGKFHQPILKVRVYEKGKGRFVLGNLGNKKSKYVQGAPNLFFAIYEYEEFDKKENKNVIKRSYETIPLNIVIERLKQGLNVVPETNEEGHKLCLECPFLSPNDLVYVPMEDEKENIRAIDWENLSKEQLQRLFVVNDFSGTCYFTPNRLAKNIVPKEVDLNFDTKKNKLSGSYDTKTASFEGKQIKDVCIKLNIDRLGNIKPAL

SEQ ID NO: 5350 - protein, 1620 aa, synthetic construct
  REGION 1..1620: note = Synthetic
MKKKILGLDLGTNSIGWALVEQDFDNETGKILGMGSRIIPMGADIIGDFGKGNSVSQTAERTFYRSVRRLRERNLLRRERLHRVLNVLGFLPIHYANDIDFEKHFGQFKQGKEPKLAWIKNKNNKFEFIFPELFNEMLAEFKKAQPDLFNRINLKGENVKIPYDWTIYYLRKKALEEKITKEQLAWLILNFNQKRGYYQLRGEDEEDTNDNKKEYVISLKIINVVKGEPDKKNNNKIWYSITFDNGWQHSFPFTSEPNWLNTEREFIVTEEYENGKIKILKDKKKDSVGREKRSLSILPSFEEINLLSKKEQDKIYKKIKARTELTISESKKTVGSYIYKTLLRTPNQKIRGKLIRTIERKYYRDELKAILEKQITLQPELFTADLYNACVRELYRSNKAHQIQLSKRDFVHLFLDDIIFYQRPLRSQKSSIGNCTLEFRSYKQKDDHGNEIKIKEYLKVIPKSNPYYQEFRVWQWLFNLKIYTRNDDIDVTETFLKTIEEKEKLFEFLMSKKEVNHSDILTFLLAPIIKDKYPAAKPKAFKDALIKEISKYRWNYVFDESQEKEDEKSKKYPMNETGYEIRKRLFKVENAPDDFLDIVDVKEIVDKKTTKKTTIELGTREYQLWHLIYSVNDPKEFEKALKAFAHKYQLNVTSFVEQFIKFPPFKSDFGTYSEKAIKKLLPLMRLGKYWNENKIIKDSSIYFKNIHQLIDKLQKKSDAITSNQKENWGKSINEKLYNELYRFLDADIANFQGLQLYLAQYLIYGRHSEAAETKQWSSVKDLEMFLKSFKQHSLRNPIVEQVITESLRVIKDIWTSYGNNSDNFFNEIHVELGREMKNTADDRATITKQISENENTNQRIKLLLTELRNDLTTENVREFSPSQMEILKIYEEGVLNLMKNKEYSEGEMAQKEEDEKMLKISTTAQPSKSDLTRYKLWLEQKYRSPYTGEIIPLSKLFTPDYEIEHIIPQSRYFDDSLSNKVICESVVNKNPYKDNQLGLEFIKAQGGRIVNELSSNGKIVKIFTESEYRDYVNEYYAKNNTKRNKLLMDEIPDKMIARQMNDTRYISKYISHILSNIVRDENNDDGINSKNVIPGNGRITDSLKQDWGLNNVWNQLILPRFERMNQLTNSKSFTTTNKEGHTIPTIPLEYSKGFQKKRIDHRHHAMDALVVACMTRDHVNLINNQFAKSENTRYDLQNKLRIKEKWVDNTGKARDKFTSFKKPWDNFAKDAKTELEKIIVSFKQNLRVINKATNSYEKIDNGKKVEVKQKGTNWAIRKPLHKETVSGKVELPRIKTPKGKILTATRKAINTSFDLRTIESITDLGIQEILKNYLASKNNNPEVAFSPEGIEEMNKNIAKYNNGKFHQPINKVRIFEVGSKFPLGQTGNKAKKFVEAAKGTNLFFGVYTDESGKRSYSSIPLNEVIERQKQGLNPVPEFNEEGHSLLFHLSPNDLVYVPEEGESASQVNFGENEIKNFNNLFKIVSFTGSRLSAIPVNVASTIVNKIEYTQLNKIELTKEKESMIKIYCDRLGYISLIQKGNYLNTKQGEKVSEPNSVYEKKKWTLKIFNSFEEVENDQLTYFASLTPEELLNNLKKLTKSAFGISDEQSLNNPDRKIKFR

SEQ ID NO: 5351 - protein, 1619 aa, synthetic construct
  REGION 1..1619: note = Synthetic
MKKILGLDLGTNSIGWAVVNAEEQIREDGSTYLKPNGISAAGSRIIPMSADILGDFEKGNSISQTAERTRMRMARRLHERAILRRERLLRTLNLMGFLPKHFLTKIDRYGKFTDDSEPKLAWYKNLEGKSEFFFQDAFNEMLENFKEKQPEFVSINEKGKQRKIPYDWTIYYLRKKALEKPITKEELSWLLLQFNQKRGYYQLRGEEEDEKKDKQVEYRALKVIKVEATNEKKGDETWYNVYLDDNMVYRRTSKIPLDWEGKIKEFIITTELESDGETPKKDKDGKIRRFFRAPKEDDWTLLKKKTEADIDACKKTVGCYIYDSLLNNPKQKIIGKLVRTVERKFYKDELTKILKKQVEFIPELQNESLYKKCIEELYPINEAHRNNIAKPDFVNFFINDILFYQRPLKSKNSLIDNCPYEERVYIDSKTGEKKKVPVKCIAKSNPWFQEFRLWQFVQNIRIYQREREDGGKLLTDVDITNECLKSEDDYVKLFEWLNDKETINQDELLKHLFNTKKSKNKEIPYRWNYVEDKDYPCNETRAAILKGLSKCGIDSSILSPEMENALWHILYSIEDKTEITKALKKFAEKYRLDDCFVNVFSKIKPFDKEYGSYSEKAIKKLLPLMRMGKFWNRNNIDANTLDRIDKIVNGVYDQKISNRVRDNAVNLKELDQFRGLPVWLACYIVYNRHSEAKECTKWKKPEDIDEYLKSFKQHSLRNPIVEQVVTETLRTVRDIWKQEGQIDEIHLELGRDLKNSADKRKKMSENILKNENANLRIKAMLMEFKNPDMGIENVRPHSPSQQDILRIYEEYALNSSEKYDESKGEFVPDTEEIPDYVTKVVLGLGCMDKKKQPSRKEIEKYKCWLEQRYRSPYTGKMIPLAKLFTTAYEIEHIIPQSRYFDDSFSNKVICEAEVNKLKDRQLGYEFIAEHHGEKVQLSQGGVVEIFSVDAYEKFVKENYATNRIKMKKLLMENIPDEFIERQLNDSRYISRVVKGLLSNIVREKIDDENYEQEVTSKNLISCIGSVTDRLKKDWGMNDVWNSIILPRFIRMNNLTKKISNIELANEFKRLFESELLNVARAERLDISVSYLDFYKTLNPKLQKNVIDNIMNQLPITDSFLSVNNEGHVIPNMPLELQKGFNKKRIDHRHHAMDAIVVACTTRDHVNLLNNESAHSKYNANRYQLQRKLRRFEKTIIDGKERNVAKEFLKPWDSFSSDSKKVLENIIVSFKQNLRVINKTTNAYQHFDHDSKKTFVKQEKGDSWAIRKPMHKDTVFGEINLRKTKSVSLSEAIKIPDRVLNKKIKEKILELKNNKIDAKNIKKYIEDYHIGGYGINTSKIDVFYFTKETKERFFATRKTLDTSFNQAKIEDSIADSGIKKILLAHLKRKKGDAEQAFSPDGIDEMNKNIVELNNGKFHQPILKVRVYEKADKFAVGQKGNKPKKFVEAAKGTNLFFAFFEKDGKRSYLTIPLNVMIDCQKRYGNQWKNSIEFYLKDSGLVENDVKLLFILSPNDLVYLPTAEELNDGIKSVNKERLYKFIDPNSDKGNFVPYSSANVIFSINFSDQKKRGVSYPIQDEFGVGSQASKNPRAITGEMIKETCIPIKVDRLGNIIEFNGLRL

SEQ ID NO: 5352 - protein, 1591 aa, synthetic construct
  REGION 1..1591: note = Synthetic
MSKKILGLDLGTNSIGWCLIDQDFENNSGKIEGMGSRIIPMSQDILSEFGKGNSVSQTAERTRYRSARRLHERQLLRRERLHRVLNILGFLPKHYANDIDFESRLGKFKNEAEPKLAWFKNAENKFEFLFQTAFSEMLSDFRKNQPELLNRKNRKGEDVKVPYDWTIYYLRKKALTEKISKEELGWLILNFNQKRGYYQLRGEVEENNTDVNEYVMLLKAVKVEKGEVDKKNDKRTWYSITFDNSWVYNATFTSEPKWLDTEKEFLITEELDESGNIKIVKDKKSDTHGKEKRKITPLPSFDEIDLMSKKDQDKIYKKIKARTELSIQNSDKTVGAFIYDTLLKSPSQKIRGKLIRTIERNFYKDELKAILKAQITLQPELFTSDLYNDCVRELYKNNESHQMQLFIRDFLHLFLDDIIFYQRPLRSQKSTIGNCPLESRPLRNEKGQPKLDSNGNQIWKLFKVIPKSNPYYQEFRVWKWLSDLRIWSIEDGNDVTAKFLGEAGAYDKLFDFLMSKKEVNHLDILDFFIRPVIKDNYPNAKPKILNEEIKREIAKYRWNYVFDEDKNESKEYPCNETGFEISRRFEKVNNVPTGFLTKEIEYKLWHIIYSVTDKNEFKQSLKSFAKKYKLDELSFVENFIKFPPFTSDFGPYSEKAIKKLLPLLRSGKYWEWGLIDTKSRERIGKLITGEFDEDIKIRVREKVINKKLETEKDFQALPEWLAKYIVYNRHSEADIAGKWNSVSDLKAYLNDFKQHSLRNPIVEQVITETLRVVGDIWTHYGSGRKDFFDEIHIELGREMKNTAEERKRITSTVVDNENTNQRIKLLLMELNNDKAIEEVRPYSPSQLELLKIYEDGILSNYSEQDLKNEKTGLKKENKEITIYDISKTAKPTQTELIRYKLWLEQKYRSPYTGEVIPLSKLFTTAYEIEHIIPQSRYFDDSFSNKVICEAAVNRLKNNQLGLEFIKNHYGERIQIGSKYVTIFTEEAYKKFADDHYAKNKAKRGKLLLEEIPDKMIARQMNDTRYISKFISQVLSNIVRKDNNDEGINSKNVIPCNGKITDRLKQDWGLNDVWNELILPRFQRMNELTKTTVFTATNKEGHTIPVIPFELSKGFQKKRIDHRHHALDALVIASATRNHINLLNNQSAKSDNTRFDLQYKLRNTEKWKDEAGNERIRFTEFKKPWPNFTIDAQEKLENVVVSFKQNLRVINKATNTYIKFENGKKVEKKQEGVNWAVRKPLHKAFVFGKTSLQWIKVPKGKICVAIRRSLTPSIDIYKITDTGIQKILKAHLLAKDNNSELAFSPEGIDELNKNILSYTGGKYHQPIYKVRTFEIGSRFPLGQIANKKNKYVETADGTNLFFAIYWNTQKQIRNFETIPLNIVIERLKQGLSPVPEINGKGDSLLFYLSPNDLVYVPTEDELADSLSIDFEKFTNENRGRFYNVNDFSSTCYFTPNSIAKAIAPKEVDLEFDENKNKLTGSFDTKTASLNQRQIKDVCIKLNIDRLGNISPVKKKPGSSSTTQQHMLAEPGQRYKKGSLKIFSSFEAAEEANAEAMALLSPEQHLQNVTSRIMTIYEAEMKMPMNKKIKFRN

SEQ ID NO: 5353 - protein, 1588 aa, synthetic construct
  REGION 1..1588: note = Synthetic
MKKILGLDLGTNSIGWALIHPEFKDKKGEILGMGSRIIPMTQDRKDEFGKGNSISQTADRTGFRGTRRLRERYLLRRERLHRILNVLGFLPEHYANQIDFKKRLGKFSEEKEPKIAYKEVWNQETEKKEFNFVFKDSFEEMLRDFREDQPQLLENSKKIPFDWTIYYLRKKALTQKISKEELAWIILNFNQKRGYYQLRGEEDEYSTNVNEFVIQLKIVQIDKGDRDKKNDKKYWFNMTLENGWVYSATFSTEPQWLNTEKEFLIIEEIDDEGNIKIVKDKRKDVDGREKRRITPLPTFEEIDLMSKKDQDKIYKKIKAKTEITITNSGKTVGTYIYNTLLKKPNQKINGKLIRTIERKFYKEELKTILEYQLKEHPELQNTDLFSDCIRELYRNNEAHQTTLSKKDFVHLFLNDIIFYQRPLKSQKSSIGNCSLEYRKFKDADGNEKTEYLKVISKSNPIYQEFRIWQWLYNLKIYRKEDDTDVTEQFIKSTKDLENLFEFLMTQKEVNHKDILNYFISIIMKEKFPNAKPKILKDEIEKEIAKYRWNYVFDDSKEKEDEKSKRYPCNETGYEIRRRLAKVENIPDGFLTSEIEQQLWHIIYSVTDIKQYETTIENFINRYNEKHQKNINEEGFKKEFIKFPPFKSEYGSFSEKAIKKLLPLLRLGKYWSWNTIDVKTKERITKIITGEYDEKLKTRVREKAIHLTTENDFQGLQLWLAQYVIYDRHSEASIAGKWNSVADLENYLEGFKQHSLRNPIVEQVITETLRVVKDIWNKYGNGAKDFFDEIHIELGREMKNTADDRKRLTNMVSDNEATNLRIKSLLIELKDNSDGKLQVEEVRPFSPPQQEILKIYEDGVLNSNVEIPEDILKISKTAQPSKSELQRYKLWLEQKYRSPYTGQLIPMSKLFTHEYEIEHIIPQSRFFDDSFSNKVICESAVNKLKDKQLGLEFIKNHQGTILETGFGKNIEIFSEETYKEFIKEHYGKNRSKKNKLLLEEIPDKMVERQLNDTRYISKFISNVLSNIVRADNNDDGVNSKNILPGNGKITSDLKQDWGLNDVWNELILPRFERMNQLTNSKTFTTWNKNHQKFLPTIPLEFSKGFQKKRIDHRHHAMDALVIACATRDHINFMNNEYATRKGKSKEEKQNIRYDLRSNLCFKKYNEGSDKNYKWIFNKPWDNFTKDTKDELDKIVISFKQNLRVINKTTNKYESYKDENSNLRIGKDGKPKKDFVTQTKGDSWAIRKPIHKDTVSGLVSLRKKKEVSLSVALDNYNEIVDKDLRKEILSLVKLKYDKKLLVKFFKDSQNKWNNKDISRIETYYWENDNVASRVSLDTSFNEKRIVETITDTGIQKILLAHLKNHKNRFDEKGKEIAPETLAFTPEGIDEMNKNIVELNNGKSHQPILKVRTYEPKGNKFKVGQTGNKKDKFVEAAKGTNLFFAIYQDENGKKSYETIPLNIIIERQKQGLDSVPETNDKGNSLLFYLSPNDLVYVPTEDEKENINRIDFENLNKEQFKRIYKVEKTSGVECYFIRQDIAYLIKQYDAKTKIGELESQNKLQTTMSNDRLKISESCIKLKINRLGSISKA

SEQ ID NO: 5354 - protein, 1581 aa, synthetic construct
  REGION 1..1581: note = Synthetic
MDYYKYRNKILFQMEMISSTRGKYLGCFLFLYSLERFFLHMSKKCSTFAVAKVNNEYSMKKHILGLDLGTNSIGWAVVAEEGSQKRISCAGSRIIPMDAKIMGDFESGNSISQTKDRTQARGIRRLYERHALRRERLNRVLTILGFLPDHYTKELNRYGQLNKGAEPKLAWDIVEGKYSFLFKDSFLEMVNDFGNVHPELLVNGRNIAYDWTIYYLRKKALTQPITKQELAWILHQFNQKRGYNQARGEEEEQKENKRQEFITQKVISVRDTGEKSKGKSVYEVCLENGWIFTKESKYPLDWEGKTKNFIVSTTLNSDGTDAIDKDGKIRRTFRAPADDDWGLLKLKTQHDIDASHKTVGEFIYDALLQNPDQKIIGQLVRVVDRKYYKDELKRILDTQKQFIPELRNGDLYNECIHALYPQNEAYRNSIAGKDFTYLLLNDIIFYQRPLKSKKSLINECPYEYHVYKDKDGKWQRQYLKCISKSHPIYEEFRLWQFVENLHIYREAANGIGKEDCTAEYINNKSELISWLLTKKEVTEDSLLTHVAGKQKKGLSWNYVSEKGKTYPASPVSSTIIATIKEAGGDISTLVDPFEIRKNKHHRKLSAKKQDEKAKENNRIINNLEQIWHMLYSISDKSQLLAALKHYAETNHLSDVFVEKLGKMKPFSDYGAYSEKATRKLLNLMRSGEYWSEDAIDAQTKSRIEHIRTGEVDDSVSERVREKLDTMNEVKDFQGLPLWLAEYVAYDVRKNDTKWEKPEDIDKYLQSFRLHSLNNPIVEQVVMESLRTVRDIWKQEGQIDEIHIELGRDLKQNAEQRKKTMQRQQENEKANLRAKLLLQEFMNPEMDVEGVHAYSPSQQELFRIYEDGVLSANKPDDDTQRIINELSSLKQPSLQDIKKYRLWLDQKYVSPYTGEIIPLAKLFTPAFQIEHVIPQSRFFDDSMSNKVICEAEVNARKDRMLGHEFIAQCGGEKITLSGGKVVQVLSLQAYEDTIKKNFAGDPRKQEKLMLDEIPEKFVARQMNDSRYISRLMMQLLSNIVREKISNTEYEPETVSKNLIVCNGATTTRLKKDWGINDVWNKIILPRFERLNRIQNTTVFTAKTANGHIIPNVPLELKQGFEKKRIDHRHHAMDAIVIAFTTRNHVALLSNESALDKDEKARYDLQTLLRKREVWRSADGKEHYKFTDFIAPYDGFQKDVQETLKNIVVSFKQNLRVINKSNNRTVRYVDGKKQMVRQTKGDNWSIRKSLHKATVFGEVNLRKKRYVNLTYALQHIDDIAEKDLRAKLRELLQEGKNEKQIKQYFASELDVWSDVNLKRIEVYYYTKDTNEHYYAVRTALDESFTEDYIRNKVTSEAIQKILLAHLERCYNDPKLAFSPDGIEKMNADIQTLNNGVPHKPIFKVRTYEKAEKFAVGQIGAKSKKFVEADKGTKLFTFVYEKTNQDGTKSRKLIALSLLNVILSQKQEGKQWIKYIDESLRRNGDVANDMQFSFVMSPGDLVYVPSQNEIENKNWSYDHSRIYKVVSLDGENPNFIPANIASMIIDGTEFTRHNKTSRDIEGRLIKEICVPIKVDRLGNIIKHD

SEQ ID NO: 5355 - protein, 1574 aa, synthetic construct
  REGION 1..1574: note = Synthetic
MKKILGLDLGTNSIGWAVVNADEATRKDNTKYLKPNSISCAGSRIIPISADILGDFDKGNSISQTAERTRLRMMRRLLERNHLRRERLLRVLKVMDFLPEHYNSKISRYGKFIDDSEPKLPWRKSKDGKMEFLFQESFDEMLAEFKQHHPQLLANGKKVPYDWTIYYLRKKALTQRITKEELAWILLQFNQKRGYYQLRGEEEEEKANETIEIISAKILSVEKKEKDKKYEKYWYEMHLENGMTYRATFYNDVTSWEGETKDFVLKRTTLKDGTPKNELSFLPTPEEIDLMDAQRKAKMYAKIKLRTEKEIENSHKTVGSYIYDSLLQNPNQKIIGKLVRTVERKFYKDELKKILEVQQELIPELKDEALYQRCIEELYAANEAHRRSLSKPDYVNLFLNDILFYQRPLKSKKSLIDDCPYEYHVSKDGEQHPIKCIAKSNPYFQEFRLWQFVQNLRIYQRERTVTDGQLDLFTNTTTNKLQTDVDVTSEILKTEEDYVKLFNWLNDRSSIKQDTLLSSYFKAKKEKGKDKYPYRWNYVEDKDYPCNETRATILSGLAKCNISADFLTHENEMSLWHILYSIEDKAELYKALKKFAHRHQLEENFPEVLSKTKPFKKDYGSYSEKAIKKLLPLMRMGNYWNEEQIDAKTRERIEKIIDGEYDENIKNRVREKAISLTDIQHFRGLPVWLACYIVYDRHSEAKVVEKWEKPEDIDYYLKNFKQHSLRNPIVEQVITETLRTVRDIWKQEGQIDEIHVELGREMKNPADKRRQMTERIQQNENTNLRIKAMLMEFMNPDMGIENVRPHSPSQQDILRIYEENALDNLSKEDKDYDFVSKISKVAQPSKSDIIRYKCWLEQKYQSPYTGKMIPLSKLFTPAYEIEHVIPQSRYFDDSFSNKVICEAEVNKLKDRQLGFEFIKNHAGEIVQLSQGGTVTIMSVEAYERFVKDYYSNNRTKMKKLLMDDIPDGFIERQMNDSRYISKVVKGLLSNIVREKQEDGEYQSSREYEQEAVSKNVISCTGSITDRLKKDWGMNDVWNNIVLPRFKRLNEVTGKDCFTTYSREGHEIPNMPLELQKGFNKKRIDHRHHAMDAIVIACATRDHVNLLNNEAAHSKHNVNRYQLQHKLRRFATIKINGKEREIAQEFLKPWESFTTDAWQVLSNIIVSFKQNLRIINKTTNRYQHCEDGGKKGFEKQHKGESWAVRKSMHKDTVFGEVNLRLKKTVSLNEAIKKPENIVNKEFKKKVIELLDHGRDAKFIKKYIDDNKDVWSDINPAKIEIFYFSKDEKKRNGEPKERYFATRKSLDTTFDEKKIKESVTDTGIQKILLAHLTTKENNPEQAFSPDGIEEMNRNITALNNGKFHQPILKVRVYEKADKFAVGQTGNKTKKFVEAAKGTNLFFAFFGTEKEIKSNGRKEIVRSFMTIPLNVMIDCQKKYGIQWRNNIEDYLRGKDMIDADAKLLFILSPNDLVYLPRENDRKEDIMPLDKQRIYKFIDPAQDKGNFVQYSVAKAIFSAKFTDQKKQGISYPIQDEFGLGSQQTKSPRAITGEMIKETCIPIKVDRLGNVIEINGSPL

SEQ ID NO: 5356 - protein, 1574 aa, synthetic construct
  REGION 1..1574: note = Synthetic
MKKILGLDLGTNSIGWAVVNANEETRENGTKFLKPVGINAAGSRIIPMSQDILGSFDAGNSISQTAERTRLRMMRRLRERNLLRRERLLRTLKTMGFLPEHFARQINQYGKFIDDSEPKLAWKKKEDGSSEFLFLDSFKEMLADFAINQPQLVNDDKKVPYDWTIYFLRKKALTERITKEELAWILLQFNQKRGYYQLRGEEEEEKENESVEIISAKILSVEKKEKDKKYEKYWYEMTLGNGMTYRASFSNDVSSWQGDTRDFVLKTTILKDGSAKNELSFLPTTDEIERMDSQRKAKMYAKIKLRTEKEIINSKKTVGSYIYDTLLQKPDQKIIGKLVRTIERKFYKDELILILNKQQEFIPELRDTELYQRCIEDLYPSNEAHRKNIAKPDFVNLFVNDILFYQRPLKSKKSLIDNCPYEYHSDKDGNIYPIKCIAKSNPLFQEFRLWQFVQNLRIYQRERIVNNGQLDLFSTTPKGKLQTDVDVTAELLKNEDDYVRLFEWLNDRNSIKQDTLLNSYFKIKKEKGKDKYPFRWNYVEDKEYPCNETRATLLSGLGKCGANSDFLTHEKEMALWHILYSVEDKTEIGKALQTFANKNSLEEGFVEVFCKIKPFKKEYGSYSEKAIKKLLPLIRMGKYWKAESIDCKTSDRIEKIITGEYDESIKNRVREKAINLKDISYFRGLPIWLACYIVYDRHSESKEIEKWNTPEDIDRYLVNFKQHSLRNPIVEQIVTETLRTVRDIWKQEGSIDEIHVELGREMKLPADKRKKKTEQILQNENTNLRIKAMLIEFMNSDVENVRPFSPSQQEILRIYEENALDNLTKEDAEYEFVTKMSKTAQPSKSDIIRYRCWLEQKYRSPYTGEMIPLSKLFTPAYEIEHIIPQSRYFDDSLSNKVICEAEVNKLKDRQLGYEFIKNHAGQIVQLTQGETVKIQTIDAYERFVKDHYNTNGIKMKKLLMEDIPDDFIERQMNDSRYISKFIKGVLSNIVREKLENGEYEQEAVSKNLISCNGTITTYLKRDWGMENVWNSIILPRFLRLNQLTGKDCFTKRNNEGHIIPVVPFELQKGFNKKRIDHRHHAMDAIVIACTTRDHVNLLNNEAAHSKHNANRYQLQRKLRRFDKIVINGKEREIAKEFLKPWDTFTTDAKQTLENIIVSFKQNLRVINKTTNSYQHFDEDGKKEFTKQEKGCSWAIRKSMHKDTVFGEVNLRMPRFINGEIVEGRKKTVSLQEAINNPDAIINKDFKKKVKELLENGHDVKYIKKYVEENKDIWSDIDSKKIEVYYFSKDEKKRNGEPKERYFATRKPLDTSFDQKRIKESITDTGIQKILLAHLESKGNNPDQAFSPDGIEEMNRNIIALNNGKFHQPIQKVRVYEKADKFAVGKTGNKGKKFVEAAKGTNLFFAILGTEKENMETDQTVVVRSYFTIPFNIMVDCQKEYGSTWKNNLESYLKDKDLIAPDCKVLFILSPNDLVYLPKKEEDDCTIDKNRIYKFIDPNLNKGNFVPYSAADVIFSINFVDQKKRGLSFPIQNEFGIGSQWSKNPRALTGEMIKETCVPIKVDRLGNIIEYNKIS

SEQ ID NO: 5357 - protein, 1572 aa, synthetic construct
  REGION 1..1572: note = Synthetic
MKKILGLDLGTNSIGWAVVNAEEIARENATTYLKPFNISSTGSRIIPMSADILGDFDKGNSISQTAERTRLRMVRRLRERTLLRRERLLRTLNVLGFLPKHFASHIDQYGKFIDDSEPKLPWLKNAEGKMEFLFMDSYHDMLADFALHQPQLIADGKKVPYDWVVYYLRKKALTQRISKEELSWLLLQFNQKRGYYQLRGEEDEEKSNETIEIINAKILSVEKKEKDKKYEKFWYEMNLDNGMVYRATFYNDVSEWSGESKDFVLKTTVLKDGSTKKELSFLPTTDEIERMNPQRKAKLYAKIKLRTEKDILNSHKTVGSYIYDALLQKPSQKIIGKLVRTIERKFYKDELIKILEKQQELIPELRNEALYEKCTEQLYLTNEAHRNTISKPDFVNLFVNDILFYQRPLKSKKSLIDNCPYEFHKDKNGNIYPIKCIAKSNPLFQEFRLWQFVQNLRIYQRERIVSDGQLDLFNSTPTGKLQTDVDVTAELLKTEDDYVKLFEWLNNRGSIKQDILLNSYFKIKKEKGKDKYPFRWNYVEDKEYPCNETRFTILSGLGKCGISPDFLTHEKELALWHILYSVEDKIEIGKATKSFAAKNNLGEGFAEVFSKLKPFKKEYGSYSEKAIRKLLPLMRMGNYWKEDDIDAKTRERIEKIITGEYDKAIKNRVREKALRLTETSHFKGLPVWLACYVVYDRHSEAKEIEKWEKPEDIDRYLSGFKQHSLRNPIVEQVIMETLRTVRDIWKKEGQISEIHVELGREMKNPADKRRQMTERIQQNENTNLRIKAMLMEFANPEMHIENVRPFSPSQQDILRIYEENALENLTKEDEQYEFVTRVSKMAQPSKSDIIRYKCWLEQKYQSPYTGNFIPLSRLFTKDYEIEHIIPRARYFDDSFSNKVICESEVNSLKDRQLGYEFIKNNPGRIVPLSQGGTVRIQTVEAYEKFVRDHYATNRTKMKKLLMEDIPDDFIERQMNDSRYISKVVKSLLSNIVRAKQENGEYEQEAVSKNLISCNGTITDRLKKDWGMNDVWNSIILPRFLRLNQLTGKDCFTTKNREGHVIPNMPLELQKGFNKKRIDHRHHAMDAIVIACATRDHVNLLNNEAAHSKHNANRYQLQKKLRRFEKAINGYGKEIEVAKEFIMPWPSFTTDARQVLQNIIVSFKQNLRVINKTTNFYQHYDSKGKKIFRKQTDGDSWAVRKSMHKDTIFGEVNLRKKKAVSLNEAIKRPNSIVNKDFKKKVIELLKEGRDAKFIKKYVDENKEVWSDINTAKIEVYYFTKDEKKRNGEPKEHYFATRKSLDNSFDQKKIKDSVTDTGIQKILLAHLEAKDNNPEQAFSPDGIEEMNRNIIALNKGKFHQPILKVRVYEKADKFAVGQTGNKTKKFVEAAKGTNLFWGILGSESINKETGKTEIVRSYLTIPLNVMIECQKKFGSKWQKNLEAYLQEKNLISTEQKILFTLSPNDLVYLPTKEEAHNKISIIDRNRIYKYIDPGMNTGNFIPFAVAKTIFSMKFSDQKKLEIEIPIQDEYGLGSQGSKSPRAVTGEMIKETCISIKVDRLGNVVELNGVKLLSE

SEQ ID NO: 5358 - protein, 1567 aa, synthetic construct
  REGION 1..1567: note = Synthetic
MKKILGLDLGTNSIGWALIEKNLKKETGEIKAVGTRIIPMSQDVLGKFDSGVSISQTAERTSYRSVRRLTQRNKLRRERLHRVLHQLNLLPRHYDDAIDFQNKLGQFKESTEVKLNYNFNAKGGYEFLFKDAFNEMIEDFKKDNPQLFYLKNNGKETKIPYDWTLYYLRKKALSHKITKEELSWLILNFNQKRGYYQLRGEDDGTDDKTKLKEFKVLKVKEIINSGEKVKGKVLYNVIFENDWLYDRQIVDTIEWENKTKEFIVTTALDAEGNPKIDKEGVFKRSFKKVDSEHDWIAIKSKTEQDIRAANKTVGEFIYETLLKNPTQKIRGSLVKTIERKFYREEFEKIITEQIKHHPEIDINTIIGKENILKCVSELYPRNEAHANNIINKDFNYLFTQDIIFYQRPLKSKKSEIANCQYEIRAFKKVNNKTGAVTKEKQPLKTIAKSHPLFQEFRLWQFLHNLKILIKKTTVDEKIQLDVDVTDTLLTSENDWAALFQYLNTKKELEQKSIIEHLISQKLILKSEKENYRWNYVEDKKYPGNETRVNFSNRLKKVKNLKVEEFLTSEIEFKLWHIIYSVTDKNEYEKALESFAINQNIDKESFVANFKKHPPFKSDYGAYSSKAIKKLLPLMRLGEFWNESNVPVTVLDKIIDIKDRLTSINYDENVFKKDENNLLKTIVDDVIPKQLLKSFIHLEGKNHLAGLNTYQACYLVYERHSESSAITQWKKPDDIVTFLNHFKQHSLRNPIVEQVVTETLRTVRDIWEYHGNSESNYFDEIHIELGREMKNPAGKREEISKRNTQNENNNQRIKGVLKELMTDGVKNIKPYSPSQQEILKIYDEGVSHNPDVSYAAISEDDILKIRKNSNPTPSEINKYKLWLEQGYVSPYTGIVIPLSDLFTTAYQIEHIIPQSRYFDNSLSNKVICESDINEDKSNKTAYEYIAEKGGSIVNGIKVLELEVYERQCQHYFKKNRTKLKNLLSEDIPEGFINRQLNDSRYISKLIKGLLSNIVREDKEQEAMSKNIVPVTGIITSKLKHDWGLNDKWNEIITPRFKRLNEMTNSEDFGSFDKKINTFRVQVPEAISRGFNKKRIDHRHHTLDALVIACCTKEHINYLTSLNTERKNYGLRDRLLIVNKNGHYTKHFKMPWNNFSVDCKKAIEYTIVSFKQNLRVINKTTNKYQSYNDENGNLRLGKDGKPKKDFIRQVKGDSWAVRKPMHKDTVSGQVTVKRIKKGLTNISNYLLDWHLIVDKEIKKQVKKNATTYKCDLKLIKKHLKDNPITIDSSPVTKIKVFEYTKNATATRVALSEKFTRKQLDAITDSGIQQILNNHLLNYLDEKDKETFDLAFNTDGLEQLNKNIIELNNGKKHQPIYKVRLYEEGSKFSISENKASPKSKKMVEAAKGTNLFFSIYWNEDQQKRVYETIPFNIALEHQKQVAHLPKEEQTAVPTDATKGTFLFTLSPNDLVYIPSDEELNNPTLFDVNNLLINQTNRIYKMVSSTGSKCHFINSNVASLIKSYDSKTKIGEFGSLNKLEVTTDLSKPKRIKEHCWKLKIDRLGNIINVIH

SEQ ID NO: 5359 - protein, 1565 aa, synthetic construct
  REGION 1..1565: note = Synthetic
MKKILGLDLGTNSIGWALVKNDFDKKEGQILGIGSRIIPMSQDIMDKFGSGQSISQTADRTRYRGVRRLVERSLLRRERLHRVLNKLNFLPKHYSDSIDFDLRKGQFKDGIEVKLNYYPVAVEGKDKPEYKFLFTDSFLEMVGEFKAVHPELFYKKTKGEETKIPYDWTIYYLRKKALTEKITKEELSWILLNFNQKRGYYQLRGEEEEKTDDKTKEFVSLKVKEVVDSGEVIKKTGDKLYDVYFDNAWQYDRQITKTENWIGKTKEFIVTTSTTKRGDLKYTFKAVDSEKDWIAIKTKTEQDILKSEKTVGEFLFDTLLENPSQKLRGKLIKTIERKFYKEELKAIVAKQTEFHAELQDRALYLACTKELYSINESHSNSIKDKNFEYLLVEDILFYQRPLKSKKSSIANCPYEKKVFMKEGIRQEIALKCIPKSNPLFQEFRLWQFLKNLKIYQREIIGDNKIDVDVTHQFIKNEEDWVDLFEFMNNRKEVDQKAFLKKYKLNEKEYRWNNVEDRKYPCNETRAQFLSRLKKVNDIESVVFLSTEIEYELWHLIYSVKDKLEFEKALGTFANKKGLDEFSFVASFLKFPPFDSDYGAYSEKAIKKLLPLMRKGKYWSENAINDEVKDRISNIQERLESIDYDEEVFKEDKHNRLQTIVDDDIPKQLLKSFLAYGKNSQLKGLNTYQACYAIYQRHSEVGDILLWKSPVDIDLYLHKFKQHSLRNPIVEQVVTETLRVVRDIWQYHGGGKSQFFDEIHVELGRDMKNSSDKRKSIAANQSENENTNQRIKALLQELKDDSQIKGDIRPYSPSHQEILKIYEEGVFNQNDVDDDILKIRKNASPSKNEIQRYKIWLEQGYISPYTGKPIPLSGLFSENYQIEHIIPQSRYFDNSLSNKVICESEVNEDKSNKTAYEYIKANEGKILTGSIKLFSLKAYEEHCKRSFKKSRTKLKNLLSEDIPEGFLNRQLTDSRYISKIVKALLSNIVREEGEKEATAKRLIPVTGAITSKMKQDWGLNDKWNELITPRFKRLNELTKSNDFGYWDKDKNMFRTMVPDELSKGFSKKRIDHRHHALDALIIACVTKDHTNYITSLNTARKNHSLVAKLRNIEKKQIKDKLTAKLKTITVAKSYLQPWQGFTIDAKESLEKIVVSFKKNTRVINKTNNKYLSYKDENGNMHLGKDGKPKKELTKQVKGDNWAIRKSLHKDTVSGAVTIKRKKKGLSNITAYLEQWQLIVDKQIRKKVCNLNDLFNGDVKAIKKHLKSHPITIDKEEILKVEVYEKVEATATRGISTALTEKFTRKQLESVSDSGIQLIFENHIKNYQEENGKERFDLAFNSVGLDDLNKNIVCLNNGKFHQPIYKVRLYEVGNRFAVGETANKKDKFVEAAKGTNLFFAIYWDEEKKKRVYDTVPLNEVIAHQKQTAHIKAKDNTPIALKAEKGQFLFTLSPNDLVYVPTDEEMGNPNMVDIKSLSRDQLERIYKMVSTTQKECHFVPNTVAKEIRKNENGTNSKSERVQILNGISLLDDKQKPVMIKERCWKLKLDRLGNVLEVKKHVSPILQEV

SEQ ID NO: 5360 - protein, 1563 aa, synthetic construct
  REGION 1..1563: note = Synthetic
MKKILGLDLGTNSIGWAVVNADEIKRENGTSFLQPSSISSAGSRIIPMSADVLGDFDKGNSVSQTAERTSKRGIRRLLERNLQRRERLLRVLKKMDFLPEHYANKINEYGKFTDYSEPKLAWKNGKDGKPEFIFKDSFNEMLSDFTKHQPQLIANGKKVPYDWTIYYLRKKALFQRIEKEELAWILLQFNQKRGYYQLRGEEEEENSDKSIEFLAQRVVRVEATDEKKGDEVWYNVYLENGMIYRRSSRIPLDWVGKIKEFIVTTDLEKDGTPKKDKDGNIRRSFRAPKEDDWTLIKKKTEFDIDKSQKSVGCYIYDALLTNPNQKIIGKLVRTVERKYYKDELKQILEMQIALMPELQNESLYRNCIDELYPNNEAHRNNIAKPDFINLFINDIIFYQRPLKSKKSLIDNCPYESRRDKYGNVHSVKCIAKSNPLFQEFRLWQFVQNLKIYQREKEVNGKLQTDVDVTNELLRSEDDYIAVFDWLSNRASIKQDTLLNTYFRFKKEKGKEHYPYRWNYVEDKEYPCNETRAAILSGLNKSGISNDFLTLDKEMQLWHLLYSIDDKTQITKALNKYATKNHLPESFVQVFAKIKPFEKEYGSYSEKAIKKLLPLMRMGKYWNFEDIDIHTKDRINKIITGEYDENIKNRVREKAIDLSVESHFKGLPVWLACYIVYGRHSESKDSIKWEQPDDIDMYLREFKQHSLRNPIVEQVVTETLRTVRDIWKQEGQIDEIHVELGREMKSPADKRKWMTTKNLQNENTNLRIKAMLMEFMNPELGIENVRPFSPSQQDILRIYEENALDNLTKEDKDFEFISRISKTAQPSKTDIVRYKCWLEQKYRSPYTGEMIPLAKLFTPAYEIEHIIPQSRYFDDSFSNKVICEKEVNGLKDRQLGFEFIKNHNGEKVQISQGRTVQILSVEAYEKFVKEHYANNGIKMKKLLMEDIPDDFIERQMNDSRYISKLVKGLLSNIVREKDENGELEQESVSKNVISCNGNITDCLKKDWGMNDVWNSIVLPRFRRLNELTGKDVFTTISTEGHEIPAMPLELQKGFNKKRIDHRHHAMDAIVIACTTRDHVNLLNNEAAHSKHNANRYQLQHKLRRYEKTIINGKEKEIAKEFLKPWDTFTNDAKQTLDNIIVSFKQNLRIINKTTNYYQHFDENGKKAMIKQVKGDSWAIRKSMHKDTGWGEVNLRKCDKTVSLSEALKNPKVIVNKDFKHKVQELLAQGRDAKYIKRYIEDNKDVWSDIDIKKIRVYYYTQDIKDENGIIKDRYFATRFLSDLVSYMSGIKEYDKAISQIESITDTGIQKILKAHLEAKDNNPELAFSADGIDEMNSIIVDSKKIKYYQLKKVHKPIYKVRRYESSNNKYPIGQKGCKAKKFVEADDGTNLYFVVYQTIDKRRTYATIPLELSIECQKDNHNLKGWINLLDERLRDKSENEKLKRYQRFNIPKDAKLLFVLSPNDYVYITSDDSDDRIEKNRIFVVNDFNDTTIYFRPCNFAKAIASKEVDMRLKYIKKEDKEKIVGSFDDKTANFENKMIKEICVPLKVDRLGNIIELNGKKL

SEQ ID NO: 5361 - protein, 1561 aa, synthetic construct
  REGION 1..1561: note = Synthetic
MKKILGLDLGTNSIGWSLIETDFDKKEGRIKGLGSRIIPMDQGQMSDFGKGNSISQTAGRTKYRGVRRLIQRNLLRRERLHRVLNILGFLPKHYTDSIDFEKYFGQFKGNEEVKLNYRKNEQGKHEFIFMDSFNEMVKEFEAKGQPIKIPYDWTLYYLRKKALTQKISKEELAWLILNFNQKRGYYQLRGEEEEVVEGKTKEFIVLKVEKVVDTGEVIKKTGDKLFNVIFDNGWEYDKSVVKTENWIDKSKEFIVTSTIKKDSEVKRTYKAVDSEQDWIAIKTKTEQDIENSNKTVGQYIYETLLKNPTQKIKGKLVKTIERKFYKNEFEQILETQIKHHKELQDRKLYQTCIDELYPRNEAHQINIKDKGFDYLFKDDIIFYQRPLKSKKSTISGCQYESRKYKIEVVDKVTNEKRMEWVTEPLKAIPKSHPLFQEFRLWQFLKNLKIYQKEDEKGNLIDNDITDAMLSTEEAWVELFEFLNERSKIKQNQIIDFFIKKKRIEKKNKDKYRWNYVEDKEYPCNETRAQFINQLKKVKDLNIDIFLTVELEYKLWHIIYSVTDKNEFERAIENFAERNNIDQVSFEKSFKKFPPYKSDFGAYSEKAIKKLLPLMRRSKCWDKSKITDEVKSRIVNIMERVIALNLSSNASKKQINEALEKFKVADDDIPTQLIKSFIPFKNTNPLTALNTYQACYAIYNRHSEAGNIQFWKTPSDIDKYLLKFKQHSLRNPIVEKVVTETLRTVRDIWKHYGNGEENFFKEIHVELGREMKNSADKRKKMTAQISENENTNQRIKAILQELKDGGITNVKPYSPSQQEILKIYEEGVYQSVEVADDIEKIRKNNTPTKAEINKYKLWLEQGYVSPYTGQTIPLSMLFTTAYQIEHIIPQSRYFDNSMSNKVICESEINPNPYKDNQTGYEFIKKQGGQIIPELSTSNRTVKLFTLEQYENHCNKYFKKNRTKLKNLLSEDIPEGFINRQLNDSRYISTLIKGLLSNLVREENEKEATSKHIVPVTGSITSKLKQDWGLNDKWNELITPRFERLNKLTNSNDFGYWDYQKDENGNNVGKQFFRTQVPNEITKGFNKKRIDHRHHALDALVIACCTKKHTNYLGALNAEKKNYGLRDALLIKSKEDHYTKHFLMPWNGFTTEAKNQLEKTIISFKQNTRVINKTNNKTLQWVDKEGKWNKQLVPQTKGDNWAIRKPMHKETVSGKVILKREKGEISFNKALENWKMIVDKSIKNKVKGAFNLFDNDLKKVKTHFKNNPIKIGDNEVKKILVNENFEATATRTALTDKFTRKHLESITDTGIQKILENHIKNYIDEKGKEQFDLAFGPEGVEELNKNIASLNNGKKHQPIYKVRLYEVGSKFKVGLKGNRKDKYVEAAKGTNLFFAIYKDENGNRKYETIPLNEVIEHQKQVSHLPKNERTEIPIKNELKGVAVQFLFSLSPNNLVYVPTEDEVENPNMVDFKNFSKEQIERVYNFIDGSGTTANFIPNSTANLIFNMNNTEQKKKKISFSIQNEYGVGSPQSKSQKSIDGIMIKNRCWKLKVDRLGNIIKVIR

SEQ ID NO: 5362 - protein, 1560 aa, synthetic construct
  REGION 1..1560: note = Synthetic
MTKKILGLDLGTNSIGWALVESDFEKKEGKVIDNGVRIIPMDKGTMNNFGTGQSISQTADRTAYRGVRRLYERDNLRRDRLHRVLNILQFLPDHYANTIDFKKQLGQFKKGQEVKLNYRPNPEGKDEFIFQKSFLEMVTEFKKEQPQLFYTNKSGRETKIPYDWTIYYLRKKALTQKIEKEELAWLLLNFNQKRGYYQLRGEEEENSGKNEEFYALKVVEIEETQDKNAKGVWYNVQLENGFVYKRQSKESLDSWIGKVKEFIVTTQLEKDGKPKLDKEGNIKRSFRMPKEDDWNLVKKKTEQDINNSNKTVGAFIYDFLLKNPSQKVNGKLIKTIERKYYKEELEKILKTQIGFHTELKDTNLYIQCVKELYSKNEAHQNNICSKKKDEMFRYLFMDDIIFYQRPLKSKKSNIASCPYENRVFIKEGEKITQGLKVISKSHPYFIEFRLWQFIHNLKIYKIGEEKDIDVTSQFLATEKDVADLYDFLNDKKEIEQKNIIKYFIDLKKIDKKEKDIYRWNYVVDKKYPMNPTRNSILTRLKKVRNINVFKFLTSEIELQLWHIIYSVTDKKEFETALGNFAMKQELDKNSFVEAFKKHPPYSSDYGAYSGKAIKKILPLMRRGKYWNEKTISEKVKDFVSEIYERIKHLKFENIQEENLNKAIELVSDDAISKQFIKSFLKHSIDNPLTGLNTYQACYAVYQRHSEASLITQWKIPKDIDSYLEKFRQHSLKNPIVEQVALETLRTVRDIWRYNLSIDKEFKFSEIHVELGRDIKNSKDKRKRISQKQNQNENTNNRVKLLLEEMYKDGARSYSPSHQEILKIYEEGVTQNPQASYNKVKEDEIEKIKKNTNPSATDIKRYKLWLEQGYISPYTGKPISISKLFTHEYQIEHIIPQSRYFDDSFSNKVICEASINEDKSNKTAYEYLKAKGGSIVHGIKLLTLSEYENHCTQYFKKNRTKLKNLLSEKIPEGFINRQLNDSRYIAKFIKGILSNIVREEGEKEATSKNLISVSGAITSKLKHDWGLNEQWNKLIQPRFERLNLLNNSNQYGYLDYQKDREGNNIGKQFFRLVTPTGVNKKRIDHRHHTLDAIVIACCTRDHINYITSLETERKNHKLVSKLCNLKKVARKRNGNTETIEVFNSYKKPWENFTTDVLYSLEKTIVSFKKNTRVITKTNNKTWQWVKDKKGSLNKQLVLQIKGDNRAIRKPLHKETVYGKVYIKEKKKRLSSVKNFIEHPELIINKTIREKVKALNKLYDSDKKKIVKHLKENPIEQDGKKIDKIEVREWTKNATAYRVKLSDSFTRKQLESITDYGIQKILEKHVKKYIDENGKERFDLAFNPEGVDTLNKNIIEFNNGKKHQPIHSVRIYEEGSRFQVSTNEQNVNKTKKYVEAAKGTNLFFAVYWNASKKERIYETIPLKEVIDWQKWRAKNIAFNEPLIPIDKEKGEFLFFISPNDLVFVPTKEEQDTPSLVDFSNLSKEQVNRVYKMVSATKGECHFVSQYYSNNIISNENGSNNKNERVQLKDLNELDEKGKPKMIKSICWKLKVNRLGIIEKVER

SEQ ID NO: 5363 - protein, 1559 aa, synthetic construct
  REGION 1..1559: note = Synthetic
MKKILGLDLGTNSIGWAVVNANEETRENGTKYLKPIGISAAGSRIIPMSQDILGKFDVGNSISQTAERTRLRMVRRLRERNLLRRERLLRTLKILGFLPEYFSMQIDAYGKFIDDSEPKLPWKKNQEGQYEFLFQLAFNEMLADFAQHQPQLVADGKKVPYDWTIYYLRKKALRERITKEELAWILLQFNQKRGYYQLRGEEEEEDQTKRVEYIAQKVLRVERTNEKKGDDYWYNVYLENGMIYQRPSKYPLDWEGKVKEFIVTTDLEKDGTPKKTKNGEIKRSFRAPKEDDWTLLKKKTEFDIEKSKKTVGCFIYDAILQKPNQKIIGKLVRTVERKFYKEELIQILMAQKEFIPELRDSELYKKCIKELYPHNEAHRNNIAKPDFVNLFVNDILFYQRPLKSKKSLIDDCPYEYHIDKDGNSYPIKCIARSNPLFQEFRLWQFIQNLRIYQRERFVSDGQLDLFGATTTGKLQTDVDVTAEFFKSEDDYVKLFDWLNDRNSIKQDTLLNSYFKIKKEKGKNQYPFRWNYVEDKEYPCNETRATILSGLGKSGISPEFLTDDMEMALWHILYSVTDKIEIVKALNSFADKHHLNDTFAKVLSKLKPFKKDYGSYSEKAIKKLLPLMRMGKYWNAESIDEHTLERINKIITGEFDENIKTRVRDKAINLSDMSHFKGLPVWLACYIVYDRHSEGKDIEKWERPDDIDRYLKDFKQHSLHNPIVEQIITETLRTVRDIWKQEKRIDEIHVELGREMKNPANERKRMTNRILQNEITNLRIKALLLEFMHEGMENVRPYSPSQQDILRIYEESAVDNLTKEDEEYEFVTQMMKTAQPSKSDIIRYKCWLEQKYQSPYTGEIIPLAKLFTSAYEIEHVIPKALYFDDSFSNKIICEAEVNCLKGRQLGYEFIKKNAGRIVPISQGGTVKIQTIEAYEKFVKDHYATNRTKMKKLLMEDIPDDFIERQMNDSRYISRFVKGVLSNIVREKLESGEYEQETVSKNLISCNGNITTYLKQDWGMNSVWNSIILPRFQRLNELTGTNNFTTISREGHVIPNMPLELQQGFKIKRIDHRHHAMDAIIIACATRDHVNLLNNEAAHSKHNANRYQLQRKLRRYEKVIINGEEREVAKEFIKPWDTFTTDAQLVLENIIVSFKKNLRVINKSINFYQHYEASGKKELKKQERGDSWAIRKSMHKDTIFGEVNLRFIKTVSLNEAIKKPETIVNKDFKAKVKELLRMGHNIKSIQKYVEENKDVWSDIDLKKISVYYFSKDEKKRNGEPKERYFATRKPLDTSFDQKRIKESVTDTGIQRILLAHLASKDNNPELAFSPDGIDEMNRNIVALNNGLFHQPIYKVRVYEKADKFAIGQTGNKTKKFVEAAKGTNLFFAILGTEKENLETGRTEEVRSYLTIPLNVMIDCQKEHGATWKSNIENYLKEKDLISADTKLLFILSPNDLVYLPTNMPPVGATTAFDKKRIYKFVDPNDNKGNFVPYSIANTIFSVKFSDQKKMGISFDIQNEIGLGSQHSKSPRAITGEMIKETCIPIQVDRLGNIIEFNGMKM

SEQ ID NO: 5364 - protein, 1559 aa, synthetic construct
  REGION 1..1559: note = Synthetic
MKKILGLDLGTNSIGWALTNNDFDNTLGSIEGLGSRIIPMSQDVLGKFDSGVSISQTAERTKYRGARRLVQRFLLRRERLHRILNILDFLPKHYSEAIDFDKKFGQFKPEREEKLSFYKNESGKNQFLFLESHQEMFSEFKLIHPDLKQVPYDWTIYYLRKKALTQKISKQELAWILLNFNQKRGYYQLRGEEEEVNKNKLEEFHTLTVVDVIEREKGKSGIWYNLILENGWIYKRESKIALFDWIGKQKDFIVTSELNDDGTVKLNKDNEEKRSFRSPKENDWGLVKIRTEQTINQSKKSVGSFIYDELLKNPSQKIKGELVRTIERKFYKKELSKILKVQIEFHNDIFGERNLYKKCIDELYRHNDSHKNNIKDKGFDYLFLDDIIFYQRPLKSKTSLISDCSLEFIPIKDKKGVLVKDANGKQVVKPLKCIAKSNPIFQEFRLLQFVKNLKIYKKEIINEIDVTDDYLKTEENWVELFNWLNDKAEISQKQFLAYPKFKLKEDKFRWNFVEDKIYPCNETRNQFLNAIAKIDVDKSFFDNKNTQDLWHILYSVTDKIEITKAITTFVKRHNLPNEFITNFSKLKPYKKDYGSYSEKAMKKLLTLMRRDETWNQDVISDKVTAKISAIKERLESINYDASILEKVSDSDIPKQVLKSFINCTEFNKGLNTYQASYLIYDKHSEASDVSKWKTPADIEHFLKYDFKQHSLRNPIVEQVITETLRVVKDIWQHFGEGKENFFNEIHIELGREMKNNSADRKRITENINQNENTNLRIKAILTELKNDGINDVRPYSPSQQEILKIYEEGVYSSEIRKEKLEDIDKIRKIAKPTTSEIIKYKLWLEQGYISPYTGKLIPLSELFTTKYQIEHIIPQSRLFDDSFSNKVICESEVNDLKGNKTALEFILKNEDRIVTLTGGKTVRIFTKEAYSQHITSYYSKNKNKQKRLLSEEIPEKFIERQLNDTKYISKIVKNLLSKIVRDDDEQELTSKHIVSLNGSITSKMKQDWGLNDVWNNIITPRFERLNAITNSSDFGKLELKKDEFGNSGKQVFQTTVPDAIAKAFSKKRIDHRHHALDALVIACVTKDHVNYLNSINSERTNYSLVSKLRRIEEIQINGKTQNIAKDFHKPWDNFTKKAEDQLNQTIISFKQNTRVINKKVNKYQVWKEEDSTMKKVIIKQTKGNNWAIRKPMHAETVSGKVFLKRIKQSHITIINATDQVELIVDTEVKKQLKEKIKRHPNNSEGLKKHLKDFPVMVDGKVIDKVQIYENIEATATRKTLDITFDEKRIEKITDTGIQKILLNHLQQEIYQNATDENGKKIPANEVAFSENGLDELNKNIIALNNGKKHQPIKKVRVFEESGRFSLGDTGNKKDKFVETASGTNLFFAIYKGNDGKRNYKTIPLNEIIESQKLGAFEKLKLNECSVPKNYIDEKTKELSPLLFYLNPNDLVFVPTIEEIENPSQVNIKNFTKEQTERIYRFTDSSDTTCNFIPASTSSLIFNINKKDQQKIGLNYPIQNEYGLGSPQSKNQNTINAVQIKSVCWKIEINRLGKIIKIIK

SEQ ID NO: 5365 - protein, 1556 aa, synthetic construct
  REGION 1..1556: note = Synthetic
MKKVLGLDLGTNSIGWALIEHDFDTKQGKIIDLGVRIIPMSKEALDKFGSGQSISQTAERTRHRGTRRLYERHHQRRERLHRVLHIIKFLPQHYDNAIDFKKRLGQFKSGIEVKLNYKKGRQGKYEFLFMDSYIEMLDEFKNNGIQNNVPYDWTLYYLRKKALTEKIRKEELAWILLNFNKKRGYHQMRGEVNTSDQNKLEEYYCLKVTDVQSTDETNTKGTWYNVILENGLIYKRQSKESLQNWIGKTKEFIITTTLNKDGTPQMDKNQQIKRSFRAVNSKEDWIAIKKKTESDIVSCQKTIGEYIYDTLLEKPAQKINGRLITTVDREYYEQELVSILKTQLKFHPELQSKLLYTECINELYTHNTKHRNNIKNKDFIFLLVKDILFYQRPLKSKKSTIANCPYEERSFIKDGKKETQHIKCISKSNPYFQEFRLWQFIQNLKILKRTKQTDKQTLVNADITPNYLTSENDIVNLFDFLNDRKDIDQKTLLKFYKLTPKDYRWNYPEDKKIACNETRSMFLNRFKKVKPSGSDITLTKDMEMHLWHIIYSITNQKEFESALTKFALKNNIDKLQFVDAFNNVPPLKGEYASYSEKAIKRLLPLMRIGKYWAKENIDPRTRSNINNILQRLKTISFSEQKINEVSDDEINSRSLKNLIDLSSIEDYKGLRVHQACYSIYGRYSEIGQIAKWESPKAIQMFLDKFKQHSLRNPIVEQIVTETLRVVKEIWECYGNGEKNFFDEIHVELGREMKNSKEKRSRISQLNNNNEITNQRIKALLKELKEDPEVTDEVRPFSNSQQEKLKIYEEGVWSNPSLKFKNNKEQEEILKIKRNSTPTRKELEKYKLWLQQGYFSPYTGKPISLSKLFSEKYQIEHIIPQSRYFDNSLQNKVICESAVNAIKDNKTAYEFIENYQNQKIDIGGGETVTILSLNSYVDLCKRNFSTLPKKLNHLLSKDTPEGFINRQLNDSRYISKYIKSLLGNIVREDNELEATAKKLIPITGAITAVMREDWGLNNKWNDIIAHRFKRLNKLRKTHDFGYQDNQFFRTTIPDELSKGFSKKRIDHRHHALDALVVACISPLHINYISALSNGSRNFTIEEKLRKKEKVCYNNPITGEPKNNTIAKEYLLPWKSFPIDAKNQLDKIIVSFKQNLRTINKSTNSYWSYKDEDGNLRFGKNGIPQKDKVKQTKGDNWAIRKSLHADTCHGAVQIKREKKNKVKLESCLANWELIIDMKIKSKVKSLLSIFDNDIHSIKKHLKKHPLIINNQVIQEVRVYELLDPKTTTATRVELGENFTKKNLESITDSSIKAILQNHLENYKDSKGSPNFKLAFNSDGIDSLNKNIKQLNNGKFHHPIYKVRIYETGKKFPIGESIVKSKKYVEAAKGTNLFFAIYWNEELQKRIYETVPLNEVIAHQKQTAHYPAGEKTPIAIKHDMGQFLFTISPNDLVYVPSDCEIDNPDSVDFANLSKEQIRRIYKMVKASKNECYFIRFDIASLIHPYSATKKFGELGSQNKLQTTMCPDSVKIVDRCWKLNVNRLGKIVSIKKQHTIKQYN

SEQ ID NO: 5366 - protein, 1554 aa, synthetic construct
  REGION 1..1554: note = Synthetic
MKKILGLDLGTNSIGWALTNNDFDNKLGNIEGLGSRIIPMSQDVLGKFDSGVSISQTAERTKYRGTRRLVQRFLLRRERLHRVLNILDFLPKHYSEAIDFDKKFGQFKPEREEKLSFYKNESGKNQFLFLESHQEMLSEFKLIYPDLKKVPYDWTIYYLRKKALTEKITKEELAWILLNFNQKRGYYQLRGEEQEENKNKLEEFHTLTVINVIEREKGKSGIWYNVILENGWIYKRESKIALFDWVGKQKDFIVTTELNDDGTIKLNKDNEEKRSFRSPKEDDWGLVKIRTEQTINQSGKSLGSFIYDNLLKNPNQKIKGELVRTIERKFYKDEISKILKTQIEFHKNILTDKNLYKKCIDELYRHNDSHKNNIKERGFEYLFLDDIIFYQRPLKSKTSLISDCSLEHRPIKDKKGILVKDSSGKQILKPLKCIAKSNPIFQEFRLLQFVKNLKIFKKEIIDDIDVTIDYLKTEEDLVELFHWLNDKAEISQKQFLAYPKFKLKEDKFRWNFVEDKIYPCNETRNQFLNAISKIDVDKSFFDTKNTQDLWHILYSVTDKIEITKAITTFAKRHNLPDEFIANFSKLKPYKNDYGSYSEKAIKKLLTLMRFGSFWNENNIDSNALSRIDKIQTGEFDENIRTRVREKAIHLSVLSDFKGLPLWLASYIIYDRHSEASDISKWKTPADIEHFLKHDFKQHSLRNPIVEQVITETLRVVKDIWQHYGEGKENFFNEIHIELGREMKNDKATRERMTKQISQNENTNLRIKAILMELKNDGINEVRPYSPSQQEILKIYEEGVYSSENRKERLEDIDKIRKNAKPTTSEIIKYKLWLEQGYISPYTGNIIPLSELFSTKYQIEHIIPQSRFFDDSLSNKVICESIVNARPYKDNQTAMEFINNQGGRIVTELSTNSRTVKILTKEDYVQHINTYYGKNKNKQKRLLSEEIPEKFIERQLNDTKYISKIVKNLLSKIVREDDEQEVTSKHIVSLNGSITSRMKQDWGLNDVWNNIITPRFERLNAITNSSDFGKIELKADEFGNRGKQVFQTTVPDAIAKGFTKKRIDHRHHALDALVIACVNRTHINYLNNLNAKDDNDKSVKHELKNKLCFKTKPDANGNYKWEFYKPWENFTKKAEDELNQTIISFKQNTRVINKTVNKYQVWKEEDGAMKKVTVKQTKGDNWAIRKPMHAETVSGKVFLKRIKQSHITITNAIEQIELIVDKEVKKQLAAKIKSYPNNPNGLKKHLKVFPVMIDGKVIDKVQIYEKTEATATRKTLDITFDEKKIEKITDTGIQKILLNHLRQEIYQNAIDEDGKKIPAHEVAFSENGLDDLNKNITALNNGKKHQPINKVRVFEESGRFFLGDAGNKKDKFVETASGTNLFFAIYKDNNGKRNYKTIPLNEVIESQKLGAFEKIKSYECSVPNTYIDEKTQELSSLLFYINPNDLVFVPTIEEIENPNSVNIQNFSKEQAQRIYKFTDSSDTTCNFIPASSSSLIFSITKKDQEKIGLNFPIQNEYGLGSPQSKNQNSLNGIQIKSVCWKLEVDRLGKIKRIIR

SEQ ID NO: 5367 - protein, 1554 aa, synthetic construct
  REGION 1..1554: note = Synthetic
MKKILGLDLGTNSIGWALVESNFENKEGQILGMGSRIIPMSQDIMDKFGSGQSISQTAERTRYRGVRRLVERGLLRRERLHRVLNRLKFLPEHYADSIDFEKHFGQFKNGVEVKLNYRKNKDGKHEFLFMDSFKEMINEFGARGLQTKVPLDWTLYYLRKKALREKISKEELAWLLLNFNQKRGYYQLRGEEEEVAEGKIKEFVSLKVKEVIDSGDVIKKTGDKLYDVVFENGWQYDRQITKTENWIGKTKEFIVTTTTTKNGDLKYSFKAVDSEKDWIAIKTKTEQDIQKSDKTVGEYIFDTLLENPSQKLRGKLVKTIERKFYKAELNAILSKQIECHPELQDRDLYKACVEELYPINESHRNGIMEKGFGYLFVEDILFYQRPLKSKKSSIANCPYEKKTFVKDDVRQEVPIKCIPKSNPLFQEFRLWQFLKNLKIYQREAIVGSKSEIDVDVTCQFIKTEDDWGDLFDFLNNRKEIDQKAFLRKYKLNENAYRWNNVEDRKYPCNETRAQFISRLKKVKDSSYEEFLTTKNEQELWHLIYSVKDKLEYAKALGTFANRKELDEATFVESFIKFPPFDSDYGAYSEKAIKKLLPLMRKGKYWSDSLINKEVKGRILSIQERLESIDYDEEVFAKDKNNKLQTIVDDDIPKQLLKSFLDYPKNTALKGLNTYQACYAVYQRHSEIGDILCWKNPKDIDVYLHEFKQHSLRNPIVEQVVTETLRVVRDIWQYHGSGQVNFFNEIHVELGRDMKSSSDKRKSIAAIQSENENTNQRIKALLQELKEDSTVKDDVRPYSPSHQEILKIYEEGIFNQFEADDDILKIRKNTSPSKKDIERYKIWLEQGYISPYTGNPIPLSGLFSERYQIEHIIPQSRYFDNSLSNKVICESEVNEDKSNKTAYEYIKENSGKILNGSIKLLTIKAYEDHCNRSFKKSRTKLKYLLSEDIPEGFINRQLNDSRYISKIVKALLSNVVREEGEKEATAKGLVPVTGAITSKLKQDWGLNDKWNELITPRFKRLNEMTKSNDFGYWDKDMNRFRTMVPDEIAKGFSKKRIDHRHHALDALIIACVTKDHTNYITSLNTERKNHSLVAKLRQIEKKQITDKHTQKPKTIEVAKAYHQPWSGFTSDAKTALENILISFKQNTRVINKTNNKYLSYKDEDGQIRLGKDGKPKKELTKQVKGDSWAIRKAMHKDTVSGAVTIKRKKKGLANLTAYLEQWQLIVDKPIRRKVRNLNDLFNGDVKAMQKHLKSHPITINDEAVVKIEVYETVEATATRGISTALTGNFTRKQLEAVTDSGIQLIFENHIKNYTEEDGKERFDLAFNTEGLEDLNNNIASLNRGKFHKPIYKVRLYEVGNRFAVGETGNKQDKFVEAAKGTNLFFAIYWDEEKQKRVYDTVPLNEVITHQKQTAHVKAKDNTPIAVKAEKGQFLFTLSPNDLVYIPTNEELEDTSLVDFNCLNKDQLERVYKMVSTTQNKLQCQPVYYASSIIEKENGSGNKTERILKYFNSNDVLDQGGEAVMIKERCWKLKVDRLGNVIEVKKHVSAQLQTAY

SEQ ID NO: 5368 - protein, 1549 aa, synthetic construct
  REGION 1..1549: note = Synthetic
MKHILGLDLGTNSIGWALIERNIEEKYGKIIGMGSRIIPMSQDILGKFDAGQSISQTAERTGFRSTRKLYQRDNLRRERLHRVLNILGFLPTHYANAIDFEKRLGQFKENQEPKLPYAKNEDGKFDFIFKPSFEEMVADFKQYQPQLFYIKPNGKESQIPYDWTIYYLRKKALSQKLSKEELAWILLNFNQKRGYYQLRGEVEQADESKSVKFYALRVVKVEEDGKDKKGDTWYNVHLENGWVYRRTSKNFLDWEGKVREFIVTEKLNEDGTIKVDKEGKEDRSFKAVNSEEDWIAIKKSTEDKINHSEKTVGTYIYDMLLQEPNQKIRGKLIRTIERKFYKDELIKILKKQIELQPEIFTKDLYKACIEELYPHNEAHKKNISDRGFVYLFVEDIIFYQRPLRSKKSLIAKCTLEERSFVVEENGKRKEKTEGIKCIAKTNPIYQEFRLLQWFHNLKIYKKDDKTDIDITDELLPTIEAKEQFLEWLNDKASISQKELLKYPPFQLEEAVRKILVQKLEEKPKKKDIEMGLEEYFRWNYVQDKVYPLNETRGEFLKVLKKNKLSPNFLNKETEYRLWHLLYSVEDKVAIESGLTKFAQKYNLPKEFVLAFSKFPRMEKNYGAFSEKAIKRLLTLMRFGKFWDFENIDDKTKERIDKIQTGEYDEKLKNRVREKAIHLTRDEHFQGLPLWLASYIIYNRHSEVSEIKYWKTADQIELLKQHSLRNPIVEQIINETLQTVREIWEYYGEGKENFFDEIHIELGREMKNPADKRKKMTERITENENTNIRIKLLLSELLNDGVEEVRPYSPMQQEILKIYEEGVYENEQDEKVLEEITKIRKKNQPTTKEINRYKLWLEQGYKSPYTGEMIPLSKLFTSAYQIEHIIPQSRYFDDSLSNKIICEAEVNQLKDNQLAYEFIQNFGGQKVPIGGNETVTILKKEHYEDFVQKYFSKNSLKRKKLLMDEIPEDFIHRQLNDSRYISKIVNLLLSNIVREDGEEEARAKKVIVSSGGVTTRLKQDWGLNDIWNKLITPRFERLNQMAGYEKYGSWENKEGKKVFQINTTEQELMKLNKKRIDHRHHALDALIVACSTADHINYLNNESASENKKSERFDLRKKLRRIEKYIKDGKEREAAKEFYKPWETFTQDAKEALEHIIVSFKQNNRVINKSVNYYQKWEQQPDGSMKKVFVKQKKGNNWAIRKPLHDPMPYGMKEYEINYLKIVDNISNYKFILDDFVRVQIEKIFLENDKKVGKTKNYLKQNPIRNKEGNIVESTDFKIKLSKYRKRKLISVLSVRKGQGAIRTLNEMVNYINNKIADDVLRKDLLNHLRNVIDDNKDIENEEYILDLAFSAEGIDIFNSNRNKPVYKLPIVEEGEKRFQLGTGEGSKHKYVQTAKGTNLFFAIYVNDKGERSYETIPLNVVIERQKQGLPSCPDRNEKGNRLLFSLSPNDLVYIPTEEEQEHPHLVDFSKLSKEQVKQIYKIVSFTGNRLYAVPNTVAKSIVDKVEFTQLNKIEFIKEKQMCIKIDVDRLGNIITLTSKTIREKFDKYK

SEQ ID NO: 5369 - protein, 1549 aa, synthetic construct
  REGION 1..1549: note = Synthetic
MKKILGLDLGTNSIGWAVVNAEEITRENETNYLKPTGLSTAGSRIIPMSADILGNFDAGNSVSQTSERTGYRGVRRLHERYLLRRQRLLRVLKLMGFLPEHFAKQIDEQGKFIDYGEPKLAWKKDEYGKYDFVFKGSFNEMLTDFAQHQHQILADGKKVPYDWTIYYLRKKALTQRLTKEELAWILLQFNQKRGYYQLRGEDEDEQHDKLVEFIAQKVVRVEATDEKKGDDVWYNVYLENGMVYRRTSKMPLDWEGKVKEFIVTTDLEKDGTPKKDKEGNIKRSFRAPKEDDWTLLKKKTEFDIDSSRMTVGCYIYDHLLQKPDQKIIGKLVRTVERKYYKDELRLILETQVALIPELKDDALYNRCLEELYPNNEPHRKNIAKPDFINLFINDILFYQRPLKSKKSLISDCPYESHFDKDGNEHPVKCIAKSNPLFQEFRLWQFVQNLRIYQRERVVSDGQLDLFGNVSAGRLQTDVDVTDEFLKTEDDYVKLFDWLNDRASIKQDTLLNSYFKFKKEKGKDVYPYRWNYVEDKEYPCNKTRAAMLDGLLKCSIDAGFLTREKEMSLWHVLYSVEDKMEIVKALKKYAQKNNLPDLFAEVFAKVKPFKKDYGSYSEKAIKKLLPLMRMGKYWSADAIDNKTKERIDNMLTGEYDENIKNRVREKAVKLTDIDHFKGLPIWLACYIVYDRHSEAKEIGKWEKPEDIDCYLKEFKQHSLRNPIVEQVVTETLRTVRDIWKQEEQIDEIHLELGREMKNPADKRKRMTENILQNENTNLRIKAMLMEFTNPEMGIENVRPYSPSQQDILRIYEENALENLTKDDKDFDFVSKISKSAQPSKSDIIRYKCWLEQKYRSPYTGEMIPLAKLFTSAYEIEHVIPQSRYFDDSFTNKVICEKEVNGLKDRQLGFEFIKNHHGEKVQLSQDKVVEIMSVEAYEKFVKEHYANNRTKMKKMLMDDIPDGFIERQLNDSRYISKLVKGLLSNIVREKLENGEYEPEAVSKNLISCNGSITDRLKKDWGMNDVWNSIVLPRFRRLNELTEKDCFTAISAEGHEIPAMPLELQKGFNKKRIDHRHHAMDAIVIACATRDHVNLLNNEAAHSKHNANRYQLQRKLRRFEKLTIDGMEKEVAKEFLKPWDSFTTDAKQVLENIIVSFKQNLRVINKTTNSYQHYDETGKKVIVKQEKGDSWAIRKSMHKDTVFGEVNLRMSDKTVSLNEALKNPKTIVNKEFKKKVMELMEAGRDAKYIKKYVEDNKDIWSDIDVKRIQVYYFTKETKDRYFATRKPLDTSFNCKKIKESVTDTGIQKILLAHLEAKGGDPELAFSPDGIDEMNRNIVALNKGKFHQPILKVRVYEKADKFAVGQNGNKSAKFVEAAKGTNLFFAIFGTEKTNKETSETETVRSYLTIPLNVMIDCQKKYGSQWRNNIEAYLQEQQLATSDAKLLFILSPNDLVYLPNEDDTLNPSRIYKFVDSSGTTANFIPQRSANVIFSIPTKKQKEMGVDFIIQDEFGVGSPQSKNQKAITGEMIKEICVPIKVDRLGNIIELNGKKL

SEQ ID NO: 5370 - protein, 1548 aa, synthetic construct
  REGION 1..1548: note = Synthetic
MKRHRLSFLFTIFAKSNIANTNTMKRILGLDLGPNSIGWALVIRRNDSDGPEFIERIEAGGSRIIPMDAAIQGDFENGNSVSQTAERTGYRGIRRLRERCLLRRERLNRVLDVMGFLPDHYAAELTRYGKFKEPDGCKLAWRRNDDGKYEFVFKDSYSGMLDDFRQYQGQWLGDGGLVPYDWTIYYLRKKALTQAITKQELAWILLNFNHKRGYYQLRGEDTDGDKSKLEEFYALKVVDVVDTGERKGKDTWYDIMLENGMVYHRPAPTPPDWIGKVKEFIVTTQLDNDGKPKTDKDGTVKRSFRMPKEDDWTLVKKRTEADIDRSGKTVGEYIYEALLADPKQKIKGKLVRTVERKYYREELRRILDAQINFIPELRDEALYEACLNELYGTNDAYRHSIEGRGFTYLFVDNIIFYQRPLKSKKSLIDDCPYESHAYVDKETGEQKTVPVKCIAKSNPLYQEFRLRQFVANLRIYQRQKEIDGILRVDVDVTDEFIATVDDQVKLFDWLNDCQNISQEALLVKYFKIKKPRGKDVPLPYRWNYVEDKTYPCNETRGKMLEFLEKAGVDKGILTKDVEKSLWHIFYSVEDKQELNRALITFAGKHGLGDKFVEVFSKFPPFKKEYGAYSEKAIKRLLPLMRVGSHWSEGDIDENTRGRIENIINGEYDETIKDRVREKAINLTDITQFSGLPLWLACYVVYDRHSEAKEVTKWTSSEDVDTYLRHFKQHSLRNPIVEQVVTETLRTVRDIWRRYGTIDEIHIEMGREMKQTADQRKKATQRITDNENANIRAKVLLTEFINPEFGIDNVRPYSPSQQELLRIYEDGVLGSVGEIEDDISAIMKKLSETDVKKRPTHNEVMRYKLWLDQKYLSPYTGRFIPLARLFTTDYQIEHIIPQSRYFDDSFSNKVICESAVNALKDRMLGMEFIKEKHGQVVELGNGTTATVLSVEEYERLVANNYKNNQPKMRKLLMDDIPDDFIERQLNDSRYISKLVKTLMSNIVREEGEEQDISKNVIVTNGAITDRLKKDWGVKDVWNRIILPRFKRLNELTGTGKFTTTSASGHEIPDMPLDMQKGFNKKRIDHRHHAMDAMVIACTTREHVNLLNNEAAMSKNNANRYQLSRKLRRYEQTEVIRNGERKTISVAREFMKPWPAFTTDVETVLRDIVVSFKQNLRIINKTTNRYQHFDNGKKSMLHQAKGDSWAVRKPLHKETVFGEVNLRFVREVALKEALKCPKAIVEKDLKRKITAMLELGYDDKGIKQYFESNKDVWHDFNPTKIKIYYFSNDILDKDGNVKDRYFATRKSLDTSFTRKRIESVTDTGIQKILLRHLESYDDNAEQAFSPDGIEAMNRNITILNSGKFHQPIYKVRVYEKADKYPVGKRGNKAAKFVEAAKGTNLFFAVYETEEFDKVTGDIKKKRSYATIPLYEAVKRAKAGLSIAPANADGNEPAFVLSPNDLVYLPTKEDIERGTVSMPLDKSRIYKMVSSSGYQCFFIKYEVANVVVDKYEFSSLNKMERAITGEMIKETCVPIKVDRIGNIIEINGKKP

SEQ ID NO: 5371 - protein, 1547 aa, synthetic construct
  REGION 1..1547: note = Synthetic
MKTKKILGLDIGTNSIGWALIDHNFDQKEGKILGLGSRIIPMTKEQMGDFDSGNTISQTAQRTQFRSVRRLRERHLLRRERLHRVLHVLDWLPLHYARHIDFDQRPGQFIAHAEPKLPYNADGQFIFSDSFDEMLEDFKKHQPQILNRKNRNGQPAKVPQDWTLYYLRKKALRQAITKEELAWIVLNFNQKRGYYQLRGEEEEETPNKTVEFHSLRISEVQMDSEPNRKGEVWHSIILENGWVYRRSSKTPLTQWEGTTRDFIVTTDLNPDGTVKTDKEGNEKRSFRSPQEDDWTLIKKKTEQHIGQSGKTVGEYIYDALLQQPNQKIRGKLVRTIERKFYKQELQQILKKQMEVQPEFFAPEKYQECLLELYPYNEAHRSELAKKDLKHLIIQDIIFYQRPLRSQKSSISDCKLESRRYQVKDENGQLVWRSKPLKAIPKSHPLYQEFRVWQWLQNLKIYTKEGDKDITQELIPSQEDRVKLFDHLMTLSEINHVKLFEYFYGSSRGKDCKEALAKYRWNYVFDDAQAKEADKSKSYPLNETRSAIVKRLEVVEGIPERFLIAETEYQLWHIIYSVTDRMEYAKALESFASKYNEKHGTDIDTASFREAFIKFPPFPSDYGTFSEKAIKKLLPLMRAGAHWSADAMDTKTKQRIENIINGEADDTIRTLIREKTEANSLTELDHFQGLPLWLAQYVVYNRHAESALVTHWKSIDDLESYLKEFKQHTLRNPIVEQVMTETLRVVRDIWMHYGAGAANYFDEIHVELGREMKNPAQERQRLTNTVKANEATNQRIRLLIAELKNNTDGKLPVENVRPHSPKQQEALKIYEEGVLASQNDIPDDIAKISKTALPKLSELQRYKLWLEQKYQSPYTGRVIPLSLLFTEAYEIEHIIPQSRYFDDSLGNKVLCEAEVNALKDNQLGREFIKNHSGSKVDKEITVFTNDQYVDFVNNHYSQNKGKLNKLLMEEIPDKMIERQMNDTRYISKFVSTVLSNIVRDEHKDEGVNSKNLIPCTGKITSRLKQDWGLNIVWNELILPRFERMNAISGTNAFTSENTWGKTIPTVPVEYAKGFSKKRIDHRHHALDALVVACTSRDHVNLLNNKHAKSKERHDLNRKLRVYELINYMKTDAKGPVSREVPKNFIKPWDTLTQDAKSALETLVVSFKQNLRVINKTTNYYQTYKDENGELRLTPEGKPKKGKVKQTKGDSWAIRKSMHTPLPYAKRQYVFQVLELTELGKKEFLDDQEIRVKLEEIIERFDGRIGEAKKFLKKNPILNKNGLEITHGIFKLPEIRYRKRQPISILSNRGQGGVKTRKAVLKLIYKIGDLQLMQDLLSHLENNDDDINQAFSVEGLERFNADRAIKVNSLPITEASESKFPLGSRPNTKVKFAQADSGTNLFFAVYQGKNGKRSYATVPLNEVIERLKQGMKPVPEQSEKGEPLLFHLTPNDLVYVPLPEEDSLPDFSNLSREQANRIYKMVSSTGRECHFVNARIASPIKSYDAQSSFGEMGSLNKLETTLDSDSLRIKDECIKLSVNRLGQIAPKLD

SEQ ID NO: 5372 - protein, 1546 aa, synthetic construct
  REGION 1..1546: note = Synthetic
MSTILGLDLGTNSIGWAVVDNEQKRIKAAGSRIIPMDAGKLGDFEKGNPVSQTAERTGYRSVRRLRERYLLRRSRMLRVLRIMGFLPEHYNKQIDRFGNIPEDSEPKLAWREGKDGKSEFLFHQAFEEMLNQFRREQPSLLSDGMKIPYDWTIYYLRKKALSQALTPEELAWVLLQFNQKRGYNKLRGEDEEDDNTKQEVYLEAKVVAVEDSGDKKGNETWYNVQLENGMIYRRSSKQPLDWVGKTKAFIVTTQLNPDGTEKRDKDGNIKRSFRAPKDDDWALLKIRTEQLIEKGHYTIGAYIFDNLLKKPQQKIIGQLVRTVDRKFFKDELHAILNKQKEFITQLNDRNLYAKCIEELYPNNEAYRNSIAQRDFTYLLADDILLYQRPLKSKKSLISNCPFEHRDYTDMETGEIKKSPIKCIAKSHPLFQEFRLWQWISNLRIYRRGGYDEGRIVPEEDITAKLLPDEMSYENLFLWLNDRKSIDMKSILRFPGFKFNKKEYDTYRWNYSEDKEFPANETRATLLGGLSKAGIESSFLDSEQEEILWHILYSIENPVEYEKALVKYSSRQNWNDEQKEAFLNAFKKLTICKEKDYGAYSAKAIKKLLAVMRCGTLWSADNIDENTHNRIDKIINGIADDKISLRTRTVLIGKDSIEQFKRLSLTQACYLVYNRHSETTDADKWESPDDIDIWLRNFKQHSLNNPIVEQIVTETLRTVRDIWKQEGKIDEIHIEMGRELKKTAAERKALSNTIARNEETNQRIRVLLSEFLNPEYEIENVRPHSPSQMELFKIYESGVWEGINTNELNAVEKAEYEEALDIRSRIATSDGKKKPSRSEIARYKLWLDQKYISPYTGRVIPLGKLFTEAYQIEHVIPQSKYFDDSLSNKVICESEVNLLKSNELGHEFIVNHQGDKVQLTLGGTVEILSVEAYEKLVYKLFASNRAKLKKMMLDEVPDEFSSRQLNDSRYISRLIMHLLSNMVRTEDNEGDIEVEAKSKNVIACSGAITDRLKQDWGVNDVWNRIILPRFERLNNMEHTTQFTSTTASGHTIPDMPIELRQGFNKKRIDHRHHAMDAIVIACTTANHVNLLNNEAAQSNKQRYDLQRILRTTETYIGSDGKQHEAFRAFKKPWNTFTQDVFETLNNIVVSFKQNLRVINKSSNYIVSYKDDQGNLRIDKTGNKKKGLTRQTKGDNWAIRKALHKETVYGEVNLQLQKEEKVKEFIKHPERIVNKELKQFVKQKLNEKRHLHYNDKQIVSYFEDYFNNNDDTWTEVKDGKTTVYYYTKETNKQYYATRKDLVDYMKDCSSVASAEKNINAITDSGIRKIMFAHLATENNDASKAFSAEGIDRMNENIVALNNGKKHQTIKKIRVYEQANKFAIGTSGIKSKKYVEAAKGTNLFFVIYTDDKGSRGYATIPLNIVIDLQKRYKTEWQKHLAERLKEKDIALMPEKSSILYILSPGDLVYVPKGEEKMTNVIDTSRIYKTVSMSGRQCFFIFNTISSIIYPKVEFESLNKMERAITGEMIKEVCIPIKVDRLGNIIKIGQ

SEQ ID NO: 5373 - protein, 1546 aa, synthetic construct
  REGION 1..1546: note = Synthetic
LHISKKSSNFAQNCHKQEIIDIMKKKILGLDLGTNSIGWAVVNEEDTKKSISHAGSRIIPMDAKLMGDFESGNSVSQTATRTAARGARRLYERHALRRERLNRVLTILGFLPEHYTGELNRYGQLNQRAEPKLAWEMVNGKYSFLFKDSFHEMVREFAQVHPELLVNGRNIAYDWTIYYLRKKALTQAITKQELAWILHQFNQKRGYNQARGEEDEQKENKRQEFITQKVISVRDTGEKSKGKSVYEVCLENGWIFTKESKYPLDWEGKTKNFIVSTTLNSDGTDAIDKDGKIRRTFRAPADDDWGLRKIKTQHDIDASHKTVGEFIYDALLHNPDQKIIGQLVRVVDRKYYKDELKRILDTQKQFIPELQNGDLYDECIHALYPQNEAYRNSIAGKDFTYLLLNDIIFYQRPLKSKKSLINECPYEYHVFKEKGGKWQKQYLKCISKSHPIYEEFRLWQFVENLHIYREATNGIGKEDCTAELIANKADLISWLLTQKEVSEKSLLTQLVGKNKIKGLSWNYVSEKDKKYPAAPVSSTIIGTIKEAGGDINTLTDPFEIRKNKHHRKLSGKEQDEKAKKNNRIINNLEQIWHMLYSISDKSQLLAALKHYAETNHLSDVFVEKLGKMKPFSDYGAYSEKATRKLLSLMRCGEYWSEEAIDANTKSRIEHIRTGEVDDAISERVREKLEAMNKIKDFQGLPLWLAEYVVYDVRKNDTKWETPEDIDKYLQSFRLHSLNNPIVEQVVMESLRTVRDIWKQEGQIDEIHIELGRDLKQNAEQRKKTQQRQQENEKANLRAKLLLQEFMNPDMEIEGVHAYSPSQQELFRIYEDGVLSANKPDDETQRIINDLSSLKQPSAQDIKKYRLWLDQKYISPYTGEIIPLAKLFTPAYQIEHVIPQSRFIDDSMSNKVICEAEVNARKDRKLGHEFIVKCGGEKITLSGGKVVTILSQEAYEDTIRKNFSGDPRKQEKLMLDDIPEKFVARQKNDSRYISRLMMQLLSNIVREKISNTEYEPEAVSKNLIVCNGATTTRLKKDWGINDVWNKIILPRFESLNKIQKTTVFTTKTANGHIIPNMPLELRQGFEKKRIDHRHHAMDAIIIAFTTRNHVALLSNESALDKDKNARDDLQTLLRKREVWRSADGTEHYKFTDFIAPYDGFQKDVQDTLENIIVSFKQNLRVINKSSNRSVRFVDGKKQMVPQKKGDNWSIRKSLHKATVFGEVNLRKKKFANLNYALQHVEDIVEKDLRTKLRELLQEGKDEKQIKKYFASEPDVWADVNLKRIEVFYYTKDTNDHYYAVRTALDDSFTEDYIRNKVTSEAIQKILLAHLARCNNDPKLAFSPDGIEQMNADIQQLNNGVPHKPIYKVRKYEESKKKFAVGQIGSKSKKFVEAADGTKLYTFVYEKTNPDYSKSRKLVELSLVDVISAQKEYGKHWKQEIDKKLHLQGSVAAEYSFAFSISPGNLVYVPTEEEIQRQKYDFSANRIYKVVSLDGENPNFIPSNIASMIVDSVEYTRHNKTSRDAYGRLIKEICVPIKVDRLGNIIEP

SEQ ID NO: 5374 - protein, 1546 aa, synthetic construct
  REGION 1..1546: note = Synthetic
MLQYKNILMKRILGLDLGTNSIGWALVKEKENDNETVNDNMIIAAGSRIIPMDASIQGDFEKGNSVSQTADRTNARGIRRLLERHKLRRERLNRVLDVIGFLPEHYSAAITRYGKFKDDDGCKIAWKKDNDGKWTFVYNGSFNEMLGDFTLHQPEWLADGKKVPYDWTIYYLRKKALSQPLTKQELAWLLLNFNQKRGYYQLRGEDELSEDKSKLVEYYALKVVGVEDTGEKKGKDTWFNIMLENGMVYRRPAAVAPDWIGKTKEFIVTTDLEKDGTPKKDKEGNIKRSFRMPKEDDWTLIKKKTENDIDRSGKTVGEYIYDALLANPTQKIRGKLVRTVERKYYKDELKKILESQKRFIPELNDRALYIKCIEELYRSNDAYRKSIELFDFTYLFIDNIIFYQRPLKSKKSLIGNCPYEEHNYTEKGTGEVKTAPVKCIAKSNPIFQEFRLWQFVQNIRIYERQKKVGDSVKTDVDVTDEFIKSADDVVAIFDFLNDRKDITQNILLGTFFKIKKPKGKDSDYPYRWNYVEDKTYPCNETRAQILKGLKDAGVNAAFLNKDNEYRLWHILYSVEDKQEIRKAMDKFATANGLGEKFAEVFSSLPPFKKDYGSYSEKAIKKLLALMRTGRYWSADAIDKHTLERIDKIISGEYDERIRTRVREKAINLTDVSHFKGLPLWLACYIVYDRHSESKDITRWNCPADIDQYLDHFKQHSLRNPIVEQVVTETLRTVRDIWRQYGKIDEIHIEMGREMKNPADVRKKMSKRMTENENANLRVKALLTEFMNPEFGIENVRPYSPSQQEMLRIYEEGALESVDEVPDEISEIINKFNQSDIKKRPTHSEIMKYKLWLEQNYQSPYTGRTISLSRLFTDDYQIEHVIPQSRYFDDSMSNKVICEAEVNQLKDRMLGYEFIKAHHGEKVHISMGEHVTILSVKEYEELVQKNFKKNPVKMKKLLMDDIPDKFIERQMNDSRYISKKMKSLLSNMVREESEQEDISRNVITCNGAITDRLKRDWGVNDVWNHIILPRFERLNAITGSERFTTTSTNGHTIPNMPLNLQKGFNKKRIDHRHHAMDAIVIACTTRNHVNLLNNEAAMSKNNAMRYQLSHKLRRYEDTVVTRNGEQRTVCVAREFLKPWSSFNADVEQALRGIVVSFKQNLRVINKTVNKYQKIVYNEEKHIKEKKIVRQEEHNGKHLLAIRKPMHKDTVYGEVNLRRIKEVSLRDAVANPKAIVDKDLKKKIMAMKELDHNLKQITKYFEDNKDAWQDVNLKKINIYYFTKETNDRYFATRFGNDLVSLFSKTTKADDAEKLIDKITDTGIQKILLRHLKANGGDCQKAFSADGIDEMNRNITQLNGGKPHKLVYKVRIYEKADKFAIGNKGNKSAKYVEAAKGTNLFFAVYQKEVTDSKTGETTMKRVFDTIPLKTVIDRLKNKQTPAPEEKDGAKLLFVLSPNDLVYLPTKNEIKSGTIKRPLDKSRIYKMISSSGNQCFFLNYNVASSIIDKFEFSPLNKMERAITSEMIKETCIPIKVDRLGNITEINNEKI

SEQ ID NO: 5375 - protein, 1545 aa, synthetic construct
  REGION 1..1545: note = Synthetic
MKKILGLDLGTNSIGWALTNNDFDNKLGNIEGLGSRIIPMSQDVLGKFDSGVSISQTAERTKYRGTRRLVQRFLLRRERLHRILNILDFLPKHYSEVIDFDKKFGQFKPEREEKLSFYKNENGKNQFLFLESHQEMLSEFKLIYPDLKKIPYDWTIYYLRKKALTKKISKEELAWILLNFNQKRGYYQLRGEEQEENKNKLEEFHTLTVVDVIEREKGKSGIWYNVILENGWIYKRESKIALFDWVGKQKNFIVTTELNDDGTVKLNKDNEEKRSFRSPKEDDWGLRKIRTEQTINQSGKSVGSYIYDELLKNPNQKIKGELVRTIERKFYKDEISKIIKTQIEFHSAILTDRNLYKKCIDELYRHNDSHKSNIKDRGFDYLFLDDIIFYQRPLKSKTSLISDCSLEHRPIKDKKGVLVKDSNGKQILKPLKCIAKSNPIFQEFRLLQFVKNLKIFKKEIIDDIDVTIDYLKTEEDLVELFNWLNDKAEISQKQFLAYSKFKLKEDKFRWNFVEDKIYPCNETRNQFLNAIVKIDVDKTFFDAKTTQDLWHILYSVTDKIEITKAITTFAKRHNLPEEFIANFSKLKPYKKDYGSYSEKAIKKLLTLMRRDKTWNEDAISNKVTAKISFIKERLESINYDPSILEKVSDSDIPKQVLKSFIKCTEFNKGLNTYQASYLIYDRHSEASDISKWKTPADIESFLKHDFKQHSLRNPIVEQVITETLRVVKDIWQHYGEGRENFFNEIHIELGREMKNNAADRKRITDNINQNENTNLRIKAILTELKNDGVNDVRPYSPSQQEILKIYEEGVYSSENRKEKLEDIEKIRKNAKPTTSEIIKYKLWLEQGYISPYTGKLIPLSDLFTTKYQIEHIIPQSRLFDDSLSNKVICESEVNDLKGNKTALEFILKNEDRIVTLTGGKTVKIFTKESYNQHITSYYSKNKNKQKRLLSEEIPEKFIERQLNDTKYISKIVKNLLSKIVREDDEQEVTSKHIVSLNGSITSKMKQDWGLNDVWNHIVTPRFERLNALTNSNKFGNWENKFGKNVFQATVPDEIAKGFSKKRIDHRHHALDALVIACVTKDHVNYLNSMNSERKNYSLVSKLRVQQEQIITKDNHDGTLCEEKKLIAKEFHKPWTNFTKDAKDILNQTIISFKQNTRVINKAVNKYQVWKEEDGAMKKITTKQVKGDNWAIRKPMHAETVSGKVFLKRIKQSHITIANAIEQIGLIVDKEIKKQLVAKIKQYPNNSDGLKKHLKAFPVMIDGKAIDKVQIYETIEATATRERNNLDITFDEKKIEKITDTGIQKILLNHLKQELYQNAIDENGKKIAPHEVAFSEIGIDELNKNIIALNNGKNHQPIKKVRIFEESKRFSLGQTGRKTDKYVETAKGTNLFFAIYQDENGKRNYKTIPFNEVIERQKQGLCSALEIDENGNYLLFTLSPNDLVYVPTEDEKENITTINFDKLSKEQTERIYKFVSCTSGEGHFVSNNYSKEIISNENGSNNKNERMLEFNNSNTIYDEKEKPIMIKSVCWKLEIDRLGKIKRNIR

SEQ ID NO: 5376 - protein, 1545 aa, synthetic construct
  REGION 1..1545: note = Synthetic
MKKILGLDLGTNSIGWAVVNADEIVRENETSYLQPKSISSAGSRIIPMDEGVLGDFDRGNTKSQTKGRTDFRSARRLLERYLLRRERLLRVLKLMGFLPEHFANQIDEFGKFVDYDEPKLAWRKGLNGKYEFVFKDSFEEMLKEFATSQPQLVSDGKKVPYDWTVYYLRKKALAQRITKEELAWILLQFNQKRGYYQLRGEEEEEQHDRLVEFLAQKVIKVEATGEKKGDDVWYNVYLENGMVYRRTSRFPLDWEGKIKEFIVTTELEKDGSPKIDKEGKVKRSFRAPKEDDWTLLKKKTELDIDNSNMTVGCYIYASLLKNPDQKIIGKLVRTVDRKYYKEELKQILEVQKELIHELQDTALYQACIEALYPNNEAHRNNITKPDFINLFINDILFYQRPLKSKKSLISDCPYESHYDKDGTPHPVKCIAKSNPLFQEIRLWQFVQNLKIYQREKMVSGGQLDLFGNELAGKLQTDVDVTSEFLKSEDDFVQLFEWLNERASIKQDTLLNSYFKIKKEKGKDQYPYRWNYVEEKEYPCNETRAVILSGLSKCDVSSDFLTHEQEMGLWHLLYSIDDKNEIVKALKKYAEKNDLPDTFVEVFAKIKPFKKDYGSYSEKAIKKLLPLMRMGKYWSADTIDSKTKERVEKIITGEYDENIKNRVREKAINLTDITHFKGLPIWLACYIVYCRHSEAKEIVKWETPEDIDAYLKQFKQHSLRNPIVEQVLTETLRTVRDIWKQEGQIDEIHLELGREMKNPADKRKKMTESILQNENTNLRIKAMLAEFMDPDMGIENVRPYSPSQQDILRIYEENALDNLSKDDKDFDFISKMSKTANPSKSDILRYKCWLEQKYRSPYTGEVIPLSKLFTPLYEIEHIIPQSRYFDDSFSNKVICEAEVNKLKDRLLGYEFVKSNAGRIVQISQGKTVKVFTVEEYEKFVKEHYSSNRMKMKKLLMDDIPDGFIERQLNDSRYISKWVKGLLSNIVREKLENGEYEQEAVSKNLISCNGSITDKLKKDWGMNDVWNSIILPRFQRLNELTGRQCFTAYNAEGHEIPNMPLELQKGFNKKRIDHRHHAMDAIVIACATRDHVNLLNNEAAHSKHNANRYQLQRKLRRFEKIIIDGKEKEIAKEFLKPWDTFTTDAKQVLENIIVSFKQNLRVINKATNHYQHYDDEGKKTMRKQEKGDSWAIRKSMHKDTVFGEVNLRMKKTVSFGEAIKRPERIVNKDFKAKIMELLREGRDAKYIKKYVEENKDVWSDINLSRIEVYYFTKETSERYYATRFLSDLVSYFAGVTKFEDAIKKIEAVTDTGIQSILKAHLQAKGNNPELAFSPDGIDEMNRNIVALNRGKFHYPIYKIRRFERGNKFAIGQTGNKTTKYVEADKGTNLFFAVFGIEKLNKETGETESVRSYLTIPLNVMIGCQKRYGSKWRVEIESFLKEMELVSVDATLLFILSPNDLVYLPTKIDNDGASRIVERSRIYKAVSFTGNRFYAIPYNVARSIVDKTEYTQLNKVEFSDNKDSIKEICVPIKVDRLGNIIELNGQKL

SEQ ID NO: 5377 - protein, 1545 aa, synthetic construct
  REGION 1..1545: note = Synthetic
MKKILGLDLGTNSIGWAVVNSENDENGDEKIKCIEAAGSRIIPMDAATLGDFAKGNTKSQTKERTDARGIRRLHERHLLRRERLNRVLSVMGFLPEHYDNALTRYGKFKDDKECKIAWKRNDDGKWTFIFMDSFNEMLSDFAACQPDWLAGGKKVPYDWTIYYLRKKALSRALTKQELAWLLLNFNQKRGYYQLRGEDEQSDDKGKLVEYYAVKVVDVKDTGEKKGKDTWFDVILENGMVYHRPAAEAPDWIGKTKEFIVTTDVEKDGTPKKDKDGNIKRSFRMPKEDDWTLIKKKTESDIDSSGKTVGEYIYDSLLADPTQKIKGKLVRTVERKYYKSELKRILDSQKRFIPELNDRTLYTACIEELYESNDAYRQSIASYDFTYLFVDNIIFYQRPLKSKKSLIDNCPYESRSYVDKESGEVKTAPVKCVAKSNPLFQEFRLWQFISNIRIYERQKIVDGHLKADVDVTGEFIKDEDDVVRLFDFLNDRKEIKQDSLLSTYFKVKKPKGKDSSYPYRWNYVEDKTYPCNETRALMLKGLKDAGVDEAFLDKTNEYRLWHILYSVDDKQEIKKAMATFVCKYNKDEENKRKDKNNKAITLDDRFVEAFSALPPFKKEYGSYSEKAIRRLLPLMRMGKYWNVEAIDAATRVRINNIIDGVYDETIMTRVREKTVNLTDVSHFRGLPLWLACYVVYNRHSEAKDVSRWNSPDDIDRYLSSFKQHSLRNPIVEQVITETLRTVRDIWRQYGRIDEIHVEMGRDLKNPADVRAKMSKRVAENENANLRIKALLTEFVNPDFEIDNVRPYSPSQQDMLRIYEEGVLESMDEVPDYISEIISKFSQTDEKKRPTHAEMIKYKLWLDQKYQSPYTGRTIPLARLFTDDYQIEHVIPKARYFDDSMSNKVICEAEVNQLKDRLLGYEFIKAHHGEKVSVSIGDPVTVLSVEEYEQLVQRNFRKNPMKMKKLLMDDIPDGFVERQLNDSRYISKVVKSLLSNMVREKDECEATSKNVITCNGAITDRLKREWGVSDAWNRIVLPRFERLNRITGTSQFTTPSANGHLIPDMPLNLQKGFNKKRIDHRHHAMDAIVIACTTRSHVNLLSNEAAMSKNKSTFYQLSHKLRRYESVIVTRNGETRTMSVAREFFKPWPTFTVDVEKALRNIIVSFKQNLRVINKTTNKYQCIENGKKRLKSQVKGDSWAIRKPMHKDTVYGEVNLRRIDEVQLKKAVANPKAVVDKDLKKKLMAMIELGFDLKKIKQYFEDNKDAWQDIDLKKIKVYYFTKETNDRFFATRFGNDIVSLFAKVDKQSKAKDIISSITDTGIQKILLRHLEANDNDVQKAFSAEGVEQMNRNIVELNNGKPHKPIYKVRKYEQADKFAVGVKGNKGSKFVEAAKGTNLFFAVYQKEMVDSTTGDIIKKRIFDTIPLKTVIDRQKNMQTVAPEEKDGAKLLFVLSPNDLVYLPTDEEISSGIINQPLERDRIYKMVSCTGSRLYCIPYNVANPIIDKEEYTQLNKVEFTDMKKSIKEICVPIKVDRLGNVIEINNQAL

SEQ ID NO: 5378 - protein, 1545 aa, synthetic construct
  REGION 1..1545: note = Synthetic
MRNILGLDVGTNSVGWALVNSDLENRSGRIKGAGSRVIPMSQDVLGKFDSGVSISQTAERTKYRGARRLVQRFLLRRERLHRVLNILNFLPSHYSEAIDFDKHFGQFKPEREEKLSSYKDMTGKNQFLFKESYNEMLTLFRAQFPDLKKVPYDLTIYYLRKKALTERISGQELVWILLNFNQKRGYYQLRGEEEEENKGKLVRFYSLMVTNVIDTNEKNKAGQTLFNIVLENGWDFIKPSSSNVEWAGKVKEFIITTEVEDDGITPKKDKEGREKRSFRAPLENDWTLIKTKTEQDIKSSGKTPGHYIFDALLKDPAQKINGKLVRTIERYYYKEELKQILETQSSFHQELSDEKLYGDCINELYKRNEAHKNNIKSRGFAYLFLEDIIFYQRPLKSKISLISDCSFEQHPLKDKKGNLVRNENGQPILKPLKCIARSNPIFQEFRLLQFVKNLSIYERELTNDGKIEFDVDVTAKYLPTVNDLEELFLWLNDKAEISQKQLLSYPRFKLKEEKFRWNFPEDKIYPCNETRSQFLRAASKIEALDESFFSSGIMQDLWHILYSVTDKIEIEKAIGSFAKKHNLPEDFIPAFSKLKPYKKEYGAYSEKATKKLLQLMRFGNQWNGSVIHPGTLKRIDKIQTGEFDEKIGNRVREKAIHLNKLSDFQGLPLWLASYIVYDRHSEASDLAKWEHPADVERFLKNDFRQHALRNPIVEQVIRETLRVVKDIWQHYGDGAANFFDEIHIELGREMKNPAKKREQIAKKIAENENTNLRIKAILTELKNDGNISVRPYSPGQQEILKLYEEGVYSKEIRKDKLEELDKIRKNAKPTPSEINKYKLWLEQGYISPYTGKMIPLSQLFTTKYQVEHIIPQSRFFDDSLSNKVICESEINDLKGNDTGLEFIIKNSGRIVTLSGGERVTIFTKEAYNQHINSYYSKHKDKQKRLLSEDIPESFINRQLNDTKYISKVIKMLLSRIVREDDEQESTSKHVITLNGAITSRMKQDWGLNDVWNELITPRFERLNRMTDSNDFGRLELKKDAFGNTGKQVFQTTVPDEIARGFNRKRIDHRHHALDALVIACVNRTHINYLNNLNARDEDDKTVKYELRNKICFKDKTDNSGNYQWKFHKPWESFTSDTKSVLDKAVVSFKQNTRVINKTTNKHLAWVEEEGHLQKASVSQHKGDNWAIRKPMHAETVSGKVFLKRVKQNPVAIATVLEKIDLIVDKEIKKKIKEIVTLYPNNTEGLKKYLKANPVKIGDKIIDRVLIYETIEATATRKVLDISFDEKKIEKITDTGIQKILLNHLRQEKYQTVTNESGKKIASHEAAFSEDGLDDLNKNIVILNDGKNHQPIIKVRVFEEGGKFRLGSNGAKRDKYVDTAKGTNLFFAIYKSANGKRDYKTIPLNEVIESQKLGALEKLKPSRSSIPATYTDKNNLEYTLLFYLNPNDLVYVPTPEEIGNSDQIDIHNLTKEQVSRIYRMEKTSGKECYFIQNNIADLIAPYDPKLKFGEFGSQNKLQISVDGLKISESCLKLDITRLGRIKKIYP

SEQ ID NO: 5379 - protein, 1544 aa, synthetic construct
  REGION 1..1544: note = Synthetic
MKKILGLDLGTNSIGWALIQQEFKDKKGEILGMGSRIIPMTQDIKDEFGKGNSISQTADRTGFRGTRRLRERHLLRRERLHRVLNVLGFLPQHYADQIDFKKRLGKFLDKKEPKIAYKEIWNQEKEKNEFDFIFKDSFEEMLKDFRKYQPQLLESDKKLPYDWTIYYLRKKALSQKIAKEELSWILLNFNQKRGYYQLRGEEEEENPNKLVEFYSLKIINVIADEKANAKGETWYSLHLENGWVYRRSSKTSLQDWTDKIRDFIVTTDLNDDGSTKTDKEGNEKRSFRAPSEDDWTLIKKKTEQEIDRSEKTVGTYIYDTLLQKPNQKINGKLIRTIERKFYREELKAILEHQLKEYPELQNEDFFNDCIKELYRNNEAHQTTLSRKDFVHLFLNDIIFYQRPLKSQKSSIGNCSLEYRKYKTKDKEGNEIEKTEYLKAIPKSHPLYQEFRIWQWLYNLKIYKKEDDTDVTEQFVKSDEDLENLFTFLMTQKEVDHKAILKFLLVSSELKGKALSNEMAKYRWNYVYNSEKDESKKYPCNETGYEIRRRLAKVENINDDFLTNEVEFKLWHLIYSVTDKLEFEKALKSFANKHSLDDSSFVENFRKFPPFKSEYGSFSEKAIKKLLPLLRLGKYWDWENIDIKTKDRIGKIITGEYDEEIKNRVREKAIHLTKENDFKGLQLWLAQYVVYDRHSEANLAGKWNSVSDLENYLKEFKQHSLRNPIVEQVVTETLRVVKDIWAKYGNGAKDFFNEIHIELGRDMKNTADERKRLTNVVSDNEATNLRIKLLLTELKDNSDGKLQVEEVRPFSPPQQEILKIYEDGVLNSNVEIPEDILKISKTAQPSTSELQRYKLWLEQKYRSPYTGQLIPMSKLFTHEYEIEHIIPQSRFFDDSFSNKVICESAINKLKDKQLGLEFIKNHSGEKIETGFGKSIEVFTEQEYLDFIKEHYAKNRSKKNKLLLEEIPEKMIERQLNDTRYISKFISNVLSNIVRSDNNDDGINSKNILPGNGKITNQLKQDWGLNDVWNELVLPRFERMNQLTNSTNFTSWNENHQKFLPTIPLEFSKGFQKKRIDHRHHAMDALVIACATSDHINLLNNKHAKSNERFDLNRKLRRFEKVAYNDLKTGKRVEKEVPKDFLKPWENFTKDAKDELDKIVISFKQNLRVINKTTNKYESYKDENGNLRIGKDGKPKKDLTTQTKGNSWAIRKPMHKDTVSGLVSLRKKKEVLLSVALENYNEIVDKDLRKEILNLVKLKYDKKLLIKFFKDRQNKWNDKDISRVEIYFWDNDNVASRVSLDTSFNEKRIIETITDTGIQKILLAHFKNYKNRFDEKGKEIAPETLAFAPEGIEEMNKNIVELNKGKFHQPILKIRTYEAKGNKFNVGLTGNKKDKFVEAAKGTNLFFAIYQDENGKRSYETIPLNIVVERQKQGLDSVPEINEKGSTLLYYLSPNDLVYVPTEEEKGNVNSIDFGNFKKGQMGNIYKMVSSSGTQCFFIKQNVSTSIVNKIEFSALNKMEKSIDGSMIKEFCIKLKVDRLGNISKA

SEQ ID NO: 5380 - protein, 1543 aa, synthetic construct
  REGION 1..1543: note = Synthetic
MKKILGLDLGTNSIGWAVVNANETARENDTVYLKPFGISSAGSRIIPMSADILGDFDKGNSISQTAERTRLRMTRRLRERNLLRRERLLRVLSVMDFLPEHFASRINRYGKFVDDCEPKLPWRTSKSGHAEFLFQDSFQEMLADFAQHQPQLLADGKKVPYDWTIYYLRKKALTHRITKEELAWILLQFNQKRGYYQLRGEDEEEDASKKVEYLSQKVIRVEATDEKKGEDTWYNVYLENGMIYRRTSRFPLDWEGKTKEFIVTTDLEKDGSPKANKYGEIKRSFRAPKEDDWTLLKKKTEYDIEQSHKTVGCYIYDALLTNPSQKIIGKLVRTVERKYYKEELKRILEIQQELIPELRDTSLYLRCVEELYPTNKAHRNSLGKPDFVRLFVDDILFYQRPLKSKKSLIDNCPYEYHLDKDGNIHPVKCVAKSNPLFQEFRLWQFVQNLRIYQREKTVYDRQLDLFSNTPAGKLQTDVDVTSCFLKSEEDYVMLFNWLNERSSIKQDTLLNTYFKIKKEKGKDKYPYRWNYVEDKEYPCNETRAAILAGLEKCNVCADFLTHENEMALWHILYSIEDKIEINKALNSFADKHQLGSNFAEVFSKIKPFKKDYGSYSEKAIKKLLSLMRMGSYWSDANIDAKTRERIEKIITGEYDERIKNRVREKAINLTDINYFKGLPVWLACYIVYDRHSEAQEIEKWNKPEDIDQYLNTFRQHSLRNPIVEQLVTETLRTVRDVWKQEGQIDEIHLELGREMKNPADKRRQMTERIQQNENTNLRIKAMLMEFMNPDLGIDNVRPHSPSQQEILRIYEENALDNLSKEDKEYDFISKVSKLAQPSKSDIIRYKCWLEQKYQSPYTGRMIPLSKLFTSAYEIEHVIPQSRYFDDSFSNKVICESEVNKLKDRQLGYEFIKNHAGEIVQLSQGGTVKILSVDAYEKFVKDYYANNRTKMKKLLMDDIPDGFIERQMNDSRYISKVVKGLLSNIVREKQANGEYEQEAVSKNLISCNGTITDRLKKDWGMNEVWNSIILPRFQRLNQLTGKNCFTTFNREGHEIPNMPLELQKGFNKKRIDHRHHAMDAIIIACATREHVNLLNNEAAHSKHNANRYQLQRKLRRFETVIINGKEREIAQEFIKPWDTFTTDSWQILDNIIVSFKQNLRVINKTTNHYQHFDQKGKKGLEKQNHGDSWAIRKSMHKDTVFGEVNLRMKKTVSLNDAVKKPENIVNKDFKKKVKELLYNGYDAKSIKKYVEENKDIWSDINLSKIEIYYFTKDEKKRNGEPKERYFATRKPLDTSFDQKRIKESVTDTGIQKILLAHLASKEDNPELAFSPDGIDEMNRNIVALNNGKFHQPILKVRVYEKAEKFAVGQTGNKNKKFVEAAKGTNLFFAFFETEKEDKESGNKEAIRSYTTIPLNVMIDCQKKYGAHWRSNIEVFLKDKDMVDAEAKLLFILTPNDLIYVPTNEDTSNGIMQIDKKRIYKTVSFNKYQCFCINSNVATPIINKVEYTASNKMERAITGEMIKETCIPIKVDRLGNIIELNGTKV

SEQ ID NO: 5381 - protein, 1542 aa, synthetic construct
  REGION 1..1542: note = Synthetic
MEKRILGLDLGTNSIGWALVKGERHENDNETILSYIEAAGSRILPLDAAAQGDFEKGNPAKTQTSERTRMRGMRHLLERSLLRRERLHRVLDIMDFLPPHYSQSLTRYGKFKADTECKLAWRKTETGHYEFLFQDSFQEMLQDFQNHGKLEENKKIPYDWTIYYLRKKALTQPVSKQELAWILLNFNQKRGYYQREDQAVDDNQKKRVEYQALKVISVEDTGEKKGKNTWYDVRLENGLVYHYSAPIKPDWKGETKEFIVTTTIDQNGKPELDKDGKPKYSMRAPKEDDYKLLMEKTKKDITDSGKSVGEYIYDALLVNPQQKIRGGLVRTIERYFYKKELEKILLSQERFIPELTDRELYRRCVEELYPSNDAYRHLIESRDMRYLLVEDILFYQRPLKSKKSLIDDCPYESRSYVDRETGEIKSSPVKCIAQSHPLFQEFRLWQFIHNLRIYQNERSVEGKLQLDVDVTEEVLPTPESKAALFRFLNDRENVTQEILLKEVFKGRKLSVKDCPYRWNYAGEGKKYPCNETRHLMLKLLKKAGIDTAFLTPEKEQALWHIMYSVEDKDQYEKALSTFARKNDLPDGFKEQFKKAPTFKKDYGAYSLRAIKKLLPLMRVGEYWSADCIDSETKERISQIIRGEMDEKVSQRMTKSRDSFTDISQFQGLPVWQACYVVYGRHSEATEIQRWEKPEDIDVYLKAFKQHSLRNPIVEQVVLETLRVVRDIWKTYGKVDEIHIEMGRDMKNTAEERKRIFNRNQQNENDNLRIKALLTEFMNPDFEIEGVRPYSPSQQEALRIYEDGAWSGLDEEKEDKKELEAIREILGKFSQSDKAKRPTHSEVLRYKAWLEQRYSSPYTGEAIPLAKLFTPAYEIEHVIPQSRFFDDSFSNKVVCEAEVNKLKDRMLGYEFIKAHQGEVVSLSGTGRCARILSPEEYEQRVTDCYKHNTAKMKKLLMEEIPDDFIQRQMNDSRYISKLVKSLLSNMVREEGEREAISKHVITCNGTITDRLKKDWGVNDVWNHIILPRFQRMKDLTGRNDFVAVNSQGHEIPSVPPELQKGFKKKRIDHRHHAMDAIVIACTTRNHVNLLNNEAAMSENKANRIALSRKLRRYENCAIYKGGETKNISVAKEFLKPWATFPADVERALGDIVVSFKQNLRVINKATNHYEHYKDGKKVKVPQKKGDMWVVRKPLHKDTVYALVNLRNVKTVGLKDAILMPDRIANKDLKKKVKELLAQGDDLKKIKKYFETEKDTWQDVDVKKIEVYYFSEETANHYYATRKPFDANVKIDSVTDTGIQKILRRHLEENGNKADVAFSPEGIARMNENIFRLNGNKHHQPIYKVRVYEKANKYPVGQTGNKASKFVEAAKGTNLYLAVYESEVVDKKTAEISKKRSYVIVPLRDAVARQKQGVPVAPERNEEGGKLLFVLSPKDFVYVPTEEERSKGEVLLPLDKNRIYIMMDASDGIVNFLPYSVANLIYALPKDQASGFCTDGRMIQNEFGLGSPKSKNERALTGEMIKEICLPVKVDRLGRITEINGNKV

SEQ ID NO: 5382 - protein, 1541 aa, synthetic construct
  REGION 1..1541: note = Synthetic
MKRILGLDLGTNSIGWALTNNDFDNKFGNIEGIGSRIIPMSQDVLGKFDSGVSISQTAERTKYRGTRRLVQRFLLRRERLHRVLNILDFLPKHYASAVDFDKKFGQFKPEKEEKFSFFKDESGKNQFLFLESHQEMLAEFKLTNPDLKQVPYDWTIYYLRKKALTQKISREELAWIILNFNQKRGYYQLRGEEKEENKNKLEEFHTLTVVNVIEREKGKSGIWYNVILENGWVYKRESKIGLFEWVGKQKNFIVTTELNDDGTVKLNKDNEEKRSFRAPKEDDWGLVKIRSEQTINQSGKSVGSYIYDNLLKNPNQKIKGELVRTIERHYYKSELKQILETQIEFHSATLKDRNLYKKCIDELYKHNDSHKNSIKERGFDYIFLDDIIFYQRPLKSKTSLINDCSLEFRPIKDKRGNLVKDVNGYQILKPLKCIAKSNPIFQEFRLLQFVKNLKIYKKDIANDVDVTNDYLKTEEDVVELYNWLNDKAEISQKQFLAYQKFKLKEDKFRWNFVEDKIYPCNETRNQFLNAIAKIDMDKSFFDAKNTQDLWHILYSVTDKIEISKAITTFAKRYSLPDGFIINFSKLKPYKKDYGANSEKAIKKLLPLMRFGNHWNEKNIDTKTLARIDKIETGEFDENIKTRVREKALHLNVLSDFKGLPLWLASYIVYDRHSETSDISKWKTPADIEHFLKHDFKQHSLRNPIVEQVITETLRVVKDIWQYYGEGKENFFNEIHIELGREMKNNAADRKKITDNISHNENTNLRIKAILTELKNDGISDIRPYSPSQQEILKIYEEGIYSSENSKEKIEEVDKIRKNAKPTTSEIIKYKLWLEQGYISPYTGKLIPLSDLFTTKYQIEHIIPQSRLFDDSLSNKVICESEVNDLKGNKTALEFILKNEDRIVTLTGGKTVKIFTRQAYNQHITSYYSKNKSKQKRLLSEDIPEKFIERQLNDTKYISKIVKNLLSKIVREDDEQEVTSKHIISLNGSITSKMKQDWGLNDVWNNIVTPRFKRLNTITNSSDFGKLEFKKDEFGNTGKQVFQTTVPDAIAKGFSKKRIDHRHHALDALVIACVSRAHINYLNNLNARDENDKTIKHELRNKLCLKTKPDANGNYNWEFHKPWENFTKHTEDELNQTIISFKKNTRVINKTVNKYVSYKDENGNLNLNLGKNGLVEKKIIPQKKGDNWAIRKPMHAETVSGKVFLKRIKQSHITIANAIEQIELIVDKEAKKQLAVRIKQYPNNAEGLKKHLKAFPVMIDGKAIDKVQIYENLEATATRKTLDITFDEKRIEKITDTGIQKILLNHLKQEIYQNTIDENGKKIPAHEVAFSENGLDDLNKNITALNDGKKHQPIIKVRVFEEGGKFSLGQTGNKADKYVEAAKGTNLFFAIYQDEKGKRNYKTIPFNEVIERQKQGLSSALEKHENGNRLLFTLSPNDLVYVPTEDEKENLTLLDFNKLSKEQAERIYKFVSCTSGEGHFVSHNYSKEIISNENGSNNKNERMLEFNPSNTIYDEKEKPVMIKSVCWKLEIDRLGKIKKIIR

SEQ ID NO: 5383 - protein, 1541 aa, synthetic construct
  REGION 1..1541: note = Synthetic
MKRILGLDLGTNSIGWALVDSEEQRILGMGSRIIPMDQGVLDTFSGGNPVETQTAARTAYRGTRRLRERALLRRERLIRVLNMMKFLPEHYASQIDFEKRLGQFFDEKEPKLAWKQNDEGRFEFIFQQSFNEMIEEFKNKGVVREDKKIPYDWTIYYLRKKALSQEIEKEELAWILLNFNQKRGYYQLRGEEEEENPNKLVEYYSLKIVDVIADEKPNSKGDIWYSLHLENGWIYRRSSKIPLFGWKDKTRDFIVTTDLNDDGTVKKDKEGIEKRSFRAPSENDWVLLKKKTESDIEKSHKTVGTYVYETLLQNPMQKVCGKLVRTIERKFYKDELKQILEKQREFHPELRDEDLYNDCVRELYRSNETYQFILSKRDFVHLFLDDILFYQRPLRSQKSAIGDCILEFKTYKDKDGNNIKEYLKVISKSNPLYQEFRIWQWLYNLKIYRKEDDEDVTLQFIANIEDKEQLFDFLSNRKSIEQKPLLEYLIKAKGLKKQVKTEAYRWNYVEDKIYPCSETKTMISTRLAKVKNVPEDFLTKEIEQKLWHIIYSVTDKNEFEKALGTFARKYDLDIASFVDNFKKIPPFKNEYGSFSEKAIKKLLPLMRLGKYWKWSDIDNNIQNRISKIIIGEYDEEIKDIVREKSIALTNENDFQGLQLWLAQYLVYGRHSEADIAGKWHSVADLEKYLNEFKQHSLRNPIVEQIITETLRVVRDIWQKYGQGAENFFSEIHVELGRDMKNTADERKKIANVVTENENTNLRIKALLMELKNNSDGKLEVENVQPYSPMQQDILKIYEEYAISTGLDNEKDEKVKEDIKKISRVAQPTTTELQRYKLWLEQKYCSPYTGKVIPLGKLFTEEYQIEHIIPKSRYYDDSFSNKVICEAAVNKLKDKCLGLEFIKNYHGQIVETGFGQKVTIFDEEAYQNFVKQHYAYNRSKRTKLLLEEIPEKMIERQMNDTRYISKFVLPLLSNLVRAEENDNGVNSKNVLPVNGKITTMLKQDWGLNDVWNDLILPRFVRMNELAKTIAFTSWNEQHQKYLPTVPLELSKGFQKKRIDHRHHAMDALVIACATRDHVNLLNNKHANTDTIRYDLQRKLRLFERVTYIDPQTKNNVTKDIPKEFKKPWDNFTVDARNELEKIIVSFKQNLRIINKATNIYTKYENGKKIKVSQKGLNWAIRKPLHKETVFAKVSLRKRKTVRLSEALKDWKRIVDKKLKQEIKRLTCQYGKFDVDTILRYFKDRKYQFGEVDVSRVEVYYFDEENAATRFLNDLVSIFKGITTADKAKETIKKITDTGIQKILFNHLEVKGNKPEIAFSPEGIEEMNKNIIALNNGKFHYPICKVRVYQALGNKFSVGTTGNKKDKYVVAEAGTNLFFVVYKKEGKRNYETIPLNEVIEHQKWRGTLSKEEQRRIPVIPIKNDRGIFVFYLSPNDLVYIPTEEQLSNVDISINDIKPDRIYRFTDSSDTTANFIPMSIADVLFNYNKDKQKKMGIEYPIQNEIGIGSQGSKNQKSINGEMIKDVCIKLKVDRLGNIKGISGL

SEQ ID NO: 5384 - protein, 1540 aa, synthetic construct
  REGION 1..1540: note = Synthetic
MKKILGLDLGTNSIGWALTSQDFENKKGEINGLGSRIIPMSQDILGKFDSGQSHSQTANRTSYRGVRRLYQRNLLRRERLHRVLNILNFLPKHYKESIDFERHLGQFKNNTEVKLNYRKNKDGKHEFIFMDSFNEMVAEFKVARKETKIPLDWTIYYLRKKALTKKITKEELAWVLLNFNQKRGYYQLRGEEEDESETSKKEFYSLRVKEVVATEDKNARGTWYHVILENNWVYKRQSKEPLNNWVGKTKEFIVTTQLEKNGTDKLDKEGNIRRSFSAVDSEKDWIAIKKKTEQDIEKSSKTVGQYIYETLLNNPSQKIRGKLVKTIERKFYKEELEEILKKQIGFHSELKDSELYKACVNELYPRNEGHQNNIKDNGFNYLFIDDIIFFQRPLKSKKSTISDCPYEERVFIKDGIRNIQKIKCIAKSNPLFQEFRLWQFLKNLKIHQKENIDNGKFDEDITDLIFTSDNDWVLLYDFLNDKKEVEQKHILDFLVENKKIVKSDKKNYRWNYVEDKKYPANETRASFLSRLKKVKTENDFLSKEKEAALWHIIYSVKDKKEYETAIRNFAIKNDLDEDSFVDAFIKYPPFKNDYGSYSEKAIKKILPLMRMGKYWDETKVADDVKNRILQIQERLESINYDNEVFKGDKKDRLKTIVDDEIPKQFVKSFINYKDKNPLTGLNTYQACYAIYERHSESGIIKPWKSPNDIDSYLNEFKQHSLRNPIVEQVVTETLRVVRDIWKHYGKGEINFFNEIHVELGREMKNSSDKRKAMSSRNIENENTNERIKSLLEELKNDSEDDVRPYSPSHQEILKIYEEGVYQNPEVSFLQVKEDDIDKIRKSSSPTKSEINKYKIWLEQGYISPYTGKIIPLSKLFSIDYQIEHIIPQSRYFDNSMTNKIICESEVNQLKDNKTAYEFLKVEGGRIVTLSNGNIVKLFNIDKYEKHCKQYFKKNRAKLNNLLSEDIPEGFINRQLNDSRYISKIIKTLLSNIVREDGEKEATTKRLVPVTGSITSRLKQDWGLNDKWNEIVAPRFMRLNELTNSKDFGEWDSKINAFRTKVPDEISRGFSKKRIDHRHHALDALIIACCTKKHTNYLGSLNSERENYGLKESLLIKNKQGDFTKHFQLPWVNFSTEAKETLEKTIISFKQNLRIINKTNNKTWQWEPQSDGTFKKILKKQKDSTNSTNKTNWAIRKPMHKETVSGAVKIKKIKKGFSNITNYLDKSNLIVDKSIKRKVKSLLTLFDNDLKKVRKYLKETPLLIEGKEITKAKVFEWSENSTATRVALNEKFTRKQLESITDGGIITILERHLQNYIGDDQKERFDLAFNSDGVDALNKNIKILNNGKNHYPIYKVRLYEEGSKFSIGESGAKAAKFVEAAKGTNLFFAIYYDEEKKKRVFETIPLNEVIAHQKQTASLPKDKRLPIQPSNIKGDFLFTLSPNDLVYVPTDEELENKSLVDFNNLSNKQVSRVYKMVSSTGTECHFINNHIAKLIKTYNSKTKMGEFGSLNKSELSIDDIRIKERCLKLNLSRIGNVKTLS

SEQ ID NO: 5385 - protein, 1540 aa, synthetic construct
  REGION 1..1540: note = Synthetic
MKKILGLDLGTNSIGWALVKNNFDKKEGKIIDSGVRIIPMDKGTMDSFGSGQSISQTADRTGYRGTRRLYQRSNLRRERLHRILNILGFLPEHYADSIDFEKYLGQFKKGQEIKLNYKPNPVGNDEFVFQDSFLEMVTEFKKEQPTLFYQKENGEETKIPCDWTIYYLRKKALTQEIEKKELAWLLLNFNHKRGYYQLRGEEEENTSKLEEFYALKIVNIEATEDKNSKGTWYNVNLENGFIYRRQSKESLENWVGKTKEFIVTTLLEKNGEVKLDKEGNPKRSFRAVDSEKDWIAIKKKTENDIYNSNKTVGSFIYDTLLQNPTQKINGKLVKTIERKFYKEELQQILETQIKHHPELRDKNLYEKCVQELYPRNEAHQNNILNKDENEMFRYLFMDDIIFYQRPLKSKKSTLSTCPFETRTFIKDNEKVEQGLKVISKSNPYYIEFRLWQFIHNLKIYKIEDEKDIDVTQQLLENENDITDLFDFLNDKKEVEQKHVISYFPALKKLTKKEKEAYRWNYVEDKKYPINLTRNQLLNRLNKVENLDLSQFLNKDIELQLWHIIYSVKDKNEFETALGTFAKKHQLDQTSFKEAFKKHPPYASDYGAYSEKAIKKLLPLMRRGKYWSENAIADTTKQFVADIYERIAHIKAETIDDGKLNQAIALVADDAIPKQFIKSFLKHKLDNPLTGLNTYQVCYAVYQRHSEPSVITQWKTPKDINAYLDSFKQHSLRNPIVEQVVLETLRTVRDIWNYHLKQDPSFKFDEIHLELGRDMKNSADKRKRISDQQNQNENTNNRIKLLLEEMQNEGARSFSPSHQEILKIYEEGIAQNPEVSYKDVKEDEVEKIRKNAKPSTSDIKKYKLWLEQGYISPYTGKPISLSRLFTHEYEIEHIIPQSRYFDDSLSNKIVCEADINRDKSNKTAYEYLKAKGGSIVEGARLLSLSEYESHCNKYFKKNRTKLRNLLSEEVPEGFINRQLNDSRYISKLVKGLLSNIVRDIDEKELTSKHLVPVSGAITSKLKQDWGLHEQWNKIIQPRFERLNELTNSNEYGYLGYQKDKDGKPVGKQFFRLVAPQGVSKKRIDHRHHTLDAMVIACCTRKHIQYLNSLSNEKEKYNLQPSLMIKNEQGDFTKIFIKPWQNFTIDIRSALETTPISFKKNTRVITKTNNKTWQWVKDENGKLKKKLVAQTKGDSRAIRKPLHKETVYGLVKIKQRKKGLASLKNYLEQPELIIEKSVREKVKALNKLFDKDKKKILKHLKDNPILQKGSIVDKIKVWEWTSNATASRVKLSDKFTRKQLESITDSGIQIILENHIKNYLDEKDKERFDLAFNPEGVEQLNKNIVQLNNGKKHHPIYSVRVYEEGSRFGVSKDERNKNKTKKYVEAAKSTNLFFAIYWNEEKQERVYETIPLNDVIEWQKARAKNKTFDEPMIPINAEKGRFLFSLSPNDLVYVPTEAEQENPNSVDFTNPNKEQMGRVYKMVSSSGNQCFFIQHQVSGMIESKKEFSALNKMEKSIKNIMIKSICWKLKVDRLGHIESMVK

SEQ ID NO: 5386 - protein, 1538 aa, synthetic construct
  REGION 1..1538: note = Synthetic
MKKILGLDIGTNSIGWALTEQDFDNKKGRIIDLGVRIIPMSQDILSKFDSGVSISQTAERTRYRGIRRLRERHLLRRERLHRVLNIMNFLPKHYAQNIDFENRKGQFIDNKEVKLNYKPEENGQFTFVFQDSFQEMLQLFKDNGYSENIPYDWTLYYLRKKALQHKISKEELAWLLLNFNQKRGYYELREEEEKEKEEKDVETIEEFYALKVVSVEEDKNSSANWYLVHLENGFIYRRKSTEPLDDWVGMTKEFIVTTTLDKDGTPKKDKEGDIKRSFRMVDSEKDWIAIKKKTEHDINNSGKQVGTYIFDTLLKNPTQKINGKLVKTIERKYYKEELKAILKKQKEFHTELNDKDLYYACIEELYPHNEAHRSNISDKDFTYLFVDDIIFYQRPLKSKKSTISDCSYEVKKYIKDGEKLEKPLKCIAKSHPLYQEFRLWQFIQNLRIYKKQGINEKGEVQINQDITQQLLPDEEAYTNLFDFLNELKEVEQYQLLKYFSDLKKLPKISKSEPAYTWNYVEDKKYPCNTSHSAFVSRLKKVKGIDVETFLTKEVEQHLWHIIYSVKDKKEFEKALGTFAEKYAIDTESFVENFKKFPPFLNDYGAYSEKALKKLVPLMRMGKYWSENDISDTTKENISDIMERLEDINFEKEKFESVTDDLVSKQLLKSFASFKDKNPLKGLNTYQACYAVYKRHSEAAEITQWKSPKDIEHYLNHIFKQHQLRNPIVEQIATETLRLVHDIWEYYGDGADNFFSEIHVELGREMKNPADKRKEMSDKNTEREKTNQRIKAILEELANDDSMEVKPRPYSPSHQEILKIYEEGVFENQEASDEIKNIRKSTSPTKSQILKYKLWLEQGYVSPYTLQMIPLTKLFSSQYQIEHIIPQSRYFDDSMNNKIICESVINEEKGNATAYEFIKARGGEKFDLGQNKIVTLAKFDDYEAHCSKYFRKNRLKLKNLLADEIPSGFIERQLNDSRYISKYIKGLLSNIVREDGENQVTANRLVHVNGTITAKLRHDWGLNDKWNEIVQPRFERMNEITNSQDFGFWDKSINAFRIQVPDEISKGFSTKRIDHRHHALDALVVACTTKDHTNYITSLNTERKNFSLVKKLREVEEVYKNDPITKERKLVKVAKAYKKPWDGFTLEAKNKLEEIVVSFKQNLRVINRTNNKFQKWVEQPNGQYKKEWIEQKGKNFAIRKPMHKETVSGKVYVKQEKKGIVALTNTLNDWELIKDDVIKEQVKKLIKQFKGDISLVKKHLKEHPIKKEGKKVEKIKVFEFVEATASRSELTDKFTQKQLDSVTDSGIRKILQNHVNKYVDKKGNLDFSKAFSPEGIEAMNANIQELNGGKAHQPIYKVRIYEVGNKFSVGEVGNKKDKYVESAKGTNLFFAIYWDEEKKKRNYETVPLNEVIEHQKQMVHLPKNERTELPIKPEIGRFLFSLSPNDLVFVPTQEEMDNPNSVNFNSLTKEQSSRIYKMVSSTGNQCFFVLSNVANTIYNKKEFSALNKMEKSIDDIMVKEICWKLEIDRLGNIKRVIQN

SEQ ID NO: 5387 - protein, 1538 aa, synthetic construct
  REGION 1..1538: note = Synthetic
MKHILGLDLGTNSIGWALVKSEQDCDDVERINGIEAAGSRIIPMDAAVLGDFAKGNTKSQTADRTAARGIRRMGERHKLRRERLNRVLDVMGFLPEHYSAALTRYGKFKDGEECKIAWRKDESGQWTFVFEDSFSEMLADFVAHQPEWLAGGRKVPYDWTIYYLRKKALSKPLTKQELAWLLLNFNQKRGYYQLRGEDEQTDDKGKLVEYYALKVVGVEDTGDKKGKDTWFSIMLENGMVYRRPAAEAPDWIGKTKEFIVTTDLEKDGTPKKDKEGNIKRSFRMPKEDDWTLIKKKTENDIDRSGKTVGEYIYDALLADPTQKIRGKLVRTVERKYYKEELKKIIDSQKRFIPELNDNELYGRCISELYQSNDAYRQSISSCDFTYLFVDNIIFYQRPLKNKKSLIDNCPYEEHSYTDSKTGEVKTAPVKCVAKSNPLFQEFRLWQFVQNIRIFERQKKIGDSVKTDVDVTGEFIKSADDVVSLFDFLNDRKDITQSVLLGTYFKIKKPKGKDSDYPYRWNYVEDKTYPCNETRALILKGLKDAGIDEGFLDKDKEYSLWHILYSVEDKQEITKAMEKFAAKNSLGGKFAEVFSSLPPFNKNYGSYSEKAIKKLLALMRTGKYWSADAIDKHTLERIDKIINGEYDESIRTRVREKAINLTDVSHFRGLPLWLACYIVYDRHSESKDITRWNCPADIDQYLDHFKQHSLRNPIVEQVVTETLRTVRDIWRQYGKIDEIHIEMGRDMKNPADVRAKMSKRMIDNENANLRIKAMLAEFADPDFGIAGVRPYSPSQQEMLRIYEEGALESVDEVPDEINEIISKFNQTDIKKRPTHGEIIKYKLWLEQKYQSPYTGRTISLSRLFTDDYQIEHVIPQSRYFDDSMSNKVICEAEVNQLKDRMLGYEFIKAHHGEKVLLSSGETVTILTAEEYERLVQLNFRKNPVKMKKLLMDDIPDKFIERQLNDSRYISKKIKSLLSNMVRDEGEQEDISKNVIACNGAITDRLKRDWGVNDVWNHIILPRFERLNAVTGSDRFTTTSTNGHTIPDMPLNLQKGFNKKRIDHRHHAMDAIVIACTTRSHVNLLNNEAAMSKNNAVRYQLSRKLRRYEDTMVTRNGEMRTISVAREFLKPWPTFNADVEKALRGIVVSFKQNLRVINKTVNKYQKFVYNEEKHIKEKKAVRQEERNGRHLLAIRKPMHKDTVYGEVNLRRIKEVSLKDAVANPKAVVDKDLKKKLMAMIELGYDLKRIKQYFDDNKDAWQDVNLKKIKVYYFTKDTGDRYFATRFGNDLVTLFSKITKADDAKKQIERITDTGIQKILKRHLDANGGDCQKAFSADGIDEMNRNITQLNGGRPHKPVYKVRIYEKADKFAIGTKGNKAAKFVEAAKGTNLFFAVYLKEYEDSTTGETIKKRVFDTIPLKTVIDRLKNGQTPAPEEKDGAKLLFVLSPNDLVYLPTEDEVKNGTINRPLDKRRIYKMVSCTGTECYYIPFIVASPIVDKVEFFSLNKIGRAITGEMIKEICIPIKVDRLGNITEVNNEKI

SEQ ID NO: 5388 - protein, 1537 aa, synthetic construct
  REGION 1..1537: note = Synthetic
MKKILGLDLGTNSIGWAVVNADEVTRDDGSRYLKPNGISAAGSRIIPMSADILGDFEKGNSISQTAERTRMRMARRLHERALLRRERLLRVLILLDFLPKHFADKIDRYGKFTDDSEPKLAWCKNTEGKYEFIFQDAFNEMLAEFKDKRPEIVEEGKKIPYDWTIYYLRKKALEKALSKEELSWLLLQFNQKRGYYQLRGEEEEIPQDKKIEYLAQKIVKVEATDQKKGDDVWYNVYLENGMIYRRTSKAPLDWEGKIKEFIVTTDLEKDGTPKKDKEGNIKRSFRAPQEDDWTLLKKKTEADIEKSRKTVGCYIYDSLLNNPKQKIIGKLVRTVERKFYKDELTQILKKQVEFIPELRDDNLYKQCIEELYPINEAHRNTIAKTDFANLFINDILFYQRPLKSKKSQIDNCPYEERIFIDSKTGEKKKVPVKCIAKSNPLFQEFRLWQFIQNLRIYQREKEIDGKLLTDIDITSECLKSEEDYVSLFDWLNDRESIEQEELLKHLFNTKKSKNKENPYRWNYVEGKVYPCNETRATILKGLSKCGINESVLSPEMEMALWHILYSVEDKKEIETALTHFAQKQGWNDDFAKVFSKVKPFKKDYGAYSEKAIKKLLSLMRMGKYWNQDNIEKNTLDRIDKIINGEFDEKISNRVRDNAINLKDVSDFRGLPVWLACYIVYGRHSEAKDCTKWNSPEDIDSYLKEFKQHSLRNPIVEQVVTETLRTVRDIWKQEGQIDEIHLELGRDLKNPADKRKKMSENILKNENTNLRIKAMLMEFKNPGMGIENVRPYSPNQQDILRIYEENALDNLTKDDKDFDFISKISKQAQPSKSDIVRYKCWLEQKYRSPYTGKTISLSKLFTSAYEIEHIIPQSRYFDDSFSNKVICEAEVNKLKDRQLGYEFIAEHHGEKVQLSQGEVVEIFSVDAYEKFVKDNYANNRVKMKKLLMENIPDEFIERQLNDSRYISKVVKRVLSNIVREKIDEENYEPEATSKNLISCNGAITDRLKKDWGMNDVWNSIILPRFIRMNQITGKDCFTTTNAEGHLIPQMPLELQKGFNKKRIDHRHHAMDAIVVACTTRDHVNLLNNEAAHSKYNANRYQLQRKLRHFEKAMIDGKEREVAKEFLKPWDSFTTDSKKILENIIVSFKQNQRVINKTTNAFQHFDENGKKTFVKQGKGDSWAIRKPMHKDTVFGEVNLKKIKEVSFDVALKDPTRIADKVFKSKILALKNDGKNAKDIKQEIGLSKIKVYYFTKETNDRYFATRKPLDTSFDSNKIQIVTDTGIQRILADHLKTKDTKDKNGNIIEHPEIAFSPDGIDEMNKNIVELNNGKFHQPILKVRVCEKADKFAVGQIGNKKAKFVEAAKGTNLFFAIFEKDGKRSYLTIPLNVMIDCQKKYGNQWKSNIESYLKEKELAEKDVQLLFILSPNDLVYLPTEQNLEKKDQSMNKERIYKFVDCSGSIANFVPSDIAQAIFSMTKDDQNENFKGYRYGIQNEIGVGSRPSKSQNAITGEMIKEICIPIKVDRLGNIKSVGMMQKY

SEQ ID NO: 5389 - protein, 1537 aa, synthetic construct
  REGION 1..1537: note = Synthetic
MKKILGLDLGTNSIGWALTTNDFDTKKGTIEGLGSRIIPMSQDILGKFDSGVSLSQTAQRTEYRGKRRLVQRFLLRRERLHRVLHILELLPKQYSEAIDFDKKLGQFKPEREQKISFYKNESGKNQFIFTKSHQEMLTEFQTYYPTIKNIPYDWTIYYLRKKALTEKISKEELAWILLNFNQKRGYYQLRGEEKEENKNKKEEFHTLLVTDIIERDKGKSGTWYNVILENGWIYKRESKISLADWIGKTKSFIVTTEYNDDGSVKLTKDNEEKRSFRSPKEDDWGLIKIRTEKTINQSDKSVGAYIYDALLKNPNQKIKGELVRTIERKYYKDELREILKKQLEFHSDVLNDKILYKKCIDELYKNNDSHKNSIKDRGFDYLFLDDIIFYQRPLKSKTSLISDCSLEFRPIKNKNGVLVKDTDGKQIAKALKCIARSNPIFQEFRLLQFVKNLKIYKRGVVDDVEVTNDYLKSENDVEKLFNWLNDKAEINQKQFLVNFKLKEDKHRWNFVEDKGYPCNETRNQFLNAIAKIDVDKSFFNTKNTQDLWHILYSVTDKIEITKAITTFAKRHNLPNEFIINFSKIKPYKKEYGSFSEKAIKKLLPLMRFGSYWDAKNIDIKTLDRIDKIQTGEFDEKIRNRVREKAIDLHKIDDFKDLPLWLASYIVYDKHSEASDVSKWKTPADIEKFLKHEFKQHSLRNPIVEQVITETLRVVKDIWLQYGEGKENFFNEIHIELGREMKNDKATREKISKKVSENENTNLRIKAILTELKNDGVSDIRPYSPSQQEILKIYEEGVYNNESRKEKLEEVDKIRKNAKPTTSEIIKYKLWLEQGYASPYTGKLIPMSELFTTKYQIEHIIPQSRFFDDSLSNKVICESEVNELKSNMTALEFILTNENRIVTLTGGETVKIFTKEAYNQHIISYYSKNKNKQKRLLTEEIPEQFISRQLNDTKYISKIVKNLLSKIVREEDEQEVTSKHVVSLNGSITSRMKQDWGLNDVWNTIVSPRFERLNTLTNSNDFGQFELKKDAYGNEGKRVFQTTVPDAIAKGFTKKRIDHRHHALDALVIACVNRTHINYLNNLNAKDTDDKAVKHELRNKLCFKTKPDSNGNYKWEFHKPWEKFTKEAQDKLNTTIVSFKQNTRVINKTVNKYVSYKDENGNLNVDANGLPQKKVITQTKGDNWAIRKPLHAETVSGKVFLKRIKQSHITIANAIEQVELIVDKEVKKQLKAKIKLYPNNIAGLKKHLKAFPVMINDKAIDKIQIYETLEATATRKILDITFDEKKIQKITDTGIQKILLNHLKQEKYQNTVDENGKKLAPHEIAFSENGLEDLNKNITFLNDGKNHQPIKKVRIFEEGNKFPLGEVGNKINKFVETAKGTNLFFAVYENDDKKRNYKTIPFNEVIERQKQGLNAALEIDENGNRLLFTLSPNDLVYIPLEDEIGYLNGVYFKNLNKEQTVRIYKFVSCTGGEGHFVPNNYSKEIISNENGSNNKNERMLNFNNFNIIFDGKEKPVMIKSICWKLEVDRLGKVIKIIK

SEQ ID NO: 5390 - protein, 1535 aa, synthetic construct
  REGION 1..1535: note = Synthetic
MKKILGLDLGTNSIGWALISENEAKKEIIGMGSRIIPMSQDILGEFDRGNSVSQTAERTGFRGVRRLRERHLLRRERLHRVLNIMGFLPRHYAESIDFEKNLGQFIDDSEPKLVYRINPITNRVEFIFQESFNEMMADFRKNQPRLLEKNKKIPYDWTIYYLRKKALTSRIEKEELGWLLLNFNQKRGYYQLRGEDEEEQQNKTVEFYSLKVIDVIDSGDKKGNNDIWYNVVLENGWIYRRTSKTPLDWKGKIKDFIVTTDIDENGNVKTDKEGKEKRSFRAPLEDDWTLIKKKTEADIDKSHKTVGSYIYETMLLNPTQKIKGKLVRTIERKFYKEELRQILEKQKEFHSELNDSTLYSACLEELYEFNDAHKNSIRGKDFTHLFLNDIIFYQRPLKTKKSLISNCQYETRTFIKDGKKEVEPLKCIAKSHSLFQEFRLWQFIHNLKIYVREKVVNGKIETDVNITNEFLKTDDDWVNLFDWLNGRKEIDQKAFLKYFKLKIETHRWNYIDDKENKKSYPCNETHFQIASRLAKVENLPDDFLTKEVEESLWHILYSVEDKKDIEKALKTFAVKHGLNEDFVEGFKKFPRIEKEYGSYSSKAIKKLLSLMRMGKYWNEESIPFEIKSRIELIVERLKSVDYIESKIDSIADDDIPKQILKSFVKCNNHYSGLNTYQACYAVYGRHSESGEIRNWETPADIEQYLREEFKQHSLRNPIVEQVITETLRVVKDIWKHYGNSEKNFFKEIHIELGREMKNPADKRKTMTNQMSENENTNLRIKAMLVELFNDGNIENVRPYSPNQQEILKLYEEGVLNAETDIPEDILKISKKSQPSKVEIERYKLWLAQRYCSPYTGEMIPLSKLFTTAYQIEHIIPQSRYFDDSLSNKVICEAEVNKDKDNSLAYEYIKNNSGKKIELSYGKEVTLFTLAAYEEHVKRSFSTSRGKMKKLLMEDIPETFINRQLNDSRYISKVVKGLLSNIVRTEDELESTSKNVLSSNGNITSILKQDWGLNDVWNNVITPRFERLNKLTGSNNFGQWTSKEGKQVFQTQVPLELQKGFVKKRIDHRHHAMDALVIACATRNHINYLNNEHARQKEDKTRFELRNMLRRIEEIEVDRIENGQKIRKKIKVAKEFHKPWKTFTQDAQSVLEGIVVSFKQNLRVINKSVNHYQKFVDGKKVLEKQIKGDSWAIRKPMHKDTVSGSVTLRFKKMVQLTVAIDSVEMIVDKSLRAKVKELLVQNNDKKKIVKFFKDIEYKWNDKDISRVEIYYLDNGNVASRVKVDESFNGEKIGNITDTGIQKIMLNHLNQEKYQNQLDESGKSILPETLAFSADGLDDLNANIVKLNNNKSHQPILKVRTFEPKGNKFNVGVTGNKRDKFVEAAKGTNLFFAVYQDKSSKRNYESIQLNHVIELQKQGFMPVPELNEKGDKLLFYLSPNDLVYVPNEEEQENPHLVNFSKLQEEQVSKVYKMVSCSGNQCFFIRNNIANSIVNKVEFSALNKMEKSIEGTMIKEFCWKLKVDRLGNITEVNGKPIL

SEQ ID NO: 5391 - protein, 1533 aa, synthetic construct
  REGION 1..1533: note = Synthetic
LQLKFSVVYLKTRYSYILCDNNCIIKYLRLFLKVCFINKMNMKNILGLDLGSNSIGWSVVSKDEKDQLKRIEGIGSRIIPMSQDILGNFAVGNSVSQTAERTAFRSVRRLRERHLLRRERLLRVLHLIGFLPAHYDASIGWDKTDYRTFAKFKNVAEPKIAWKSEEQGNRTFIFGDTFKEMLSDFMREHPDLVAGDKKVPYDWTIYYLRKKALEKPIAKEELAWIILNFNQKRGYYQLRGEDEEQETNKSVDYYELKVVDVQAEEPQKGKKDIWYNVILENGWIYRRSSKVSLSEWIGKTKEFIVTTELNADGTPKKDKEGNDKRSFRAPMEGDWMLLKKRTETNIEKSRKTVGCYIYDTLLQNPDQKIKGKLIRTIERKFYKRELLEILQKQSEFHPEFQDKDVYRACLEELYPQNENRRLNLANGNLVHLLLEDILFFQRPLKSKKSLISNCRFEYRIFMKDGQKQIVPLKCIAKSNPLFQEFRLWQFIQDLRIYQREKEVGGKLQTDVDVTSEFLPTEDAFVELFEWLNTRKEINQKVLLKYLVKKKPELYRWNYVEDKNYPCNETRALILERLEKCSLSVDFLTKENEMSLWHILYSVNDLGELTQALKSYALKHGLNDEFVRIFRKFPPFKNEYGAYSEKAIKKLLPLMRMGKYWNKDKIDGQTLQRIEKLLTGEYDEKIRDRVREKAIHLTEISSFKGLPAWLASYIVYDRHAEIGGIRHWKTPQDIEHYLVTEFKQYSLRNPIVEQVITETLRTVKDIWQQYGDFAEIHIELGRDMKNTAERRAQLAKQNAKNEDTNLRLKALLMELQNDPEIENVRPYSPGQLEILKIYEEGVLVAENELPDDIEKISKMNQPTQSELIRYKLWLEQKYRSPYTGEIIPLSKLFTPAYEIEHVIPQSRYFDNSLSNKVICESEINKLKDNALGYEFIRDHEGEIVQSNFGKRLRVFTLGEYEQFVKKNYSRNGNKMKKLLMEDIPDSFIQRQLNDTRYISKEVRTLLSNIVREEDEQEISKNVISCSGGITDRLKKDWGLNDVWNKIITPRFVRLNRMTESSKFGEWKNGHFQIQMPLELQKGFNKKRIDHRHHAMDALVIACATRNHINYLNNESALKDAKISRYDLKHSLCQKSKPDANGNYSWSFRKPWETFTQDTGEALKSIVVSFKKNVRIINKTTNYYQAYEYGKKVMKKQVKGDSWAIRKSLHKASVFGKVSLRRQKEVRLGVALENWNMLVDKELKEKIKQLITQYGREDVKLFLKYFKDRENKFNGKDISKVSIYYWDTENAAIRKPLDSSFTEKEIKTITDTGIQQILLNHLQAKGGQSDIAFSPEGLDEMNKNLIQLNEGKGHKPIYKVRIFEPIGNKFQVGETGNKSKKFVEADKGTNLYFAVYRTEDGKRTYSTVPLNEVAERQKQRLSPVPETDVKNSASLLFWLSPNDLVYVPTIEERENLQGFDWKNLTEEQTGRIYKMVSCTGDQAFFIQMSVANPIINKYEFSSLNKMGKTIDGEMVKELCWKLKVDRLGHIIECIR

SEQ ID NO: 5392 - protein, 1533 aa, synthetic construct
  REGION 1..1533: note = Synthetic
MKKILGLDLGTNSVGWALTNNDFDNKLGNIEGLGSRIIPMSQDVLGKFDSGVSISQTAERTKYRGTRRLVQRFLLRRERLHRILNILDFLPKHYSEAIDFDKKFGQFKPEREEILSFYKNESGKNQFLFLESHQEMLSEFKLTNPDLKQVPYDWTIYYLRKKALTQKISKEELALILLNFNQKRGYYQLRGEEQEENKNKLEEFHTLTVVNVIEREKGKSGIWYNVILENGWIYKRESKIALFDWVGKQKNFIVTTELNDDGTVKLNKDNEEKRSFRSPKEDDWGLRKIRTEQTINQSGKSVGSFIYDNLLKNPNQKIKGELVRTIERKFYKDEISKILKTQIEFHAAILTDRNLYKKCIDELYRHNDSHKNNIKDRGFEYLFLDDIIFYQRPLKSKISLISDCSLEYRPIKDKKGVLVKDGNGKQILKPLKCIAKSNPIFQEFRLLQFAKNLKIYKKEIVDDIDVTIDYLKTEEDLVELFNWLNDKAEISQKQFLAYPKFKLKEDKFRWNFVEDKIYPCNETRNQFLNAIAKIDVDKSFFDAKNTQDLWHILYSVTDKIEITKAITTFAKRHSLPDEFIANFSKIKPYKKDYGSYSEKAIKKLLTLMRRDGTWNQNAISDRVTAKISAIKERLEYINYDVSILEKVSDSDIPKQVLKSFINCTEFNKGLNTYQASYLIYDRHSEASDVSKWKTPADIEHFLKYDFKQHSLRNPIVEQVITETLRVVKDIWQHYGDGKENFFNEIHIELGREMKNDKATRERMTKQISQNENTNLRIKAILTELKNDGINDVRPYSPSQQEILKIYEEGIYSSENRKEKLEEVDKIRKNAKPTTSEINKYKLWLEQGYVSPYTGKNIMMSELFSTKYQIEHIIPQSRLFDDSLSNKVICESEVNELKSNMTALEFILKNEGRIVTLTGGKTVKIFTKDEYNQHINSYYSNNKNKQKRLLSEEIPEKFIERQLNDTKYISKIVKNILSKIVREDDEQEVTSKHVVSLNGSITSKMKQDWGLNDVWNQIITPRFERLNTLTDSNKFGNWENKFGKNVFQTTVPDEIAKGFSKKRIDHRHHALDALVIACVTKDHVNYLNSINSERKNYSLVSKLRVQQELVTTKDNHDGTLCEEKKLIAKEFHKPWNNFTKDAKDILNQTIISFKQNTRVINKTVNKYQVWKEEDGMMKKITTKQTKGDNWAIRKPLHAETVSGKVILKRIKQSHITIANAIEQIEFIVDAAVKKQLKEKIKLYPNNNDGLKKHLKAFPVMIDGKAIDKVQIYEMIEATATRERNNLDITFDEKKIEKITDTGIQKILLNHLKQEVYQNAIDESGKKIAPHEVAFSEIGIDELNKNIIALNNGKSHQPIKKVRVFEESKRFPLGQTGRKKDKYVETAKGTNLFFAIYQDEKGKRNYKTIPFNEVIERQKQGLSSALEIDENGNRLLFTLSPNDLVYLPTEEEKENLTSLNFDQLSKEQVQRVFKTVSFTGNQAFFVSNNIATSIVDKMEFSALNKMEKSIEGMMIKSLCWKLEVDRLGKIKKIIK

SEQ ID NO: 5393 - protein, 1533 aa, synthetic construct
  REGION 1..1533: note = Synthetic
MKNILGLDLGTNSIGWALINYSKSEDKGNITGMGSRIIPMSQDLLGDFGKGNTVSQTAERTRLRMMRRLRQRHILRRERLHRVLNLMGFLPSHFKEGLDFNQRPGQFLNDTEPKIAYRKEWNEALQKFQHHFIFKTAYQEMLEQFGVQNPELLLKEDGSQRNIPYDWTIYYLRKKALTEKIEKEELAWLLLHFNQKRGYYQARGEEEEEQPNKDVQFHSLLITDVQADPEPGRKGETWYALTLSNGWIYRRSSKTPLFDWKGKTRDFIVTTDLEADGSPKLDRDGQVKRSFRAPGPEDWTLLKKKTEHDIEISGKTVGAYIFDTLLAQPRVKIKGKLVRTIERKYYRDELHRILETQSRFHKELKDTELLQQCINELYKQNQPHQELLSNKNFAYLLAEDIIFYQRPLRSKKSTVGNCSLEFRPSRDEKGQLVYIDGKPALYPLKAGPRSNPYYQEFRLWKWMHDLRIYKKEDETDRTSEFLGSIEQKEKLFEYLNNQKEITQEKLLKFLLSQQGLKGKQLNLEIAAIRWNYVEGKIYPGNETRAMILGRLNKCLDQPEAFLDDEKLYHLWHIIYSINDKEAFGKALRSFANRYDLNPDNFYEAFKKTPPFESSYGSYSEKAIKKFLPLLRLGKYWSFDRIDAATRNRIEKIQTGEYDENIREEVRKKSIHLQADADFQGLPEWLAKYVIYDRHSEADSAGKWNSIADIDQWLKEFKQYSLRNMIVEQIVLESMRVVRDIWMHYGKGAAGFFDEIHIELGRDLKQTNDERKRMTDQISENEATNYRIKHLLVEMQQSGQVENVRPYSPMQQEILKIYEEGVLRSGIEVDPEILKISKTAQPGAADLRRYRLWLEQKYRSPYTGQVIPLSKLFTPEYQIEHIIPKASYFDDSLSNKVICEAAVNKLKDNLTGYAFIQEKQGQIVELGFNKKVKIFTPEEYKEFVQQHYASNPVKKRKLLMEDIPEEMTERQLNDTRYISKLISQVLSNIVRADENDEGVNSKNIIQVSGKVTSALRQDWGLNDIWNEMLVPRFERLNVLLKTDQFLAWNQQHQKWLPTVPLEFAAGFNKKRIDHRHHALDALVIACATRSHVNYLNNTNARRGQKNGETQNGTRYDLRSTLCYKRKNSDNKDGYEWIFKKPWESFTADAALTLQGIVISYKKNLRVLNNTSNRYTRWELQNGELVRAIEKQTKGEAKAIRKPLHKDTVFGAVRLRKKKMVSISTALDDIGSIVDAEFRKYLQSLQQQGYDKKKIQSQLKTMQMEWKGQSISRLEVWYWENELVASRKTLDTSFNEEGIQSITDTGIQKILTRHLENYKGRQDENGKPISPETIAFSPEGIEEMNANMRTINNGKDHQPIEKVRVYEPKGNKFPVGEKANKRSKFVEAAKGTNLYFGVYQTGTGGRTYESIPLNIVIERLRQGLTPVPEINENGDRLLFDLSPNDLIYVPTEDEIQAGGKPKVSEGEKLNVDRVYKMVSCTGNRMFCLKQDVATSIIDKVEFSSLNKMEKAIDGSMIKSCCWKISNDRLGNITIE

SEQ ID NO: 5394 - protein, 1532 aa, synthetic construct
  REGION 1..1532: note = Synthetic
MKKILGLDLGTNSIGWALTNNDFDNKLGNIEGLGSRIIPMSQDVLGKFDSGVSISQTAERTKYRGTRRLVQRFLLRRERLHRVLNILDFLPKHYSEAIDFDKKFGQFKPEREEKLSFYKNENGKNQFLFLESHQEMLSEFQLTNPDLKQVPYDWTIYYLRKKALTEKISKEELAWIVLNFNQKRGYYQLRGEEQEENKNKLEEFHTLVVVDVIEREKGKSGIWYNVILENGWIYKRESKIALFDWVGRQKNFIVTTELNDNGTIKLNKDNEEKRSFRSPKEDDWGLEKIRTEQTINQSKKSVGTFIYDNLLKNPNQKIKGELVRTIERKFYKEELSKILKTQIEFHSTTLKDRNLYKKCIDELYKHNDSHKNNIKDRGFDYLFLDDIIFYQRPLKSKTSLISDCSLEFSPIKDKKGVLVKDSNGKQILKPLKCIAKSNPIFQEFRLLQFVKNLKIFKKEIANDIDVTIDYLKAEDDLVELFNWLNDKAEINQKQFLAYPKFKLKEDKFRWNFVEDKIYPCNETRNQFLNIIAKIDVDKTFFDAKNTQDLWHILYSVTDKIEITKAITTFAKRHNLPNEFVLNFSKIKPYKKDYGSYSEKAIKKLLTLMRRDETWSQDAISDKVTTKISAIKERLESINYDTSILEKVSDSDIPKQVLKSFINCIEFNKGLNTYQASYLIYDRHSEDSDVSKWKTPADIEHFLKYDFKQHSLRNPIVEQVITETLRVVKDIWQHYGGGKENFFNEIHIELGREMKNNSADRKRITDNINQNENTNLRIKAILTELKNDGINDVRPYSPSQQEILKIYEEGVYSSEIRKEKLEEVDKIRKNAKPTPSEIIKYKLWMEQGYISPYTGKLIPLSDLFTTKYQIEHIIPQSRLFDDSLSNKVICESEVNELKSNMTALEFIQKNENRIVTLTGGKTVKIFTKEAYNQHITSYYSKNKNKQKRLLSEEIPEKFIERQLNDTKYISKIVKNLLSKIVREEDEREVTSKHIVSLNGSITSRMKQDWGLNDVWNNIITPRFERLNAITNSSDFGKLELKKDEFGNTGKQVFQTTVPDAIAKGFSKKRIDHRHHALDALVIACVTKEHVNYLNSINSERTNYSLVSKLRLIEEIQINGKTQKVAKEFHKPWENFTKKVEDELNQTIISFKQNTRVINKTINKYQVWKEEDGAMKKITTRQVRGDNWAIRKPMHAETVSGKVFLKRIKQSLITITNAIEQIELIVDKEVKKQLKEKTEKYPNNKEGLKKYLKAFPIIIDGKAIDKVQIYETIGGENGATATRKALDITFDEKRIEKITDTGIQKILLNHLQQEIYQNAIDENGKKNPAYEVAFSENGLDELNKNITALNNGKKHQPIKKVRVFEEGGKFSLGQTGNKASKYVEAAKGTNLFFAIYQDENGKRNYKTIPFNEVIERQKQGLSSALEIDENGNRLLFTLSPNDLVYIPTEDEKDNLTLLNFNKLSKEQSQRVFKMVSFTGNQAFFVSNTIASSIVDKMEFSALNKMEKSIEGLMIKSLCLKLEVDRLGKIKRIIR

SEQ ID NO: 5395 - protein, 1532 aa, synthetic construct
  REGION 1..1532: note = Synthetic
MKKILGLDLGTNSIGWALVSANEDKQPKTIEGIGSRIIPMSQDVLGKFDSGTSVSQTAERTGYRGMRRLRERNLLRRERLHRVLNILDFLPEHYKKSIGWDKDNYKTFGKFIDDTEPKIPWKKNGNGDYEFIFQSSFNEMLNEFSLHHAGILTNNKKIPYDWVIYFLRKKALSDKISKEELAWIILNFNQKRGYYQLRGEDEESGNKKEYVVQLLVNEIIEREVDKKNPKRKWYDVKLENGWTYSSTFFTKPEWAGLSKEFLVTEEVDENNEVAKTKDGTPKRKLSILPTFDEIDLMSQADKDKIYKKIKAKTEATISNSGKTVGCYIYDSLLANPSQKIRGKLIRTIERKFYKDELKAILEKQKEFHSELKNTKLYSDCLNELYPSNKAYVNTISSRNFTYLFVDDIIFYQRPLKSKKSLISDCPYEERVYLDKEGNTQKSSLKCIAKSHPLFQEFRLWQFIGNLRIYEKEKNINGVLKNDVDVTPEFLKDEDDYVALFDWLNNKKEIKQDTLLKYPAFGLKKDAVKYRWNYVEDKPYPCNETRALIMSRLEKLSIASDFLTKEIELMLWHILYSVEDKHEIEKALRTFSKKNGLDEGFVDLFKRFPNFKKEYGAYSAKAIKKLLPLMRKGKYWDEQAIDEKTKTRINRIIDGEFDEKISSRVRDNAISLTDINSFRGLPVWLSCYIVYNRHSEVKDIAKWEKPEDIDNYLKLFKQHSLRNPIVEQVITETLRVVRDIWVKFETIDEIHIELGREMKNPADKRKQMTQQMSDNENSNLRIKRLLMEFINPEFEIENVRPYSPSQQEILRIYEDGVLSSVAEIPSDVDAIIKKFKESEAKKQPTRSEILRYKLWLEQKYRSPYTGEMIPLSKLFTAAYEIEHIIPQSRYFDNSLSNKVICEAVVNANPYKDRELGYEFIKNNENRIVPELSTPTKTVRIFTAQEYEQFVKDNYSKNPAKKRKLLMDDIPDDFIQRQLNDTRYISKVIKGLLSNIVREKVDGEYEQEAISKNVITCTGGVTDRLKRDWGLNDVWNNIVYHRFERLNELTKSNQFGEWDNKDGKRVFQTNVPIEFQKGFSKKRIDHRHHALDALVIACANRNIVNYLNNESASKKSKISRYNLQVLVCNKTKTDDRGNYRWVVKKPWETLTQDSQKALEGIIVSFKQNLRVINKTTNRYQHFENGKKIVSNQVKGDSWAIRKPMHKDTVFGRVNLRKIKQVNLKTAIETPERIVDKNLKKKIKELISVGYDEKKILKYFKDNVKQWPDIDFKKIGIYFFTDETKEPLAATRKVVDKSFTIKKIEEGVTDTGIQKILLNHLEYKGGDAELAFSPEGLEEMNKNIAELNNGKPHKPIVKVRVYEPMGNKFNVGVQGSKTKKFVEAAKGTNLFFAIYQTNEGKRTYETIPLNVVIERQKQGLIPVPEVNENGDKLLFWLSPNDLVYVPIAEKTGDYSFIGDVDDFNNIYKIVSFTGNRLYAIPYCVANVIVDKLEYTLLNKVEFTDNKESIKGSCIPIKIDRLGSITSVGNSKVALQ

SEQ ID NO: 5396 - protein, 1531 aa, synthetic construct
  REGION 1..1531: note = Synthetic
MKKTMLVLIKKITLNSVLKNNIMKTILGLDLGSNSIGWAVINSVIEKQSERIWIKMAGSRIIPMDSAVLGDFDKGSSISQTAERTHFRGVRRLRERQLLRRERLHRVLKILGFLPEHYLKEIDFEKHPGQFLTNCEPKLPWLIDERGKYTFLFQAAFNEMLADFAKHQPSLVSDGKKVPYDWTIYYLRKKALTEMISKEELAWILLNFNQKRGYYQLRGEEEEDAAGKSVEFYALKVLSVEATDEKKGRDIWYNVHLENGWIYRRSSNVPLDWENQVKEFIVTTDLNPDGTPKFDKYGEVKRSFRVPKEDDWMLIKKRTEADIANTRKTVGSYIYDTLLQKPQQKIIGKLVKTVERKLYKEELNLILQKQCAFHAELRDRDLYMRCIEALYPGNEMRRKNIVNRDFIYLLIDDILFYQRPLKTKKTLISNCPYEENEYVNRETGEIKKAPLKCIAKSHPLFQEFRLWHFLSNIRVYQKEKKVNGTLHLDVDVTAEFLRTEDDYVALFDWLNSRKEIDQKAFLKYPKFGLKKEIDNYRWNYVEDKLYPCNETRYAILSRLEKVGVSIDFLSDEKETVLWHILYSVSDKQEIEKALRTFAVKNGLNESFVEVFKKFPPFKSEYGAYSAKAIKKLLPLMRCGKYWDTSLIDDATRDRIERIITGEYDRNIAAKVREKAINLSDIYCFKRLPLWLACYVVYNRHSENKEIAKWETPADIDAYLASFKQHSLRNPIVEQVITETLRVVRDIWKQVGKIDEIHIELGREMKSPADKRKRMTAQIQENEKANLRIKTLLVEFMNPEYEVENIRPYSPSQQEILRIYEDTVLKREEPIPEDIDAILKKFNNSKLPTKSEFLRYKLWLEQKYRSPYTGELIPLGKLFTTAYEIEHIIPQSRYFDDSFSNKVICESAVNKLKDNQLGYEFIKNHHGQKVEVGFGKKVEILSVDSYERFVKEQYAKSSVKMKKLLMDDIPEQFIERQLNDSRYISKVVKGLLSNIVREKNDNDGYEPEAVSRNVLVCTGNVTDRLKKDWGMNDVWNCVVYPRFERLNALTGTQCFGHWENKDGKKVFQTELPLEYQKGFSKKRIDHRHHAMDAIVIACATRNHVNYLSNESASRNTNISRYDLQRLLCDKNRVDGGGNYRWVIKKPWNTFTQDTREALDKIVISLKQNLRIINKTTNIYQHFDITGNRIYKKQEIGDNWAVRKPMHKDTVFGAVNLRKVKRVRLSVALDTPTMIVDKRVKGKVLELLSYKYDKKKIEKYFKENVFFWKDLDIAEVAVYYFTENTSEPLVAVRKSLDSTFNEKKIKESVTDTGIQKILLNHLSVKGGKADWAFSAEGIEEMNRNILQLNDGKKHQPIYKVRVYESRGNKFSVGVSGNKGTKWVGAAKGTNLFFAIYVTENGKRTYVTVPLDVAIEREKQGLIPVPDRNDKGDKLLFWLSPNDLVYLPTEEERELGRINEPIDRGRIYKIVSFTGNRLYGVPCNVANVIVDKLEYSSLNKVELTDAKESIKEICIPIRVDRLGHIIEVKYRINE

SEQ ID NO: 5397 - protein, 1530 aa, synthetic construct
  REGION 1..1530: note = Synthetic
MKKILGLDLGTNSIGWALIEQDFKEREGRILGMGSRIIPMSQDILGEFEKGNSISQTAERTRLRGVRRLRERHLLRRERLLRVLNVLNFLPKHFSDQIDFEKNLGKFIEESEPKIAYNTEGFIFKNSFEEMLNEFKSSHPELVKGGRKIPYDWTIYFLRKKAITEKVEKEELAWLILNFNQKRGYYQLRGEEDDEKANKLEEFYSLKVIEITADESPNKKGETWYSLILENGWVYRRSSKVPMDDWLGKTKDFIVTTDIDEEGNVKLDKEGNEKRSFRAPSEDDWGLRKKKTEKEIKDSNKTVGEFIYDNLLSNPSQKIKGDLIRTIERKFYKKELKSILISQKRFHSELNDEGVLSDCIRELYKNNYSHQSLLQNQDLIHLLVEDIIFYQRPLRSQKSTISNCPLESRVFMKDGIENVSPIKVVSKSHPLYQEFRLLQWINNLRIIGIKDEKYVTEKFLGDIDQYEELLDFLMNQKEIDCKNLMKFFLIKEGLKGKELNSEILNYKWNYVYDVEKGESKVYPCNPTRFEILKRLEKVEGFDFKNFTSEFEEALWHVIYSVTDKVEFEKALKSFARKKDLDVQSFVDSFKKIPPYKSDYGAYSLKAIKRLIPLMRFGSNWSAEKIELSTLERIDKILNGEYDPEIKDKVRDLSKEFTSVEDFQGLPIWFVNYLVYGRHSEASEITKWNSSEGLESFIKGFKQHSLRNPIVEQVIVETLRVVKDIWLQYGNGNKDFFDEIHVELGRDMKNPAGERERLSKVISENESTNLRVKALLVELLEDPDVDNVRPFSPMQQEILKIYEEGILKSSIDVPDEILKISKTAQPSRSDLQRYKLWLEQKYMSPYTGKVIPLNKLFTSAYEIEHVIPQSRFFDDSLSNKVICESAVNKLKDKMMGLEFIKNFHGQRVSLGMGEEVEIFSESAFKSFVQDNYSKNPAKKRKLLMDELPEKMVERQMNDTKYISKYVTSILSNIVRSNQDDSGFNSKNVIPGNGKITNELKNDWGLNDIWNDLILPRFERMNQITASNSFTSWNKKHQKFLPTVPIEYSKGFQKKRIDHRHHALDALVIACATRDHVNYLNNEHALGKKYRGKEEKQQRRFDLKHKLCYKKTNSNNAKDFDWVFHKPWESFTSDAKENLGKITVSFKQNLRVINRTTNKYQSYYDEEGNIRKDKNGNPIKGLTAQIKGDSWAIRKAIHKDTVSGLVELRKVKTVPLRLALDIHSDLLDKKLKKKIVELKNLNYDNKLLLKYFKDRGFKFEEKDISKVDVYFFDKDLAASRVSLDTSFSEKKLHSVTDTGIQKILLNHLENYKGVKNDKGEVIDPETLAFTPEGIEEMNNNIISLNRGKFHKPIYKVRTYEPKGNKFPVGYIGNKKSKFVEAAKGTNLFFGIYVNDEGKRSYETIPFNIVMERLKQGEEPVPPLNEKEDRLLFYLSPNDLVYVPDKEESIDTIDFNNLSKNQVCRIYKMVSCTGPECHFVRADIAALIKNYDSKSKIGELGSLNKQELTIESDKRIKECCIKIKVNRLGKINK

SEQ ID NO: 5398 - protein, 1530 aa, synthetic construct
  REGION 1..1530: note = Synthetic
MNINFLIMKKVLGLDLGPNSTGWAVVNKEEDENGGLGRLTGIEAAGSRIIPMDAATLGDFGKGKSISPTKETTRLRGIRRLRERFLLRRERLHRVLALLKFLPAHYANSLDRYGHFLKGTEPKLEWYKNEAGEWEFLFQEAFDEMLADFKRFSSAFVGGSKKIPYDWTIYYLRKKALTEKISKEELAWILLNFNQKRGYYQRDEEEDTDNETVERLKVVSVTKGEKEKKGGYWYNVLLENGITYRAAFANDISCWVGSEKEFLVKRFEKKDKAPQLSVLPSFEEIDKMSDAQKNRLYAKIKLKTEKTIADSGKTVGSYIYDALLQKPCQKIRGKLVRTIDREFYKEELLRILEKQCEFHAELQDPDRYKACIEELYPQNGAHRDSIVKRGFVYLFIEDILFYQRPLKRKKSLIADCPYESVCCEDKETGEKKHYPIKCIAKSNPLFQEFRLWQFIINLRIYKKEESQDRDVTNELIKTEEDYVALFDWLSEKESIKQGDLLKFSHFGLKKKEIGSYRWNYVEDKNYPCNETRSKIVSRLKKCDGIPENFPTQEDEMALWHILYSVSKSELEKALNSFASKHGLNSTFVDNFKKFPSFKNEYGPYSAKAIRKLLSLMRIGRYWNETDIDLATRLRIDKIVSGEYDETIRARVREKTIHLSGISDFKGLPVWLACYVVYDRHSEVKYITKWNSPDDIDAYLKAFKQHSLRNPIVEQAVLETLRTVRDIWKKVGRIDEIHVELGREMKAPADKRAQMTAQIAENEAANMRIKYLLTEFLNPDLEIENVRPYSPSQQEILRIYEDGALNSVAEKPTEIEDILKKLNERDVQKRPTKSEIEKYKLWLEQHYRSPYTGVLIPLAKLFTSAYQIEHVIPQSRYFDDSLSNKVICEAEVNTLKGNMLGHEFIEAHHGEKVSISDGKTVTILSVEAYETQVKETYERNRGKMKKLMMNDIPDDFIARQLNDSRYISKLVKSLLSNIVREEGEQEAISKNVIPCTGGITDRLKKDWGVNDIWNAIILPRFRRMNELTERTDFTAINQQGHEIPAMPLELQMGFNKKRIDHRHHAMDAIVIACADRNICNYLNNESARAGSAISRHDLQRLLCDKVKTDDNGKYKWLLKKPWDTFTQDTKSVLEQILVSFKQNSRIINKSGNRYWHYVDGKKRLVEQEKGERWVIRKSLHEATVYGEVDLRRVKTVSLNAAIKNPQAIVDKELKKEILSLLAVGYDVEKIEKYFDEHCDVWQDVNLSKIEVYYFTQDANERFFATRKSLDVGFDKKKIENITDTGIQKILLRHLAEKGDDPKIAFSPEGIEEMNRNIVRLNNGKSHQPILKVRIFKNADKFEVGQSGNKRSKFVEADQWTNLFFAVYESKSVDEKTGAVERNRSFVTIPLKEAIERIKAGLPVAKEDENGKSPIFVLSPNDLVYLPTKEELEKGEIGIPIDRSRIYKLVDSSDKTANFVPYIIANVIYSLKKDVAKDFCKGEDLIQNELGLGSSQSKNQRAWTSDCEMIKKICVPVKVDRLGQIVEIGKLS

SEQ ID NO: 5399 - protein, 1529 aa, synthetic construct
  REGION 1..1529: note = Synthetic
MKKILGLDLGTNSIGWALTTNDFDTKTGSIEGLGSRIIPMTQDVLGKFDSGVSLSQTAERTKYRGTRRLVQRFLLRRERLHRVLNILKFLPEHYSEAIDFEKKFGQFKPEREEKFSFYKIENGKNQFIFKESHQEMLAEFKTLFPAIKNIPYDWTIYYLRKKALTTKISKEELAWILLNFNQKRGYYQLRGEEQEENKNKKEEFHTLLVSDVIERDKGKTGTWYNVILENGWIYKRESKISLSDWIGKSKSFIVTTEYNDDGTVKLTKDNEEKRSFRSPKDDDWALVKIRTEQTINQSGKSVGTYIYEALLKNPNQKIKGELVRTIERKFYKDELREILKKQLEFHSEILKDKKLYKNCIDELYKNNESHINSIKDRGFDYLFLDDIIFFQRPLKSKTSLISDCSLEFRPIKDKNGVLVKDTNGKQIVKALKCIARSNPIFQEFRLLQFAKNLKIYKRGVLDDIEVTNDYLKSEEDVEELLNWLNDKAEISQKQFLANFKLKEDKYRWNFVEDKSYPCNETRNQFLNAIAKIDVDKSFFNTKNTQDLWHILYSVTDKIEITKAISTFAKKHNLPNEFIINFSKIKPYKKEYGSFSEKTIKKLLPLMRCGSYWDTKNIDTKTLDRIDKIQTGEFDEKIRNRVRDKAIGLHKIEDFKGLPLWLASYIVYDKHSEASDVSKWKTPADIEKFLKYEFKQHSLRNPIVEQVITETLRVVKDIWQHFGEGKENFFNEIHIELGREMKNSAADRKRITDNISKNENTNLRIKAVLTELKNDGVDDVRPYSPSQQEILKIYEEGVYNSENRKEKLEEVDKIRKNSKPTTSEINKYKLWLEQGYASPYTGKLIPLSKLFTTKYQIEHIIPQSRLFDDSLSNKVICESEVNELKSNMTALEFINNNENRIVTLTGGETVRIFTKEAYKQHIISYYSKNKNKQKRLLTEEIPDQFISRQLNDTKYISKIVKNLLSKIVREDDEQEVTSKHVVSLNGSITSRMKQDWGLNDVWNNIVSPRFERLNAITNSNDFGQFELKKDAYGNEGKRVFQTTVPDAIAKGFTKKRIDHRHHALDALVIACVTKDHINYLNSINSQRTNYSLVTKLRRTEEIQINGKTQKFAKEFHKPWKNFTTDAEDKLNTTITSFKQNTRVINKTVNKYVSYKDENGNLNVDANGLAQKKVITQTKGDNWAIRKSMHAETVSGKVFLKRIKQSHITIANAIEQVDLIVDKEVKKQLKAKIELYPNNIVGLKKHLKAFLVTINGKTTDKIQIYETLEATATRKTLDITFDEKRIEKITDTGIQKILLNHLKQLKYQNTFDENGKKVAPHEIAFSENGLEDLNKNITFLNDGKNHQPIKRVRIFEESNKFPLGETGNKINKFVETAKGTNLFFAIYKDELGKRIYRTIPFNVVIQNLKDGLSPVPDKYLDDKTKIEYKLNQFLSPNDLVYLPSNEELENSNYINLNNLSKEQVLRCYNVNDFSGYTIYFTPNHFAKNIAPKELDTSFDSKLSKSFEGTTIKENFWKLEIDRLGEIRNIIR

SEQ ID NO: 5400 - protein, 1529 aa, synthetic construct
  REGION 1..1529: note = Synthetic
MKKKILGLDLGTNSIGWAVVNDENGMKSISHAGSRIIPMDAKLMGDFESGNSISQTATRTAARGARRLYERHALRRERLNRVLTILGFLPDHYTKELNRYGQVNKGAEPKLAWKFIDGKYLFLFKESFFEMVRDFSRVHPELLENGRNIAYDWTIYYLRQKALSQPIGKQELAWILQQFNQKRGYNQARGEEEEQKENKRQEFITQKVLSVRDTGEKSKGKTVYEICLENGWNFTKESKYPLDWEGKTKNFIVSTTLNSDGTDAIDKDGKARRTFRAPADDDWALLKLKTQHDIDASHKTVGEFIYDALLQNPNQKIIGQLVRVVDRKYYKDELKRILDTQKQFIPELQNGNLYDECIHALYPQNEAYRNSIAGKDFTYLLLNDIIFYQRPLKSKKSLINECPYEYHVYKDKDGKWQKKYLKCISKSHPIYEEFRLWQFVENLHLYRDDANGIGKADCTAEYIVNKAELISWLLTKKEVTEESLLTHVAGKQKKGLSWNYVSEKGKTYPAAPVSSTIIGTIKEAGGDINTLTDPFEIRQNKHHRKLSGKEQDEKAKKNNRIINNLEQIWHMLYSISDKSQLLAALKHYAETNHLSDVFVEKLGKMKPFSDYGAYSEKATRKLLNLMRCGAYWSEEAIDAQTKSRIEHIRIGEVDDAISERVREKLDTMHEVKDFQGLPLWLAEYVVYDVRKNDTKWEKPEDIDKYLQSFRLHSLNNPIVEQVVMESLRTVRDIWKQEGQIDEIHIELGRDLKQNAKQRKKTQQRQQENEKANLRAKLLLQEFMNPDMEIEGVHAYSPSQQELFRIYEDGVLSANKPDDETQRIINDLSSLKQPSAQDIKKYRLWLDQKYISPYTGEIIPLAKLFTPAYQIEHVIPQSRFIDDSMSNKVICEAEVNARKDRKLGHEFIVKCGGEKITLSGGKVVTILSQEAYEDTIRKNFSGDPRKQEKLMLDDIPEKFVARQKNDSRYISRLMMQLLSNIVREKISNTEYEPEAVSKNLIVCNGATTTRLKKDWGINDVWNKIILPRFERLNQIQNTTVFTAKTANGHIIPNMPLELRQGFEKKRIDHRHHAMDAIIIAFTTRNHVALLSNESALDKDENARDDLQTLLRKREVWRSADGKEHYKFTDFIAPYDGFQKDVQDTLENIIVSFKQNLRVINKSNNHFVRFKKDEDTGKLKKKKDRQKKGDNWSIRKSLHKATVFGEVNLRKKKYVNLTYALQHVEDIVEKDLRTKLRELLQEGKDEKQIKKYFASEPDVWADVNLKRIKVFYYTKDTNDHYYAVRTALDDSFTEDYIRNKVTSEAIQKILLAHLARCNNDPKLAFSPDGIEQMNADIQALNNGVPHKPIYKVRTCEKAEKFAVGQIGAKSKKFVEADKGTNLFFAVYSTKTEDGSDKRSFVTVPFKVAVDCQKRGKKEWRTLLDEWAHSESIVAENAKLQFILSPGDLVYVPTAEEIHSGNIRLDKSRIYKFVSSSDVDAYFIPVAVASPIVNKVEYTQLNKVSRVSIEEPLIKEICKPIRVDRLGNIIEP

SEQ ID NO: 5401 - protein, 1528 aa, synthetic construct
  REGION 1..1528: note = Synthetic
MKKILGLDLGTNSIGWALVEQDFKNKQGNIMGMGSRVIPMSQEILGEFARGNTKSETAERTRLRSVRRLRERHLLRRERLHRVLHILGFLPKHYVNQIDFQERLGKFFEESEPKLAYDTGDFLFKPSFLEMLEEFKIHQPSFVEGDKKVPYDWTIYFLRKKALTERIEKEELAWVILSFNQKRGYYQLRGEDEEEKPNKLEEFYSLKIVDIKVDESPNKKGDTWYSLTLENGWIYRRSSKVPLDDWLGKTRDFIVTTDIDEEGNPKLDKEGNPKRSFRAPSEDDWGLRKKKTEKEILDSSKTVGHFIFENLLADPTQKIKGRLVRTIERKFYKDELKQILVSQNRFHPELSDADMMADCVRELYKHNHSHQNFLASKDIKHLLVDDIIFYQRPLRSQKSTIGNCPLEFKTFKKDGIEIKVPYKVAPKSHPLFQEFRLLQWVSSLRIIRKSDDSDVTREFLGTQDKTKQLLDYLMTQSEMDCNKLMTFLLTQEGYKRKDLKSEVGKFRWNYVFDSETGESKTYPGNSTRAEFLKRLGKVEGFDFSKYTEEFEESLWHLVYSVTDKVEFEKALRKFSRKNGIEINSFVENLKKFPPYKSEYASYSLKAIKKLLALMRFGENWKEDSIDSISKHRIEKILTGEYDPEIKDKVREISRAFDEVEDFQGLPVWFANYVVYGRHSEASELIKWTSSDEMADFIKEFKQHSLRNPIVEQVVLETLRVVKDIWDKYGHGQKDFFDEIHVELGRELKNPAEQRARLTTQISANENTNLRIKSLLVELLHDPGVENVRPYSPMQQEILKIYEEGVLKSSFEVPDDILKISKTAQPSSSDLKRYKLWLEQKYRSPYTGKIIPLNKLFTPAYEVEHVIPQSRYFDDSFSNKVICEAAVNKLKDNRLGMEFIKCFHGQRVSLGFGEEVEIFSESAYKAFIQDNFPKNPAKKRKLLMDELPEQMVERQMNDTRYISKFVTSILSNIVRSEENDTGFNSKNIIPGNGKITTALKQDWGLNDVWNELILPRFERMNQLTGTTVFTAWNENHQKFLPTVPLEYAKGFQKKRIDHRHHAMDALVIACATRDHVNYLNNEHALGKNYKGKEEKQSRRFDLRQKLCLKKKNGHSQEQYEWIFSKPWDSFTQDAKKNLERIIVSFKQNLRVINKTSNKYLSYKDEEGNLRLDSQGKPVKALTRQIKGDAWAIRKSIHKDTVSGLVKLRRVKMVNLSVALDNPENILNKKLKKKIAELVKLNYDNKLLLKYFRDRDYMFDGREVSKLDVYYFEEGLAASRVSLDTSFSDKKIQSITDTGIRKILLAHLANYHGRLDEKGKVIPPETLAFTPEGIEELNKNIKGLNGGKFHQPIFKVRTYEPKGNKFQVGFKGNKNSKYVEAAKGTNLFFAIYLNDEGKRSYETIPFNVVMERLKQGEGPVPQTNEKGGKLLFHLSPNELVYVPETDENYTNVDFKNLSKEQVEKIYKMVSSTGSECHFVRADISSLIKGYDAKTKVGELGSLNKQEVTNNGMTRIKEKCWKIKIDRLGSI

SEQ ID NO: 5402 - protein, 1527 aa, synthetic construct
  REGION 1..1527: note = Synthetic
MKKILGLDLGTNSIGWAVINAEEKKRENETTYLQPTGISSAGSRIIPMSADTLGDFDKGNSVSQTKERTSFRSTRRLLERNLLRRERLLRILKIMGFLPDHYSNQIDTYGKFINHAEPKIAWFSDTDGKLSFLFKDSFNEMLADFATNQPQLVAKGKKVPYDWTIYYLRKKGLSQKLTKEELAWILLQFNQKRGYYQLRGEEDEESQDKKIEFLAQKVIRVEATDEKKGNDIWYNVYLENGMIYRRTSRIPLDWVGKIKEFIVTTDLEKDGTPKIDKEGNVRRSFRAPKEDDWTLLKKKTEYDIDNSNKTVGCFIYDALLKNPNQKIIGKLVRTVERKYYKDELKQILDKQVELIPELQDENLYKSCIEELYPNNESHRNIISKPDFKNLFINDIIFYQRPLKSKKSLISDCPYEFRFDNEGHEHPVKCIAKSNPLFQEFRLWQFIQNLRIYQREKEINGKLYTDVDVTPELLKNENEYVALYEWLNDRTSIKQDTLLNTYFRIKKAKGKDQYPYRWNYVEDKDYPCNETHAEILKGLDKCGINHTILTHEQEISLWHILYSVEDKIEISKALQKFAAKNNLPESFVQVFAQTKPFKKEYGSYSEKAIKKLLPLMRMGKYWNADSIDAKTKKRIDIIITGEYDDGIKNRVRENAINLTDIEHFKGLPVWLACYIVYDRHSEAKEITKWKNPQDIDFFLKSFKQHSLRNPIVEQVITETLRTVRDIWRQEGNLDEIHLELGREMKNPADKRKKMTEKNLQNENTNLRIKAMLQEFMNPEMGIENVRPYSVSQQDILRIYEETALDSLSKDDKDFDFINKISKTAQPSKSDIIRYKCWLEQKYRSPYTGEMIPLAKLFTSAYEIEHVIPQSRYFDDSFSNKVICESEVNKLKDRQLGYEFIKNHKGQKVQISQGQTVQILSVEDYEKFVKDHYSNNQLKMKKLLMDDIPDGFIERQLNDSRYISKYVKSILSNIVREKSPEGEYEQEAVSKNLISCNGSITDRLKKDWGMNDVWNCIVLPRFQRLNELTGRDCFTTLNSEGHMIPQMPIELQKGFNKKRIDHRHHAMDAIVIACATRDHINLLNNEAAHSTQNANRYQLQRKLSRFEKIVIDGKEKETAKEFLKPWDSFTTDAKQTLENIIVSFKQNLRVINKATNHYQHYDEDGKKVLIKQDKGDSWAIRKSMHKDTVFGEVNLRFIKTVSLNEALKNPKRIVNKDFKNKVSEFLSLGCDAKYIKKYVEDNKDVWSDIDIKRIKVYYFTKETKERYYATRFLSELVSYMSGITKKEDAINKIKGITDTGIQKILIAHLEAKNGNPELAFSADGIDEMNCNIITLNNGKFHQPIYKVRRFEKGNKYAIGQTGNKSTKYVEADKGTNLFFAVFSSEKLNKESGEIEKVRSYLTIPLNVMIDCQKKYGSKWHDNIEEYLKEQELVSVDVKLLFILSPNDLVYLPKNNSIIDRSRIYKMVSSSGPQCFFVNNTMAKSIVDKVEFTSLNKAERAITGEMIKEICIPIKVDRLGNIIELNNKQL

SEQ ID NO: 5403 - protein, 1526 aa, synthetic construct
  REGION 1..1526: note = Synthetic
MKKILGLDLGTNSIGWAVLNAADDNSLKYIEAAGSRIIPMDAAILGDFDRGNSISQTAERTRIRGMRHLRERYLLRRARLHRILNLLGFLPFHYAQDIDRYGNFSADMEPKIAWCKNLEGELEFIFIESFNEMLEDFRKNQPELVADNKKVPYDWVIYYLRKKALEKKISKEELAWILLNFNQKRGYYQLRGEDDDESMKTAKTRQYFDKQIIKNIIDTNQTYKGQRILIVELQNGDKGKIFKKEIPDWIGQEKNIIVTVDIDKDGNDKYEESGSLSCRFKIPTDAEWESEWKLIKMKTQKDLDESNKTVGTYIYDSILQNPTQKVRGKLVRTIERKYYKAELKQILEKQTEFHSELQDKDLYIECLNELYSNNDTHRNAITDRDFVYLFMNDILFYQRPLKSKKSLIDNCPYERNIYIDKETGEIKYLPIKCIAKSHPLFQEFRLWKFISSIRIYQRESVVEVVDKQLDLFSSQSTSVQKLVTDVDVTDKFLTCENDYVALFEWLNKKKIIDQKEFLKYRPFGLKGDIDNYRWNYVEDKSYPCNETHAMILTYFAKAGISEDILTKEMEEALWHILYSVEDRQEITKALRTFASKYHLSDSFVKVFSNIPPFKKEYGSYSAKAIKKLLSLMRMGKYWSEDAIDVNTRERIDKIVTGEYDEKIRDRVREKTIRLNDIRHFRALPDWLACYVVYDRHSETREITEWKSPEEIDEYIRNFKQHSLRNPIVEQVITETLRTVRDIWKQVGCIDEIHVELGREMKNPADKRKRITSQIIENENANLRVKALLTEFVNPEFEIENVRPYSLSQQDILRIYEDGVLNSVAEVPGDIAGILKKFNENDAKKRPTTSEILRYKLWLEQKYRSPYTGEMIPLSKLFTSAYEIEHVIPQSRYFDDSFSNKVICEAEVNKLKDNALGYEFIKKHHGEKVELGFGKIVEIFSVSVYEQFVKDNYSRNRGKMKKLLMDEIPEQFIERQLNDSRYISKVVKTLLSNVVREKAEQEAVSKNVIVCTGGVTDRLKKDWGINDVWNKIVLPRFLRLNELTNSTNFTAKNAAGNEIPAMPLELQKGFNKKRIDHRHHAMDAIVIACANRNIVNYLNNESASRKAKISRHDLQAILCDKVRTDDKGNYQWRVKKPWDTFTQDVYVALENIIVSFKQNLRVINKTSNYYWHYENGKKVLVKQVKGDSWAIRKPMHKDTVFGEVNLRKVKSVSLNEALKNPQFIVEKDLKRQLLSLLQQNFDIKKIKKYFEEHKDIWSDISLSKMNIYYFTKETKDRYFATRKPLDASFDKKKIESCITDTGIQQILLRHLELKENDPERAFSPDGIDEMNRNIIQLNKGKGHHPIAKVRVYEKADKFEVGQRGNKSSKFVEAAKGTNLFFAVYETEYPDEKTNSIVRKRNYATIPLNIAIERQKRGLSTAPEDEKGNVPSFVLSPNDLVYLPTSEDIVNGHITQPIDKSRIYKMVSSSGSQCFFIKHNIANIIVDKYEFSPLNKMERAISNEMIKEICIPVKVDRLGNIVKLGKSE

SEQ ID NO: 5404 - protein, 1526 aa, synthetic construct
  REGION 1..1526: note = Synthetic
MKQILGLDLGPNSIGWAIVNEKYDGVMPEVEKHLEACGSRIIPMDAAIQGDFEKGNSVSQTAERTGYRGIRRLRERCLLRRERLNRVLDVMGFLPEHYSTALTRYGKFKDADGCKLAWRKGEDGRYEFVFKESYAEMLADFRLNQSAWLADGALVPYDWTIYYLRKKALTQAISKQELAWLLLNFNQKRGYYQLRGEENDEDKSKLEEFYALKVVDVRDTGERKGKDTWYDIVLENGMVYHRAAPAPPDWKGKVKEFIVTTQLDKDGNPKLDKDGSVKRSLRMPGENDWTLVKKKTEADIDNSGKTVGEYIYDALLVNPKQKIKGKLVRTIERKYYKEELEKILEAQARFIPELTDDSLYNACINELYPSNDAYRHSIERRGFTYLFIDNIIFYQRPLKSKKSLIDDCPYESHAYTDKETGERKTAAVKCAARSNPLFQEFRMWQFVSNLRIFQREKEVDGLLRTDIDVTGEFISSTDDVIKLFDWLNDRENITQDTLFGSYFKIKKPKGKETPYPYRWNYVEDKAYPCNETRGLMLKHLDKAGVDKDVLTPETEMSLWHILYSVEDKQELQHALTTFAGKHGLGEEFVEAFAKFPPFKKDYASYSEKAIKKLLALMRIGRRWSESDIDKNTRERIEKLINGEYDESIIDKVREMTQSMTRVEDFSGLPLWKACYVVYNRHSEAKEVVKWRTPDDVDEYLRHFKQHSLRNPIVEQVVTETLRTVRDIWRMYGNIDEIHIEMGRNMKQTAEQRKKATQLITDNENANIRAKVLLTEFMNPDFGIDNVRPYSPSQQELLRIYEDGVLSSIGEIDDGISEIIKKLGETDEKKRPSRSEVLRYKLWLDQKYQSPYTGRFIPLARLFTTDYQIEHIIPQSRYFDDSFSNKVICESAVNALKDKMLGMEFIKEKHGQIVSLGNGSDATILSVEEYERLVTNVYKNNRAKMRKLLMDDIPDDFIARQLNDSRYISKLVKTLMSNIVREDGEEQDISKNVITTNGTITDRLKKDWGVKDVWNRIVLPRFRRLNELTGTRKFTTTSAGGHEIPDMPLELQKGFNKKRIDHRHHAMDAVVIACTTRSHVNLLNNEAAMSGNNANRYQLSRKLRRYEQTEIVRNGERKTIETAREFLKPWATFTADLEKALQDIVVSFKQNLRIINKTTNAYQCFVDGKKTVVHQVKGDSWAVRKPLHKETVYGEVNLRRIREVSLKEAMRQRKAIVDKDMKRKITDFVKLGYDEKLIKTYFAGHKDAWPDFNPSKIKVYYFTQDVLGKDGSVKDRYFATRKPLDTRFNRKRIEDSVTDTGIQKILLRHLELCGCDTERAFSPEGIEEMNRNIVSLNNGKHHQPIYKVRVYEKAEKYAVGKRGSKSTKFVEAAKGTNLFFAVYETEETDKATGLPVKKRSYATIPLYEAVKRAKEGLPIAPENANGQKPTFVLSPNDLVYLPTKEEIDKGTISRPLDKSRIYKVVSCTSSRLYGIPFSVANSIIDKFEFTQLNKLEFTDLKESIKETCIPIKVDRIGNIIEINGKKL

SEQ ID NO: 5405 - protein, 1526 aa, synthetic construct
  REGION 1..1526: note = Synthetic
LIISIFCTHFLSLKKLDKSIIMKKILGLDLGTNSIGWAVINSSVDIEGKEQLKKISASGSRIIPMDAATLGDFDKGNSKSQTAERTRLRGVRRLLERSLLRRERLLRVLSVMEFLPEHYASQLNRYGKFISGTEPKLAWYKTSDGRYTFLFQDSFSEMLSDFQSHHPQLLEGGKKIPYDWTLYYLRKKALFEKVTKEELAWILLSFNQKRGYYQLRGEEEQEDDKKQVKYYALKVVSVEDSGDRKGKDIWYNVYLENGWKYRRASSIPLDWVGKIKEFVVTTELDDTGNLKKDKDGEVKRSFRAPKEDDWGLLKAKTQEQIDQSGKTVGAYIYDSLLDTPEQKIRGKLVRTIERRYYKDELYRILKKQQEFHSELRDSSLLAACIEELYPHNEVHRNILYTQDFAYFLVEDILFYQRPLKSKKSLIDDCPYESRVYKKEGALCNVPLKCVAKSHPLYQEFRLWQFISNLRIYQREKTVDGSLKTDVDVTGDFLKDENGYVALFEWLYERKNVDQKALLGYKPFGINKKEQTAYRWNYVEDKSYPCNETRAIIKARLEKAGVKDSFLTKEREEALWHILYSISDKQELLKALATFSDKHGLDNAFVEAFAKIPPFEKSYGAYSLKALKKLLSLMRMGKYWNQNAIDGKTCERIEKILTGEYDETIRNRVREKAMHFTDLSSFRGLPLWLASYVVYDRHSEAKDIAKWKTPEDINVFLRGFKQHSLRNPIVEQVITETLRTVRDIWKKEGQIDEIHVELGREMKNPADKRKQITAQILENEYTNLRVKALLTEFMNPEFEIENVRPYSPSQQEILRIYEDGVFAGISDKEIPEDIASILKKFKDSDVKKYPSRSEVLRYKLWLDQRYRSPYTGRMIPLGKLFTAEYEIEHIIPQSRYFDDSFTNKVICESAVNKLKGNLLGYEFIKKHSGQIVELGRGDVVPVFTVEQYERFVKESYFNNAKKKEKLLLEEIPDSFIERQLNDSRYISKVVKSLLSNIVREEGEQDAVSKNVIVCTGKVTDRLKKDWGIQDVWNRIILPRFLRLNELTDSSDYTIMSTNGNIIPAMPLHLQRGFNKKRIDHRHHAMDAIVIACASRNIVNYLNNASAKKGAKISRYDLQYLLCDKVKTDAAGNYKWMLRKPWETFTQDVYAALMDIVVSFKQNLRVINRTTNYYQHYNTEGKKIMVPQAKGDSWAIRKPMHKDTVYGEINLRKIKTVSLKEAVKNPLRIVDKSFKHKLQELLHTGYNLKAITNYFENNKDVWADINLKKISVYYFTKETNERYFATRKALDTSFMRSKIEEEIADTGIQKILLNHLQDNDNNAEIAFSPDGIERMNQNIVALNEGRWHQPIYKVRVYEKADKFPIGEKGSKSAKFVEAAKGTNLFFAVYESVSEDKKTGELVRKRTFASIPLNLVIERQKKGLPSAPADANGNLPIFVLSPNDLVYLPTEEERKNNTFSFPLNRGRIYKMVSCSENRLFLVPFYVASIIRDKYEYTSKNKIELTDDKLSIKEICWPIKVDRLGNITLK

SEQ ID NO: 5406 - protein, 1526 aa, synthetic construct
  REGION 1..1526: note = Synthetic
MKKILGLDLGTNSIGWALIDGEENRILGMGSRIIPMTQDVLDTFSGGNPLETQTAVRTAYRGVRRLRERTLLRRERLLRVLNVMAFLPEHYAFQIDFEKRLGQFLDEKEPKLAWRQNDDGKFEFIFQQSFNEMIEEFKNNGVVAGDKKIPYDWTIYYLRKKALSQKIEKEELAWILLNFNQKRGYYQLRGEEEEENSNKSVEYYSLKIADVVADDRSNSKGETWYSLHLENGWVYRRSSRIPLFDWKDKTRDFIVTTDLNDDGTVKKDKEGIEKRSFRAPSENDWTLLKKKTEKDIEKSRKTVGAYIYETLLQNPMQKVRGKLVRTVERKFYKDELRQILEKQKEFHSELGNEDLYNDCIRELYRNNETYQLILSKRDFVHLLLNDILFYQRPLRSQKSSISDCALEFQTYKDKDGNEIKEHLKAASKSNPLYQEFRIWQWLYNLRIYRKEDGEDVTAQFITGVEDKEQLFDFLNDRRDVEQKPLLDYLIKAKGLKKQVKTDTYRWNYVEDKAYPCNETGVMISTRLAKVENISDDFLTKEMEQKLWHIIYSVTDKNEFEKALKTFAKKNGLDVVSFVDSFKKFPPFKCEYGAFSEKAIKKLLPLMRLGKYWKWNDIDDNTQNRISKIITGEYDEGIKDIVREKVVNLTNENDFQGLQLWLTQYVVYGRHSEADIAGKWRSVADLEKYLDDFKQHSLRNPIVEQVITETLRVVRDIWKQYGRGAEDFFSEIHVELGRDMKNTADERKRLTNVIVENENTNLRIKALLMELKNNADGKLEIENVRPYSPMQQDILKIYEEGVINSGIEIDEDIRKISKTAQPTAAELQRYRLWLEQKYRSPYTGKVIPLGKLFTEEYQIEHIIPKSRYYDDSLSNKVICEAAVNKLKDKYLGFEFIKNYHGQIVEIGFGQKATIFDEGEYQDFVKRHYAHNHSKRAKLLLEEIPEKMIERQMNDTRYISKFVFPLLSNLVRAEKGDDGVNSKNVLPGNGKITTILKQDWGLNDVWNDLILPRFVRMNKLTGTTAFTSWNEQYQKYLPTVPLDLSKGFQKKRIDHRHHAMDALVIACATRDHINLLNNKHANTDTIRYDLQRKLRLFERVTYTDPHTKEQVTKDIPKEFKKPWDSFTVDARNELGKIVVSFKQNLRIINKATNIYEKYEDGEKVNVKQKGINWAIRKPLHKETVFAKVSLRKIKKVRLSDALKDWKKIVDKGLKQEIERLVCQYHRFNPDEICRYFKARGNQFGGVDISKVDVYYFDEENAAVRKNVDTSFTEKFIRESVTDTGIQKILINHLKAKGDKTEIAFSPEGIEEMNKNIVQLNGGKFHQPILKVRIYQALGNKFQIGTMGNKKDKYVVAEAGTNLFFVVYEKDGKRNYETIPLNEVIEHQKWRGTLSKEEQQKIPVIPIKNDRGMFVFYLSPNDLVYVPTAEQLGDINISVNDIKPNRIYRFTDSSDTRANFIPMSIAEVLFNCNKDKQKKIGIEYSIQNEIGIGSQGSKNQKSINGDMIKDICLKLKIDRLGSIKEISGL

SEQ ID NO: 5407 - protein, 1525 aa, synthetic construct
  REGION 1..1525: note = Synthetic
MNRILGLDLGTNSIGWALIEQDFQNKYGKILGMGTRVIPMSQDILGEFGKGNSVSQTKDRTQFRSTRRLRERYLLRRERLHRVLNILNFLPQHYASSIDFEKRLGKFIAETEPKIAYKNSWDEQKNKKNYEFIFKDAFGEMLEDFRQHQPLLLVDEKGQPRLVPYDWTIYYLRKKALTRKIEKEALAWILLNFNQKRGYYQLRGEEEEENTSKSVEFHSLKVIEVIADETQKGKADTWYTLLLENGWKYRRSSKTPLFDWKNKVRDFIVTTELNDDGSVKTDKEGNEKRSFRAPGEDDWTLLKKKTEQEIAKSKHTVGEFIYDALLKNPQQKIKGKLVRTIERKFYKDELRQILQKQKEFHPELQNEELYSDCIRELYRNNEGHRELLNSKEFVHLFLDDIIFYQRPLRSQKSSIGNCTLEPAITYLDKGVEKEKRLKATPKSNPYYQEFRLWQWICNLSIYKKENDSNVTTDFLSSPEDAERLFDFLNNRKNIEQKTLLKYFLEQKGFKGKLLAAETEKFRWNYVEDKDYPCNETAALINSRLEKIEGVNPGFLTREIMQQLWHIIYSVTDKIDYEKALKTFAQKHLLPESGFVESFRKFPPFKSEYASFSEKAIKKLLPLMRLGKHWSWDSIDKASQLRIEKLLTGEYDPGISDRVREKLSSLTKETDYQALPLWMAQYVVYNRHSEAASLDKWSSVADLEAYLQAFRQHSLRNPIVEQVIMETLRVVKDIWIQYGQGAKDFFNEIHVELGREMKNTKDDREKMSRQVIENENTNLRIKALLAEMMNDGQMQNIRPYSPMQQEILKIYEEGVLLSGIEIDDDILKISKTAQPSPADLRRYKLWLEQKYRSPYTGNIIPLNKLFTPEYEIEHIIPQSRYFDDSFSNKVICEAAVNKLKGNHIGLAFIKKFHGQKVECGLGTIPATIFEVAAYEEFVKQHYSKNRSKRNKLLLEEIPEKMIARQLNDTRYISKFISSLLSNIVRASENDDGVNSKNIIPGNGKITTELKQHWGLNDVWNELILPRFERMNALTNTSLYTAWSNNHQKFLPAVPLEASRGFSKKRIDHRHHAMDALVIACATRDHINLLNNKHADSPQQRFDLNRKLRKFKKTSYTHPQTGELIERDIPDDFLKPWESFTTDARNSLEKIIVSFKQNLRVINKATNHYEKYIEKEEGLVKSVQVQQGVNWAIRKPMHKDTVFGLVQLRRKKEVSLSLALDVINDITNKALRKELQSMAKQGKDKKEILKYFKAANNIWKDIDITRVEIFYQENDNVASRVSLDDSFDEKRIESITDTGIQKILNNHLANYKGRLDEKGKEIAPPLLAFSPEGVEELNKNIKALNKGKAHQPILKVRTYEPKGNKFNIGETGNKKAKYVVAAKGTNLFFAVYQGKDGKRNYETVPLNITIERQKQELPPVPLENQNGDPLLFALSPNDLVYVPSAEERTAENSINNGNFDAQRVANIYKVVSFTSNQIFFVRQDVATSIVNKAEFSALNKMERTINGTMIKEVCVKLNIDRLGHIKL

SEQ ID NO: 5408 - protein, 1525 aa, synthetic construct
  REGION 1..1525: note = Synthetic
MKRILGLDLGSNSIGWAVAIRKSDREESGVNECIEASGSRIIPMDAAIQGDFEKGNSVSQTAERTSYRGMRRLRERYLLRRERLNRVLDVMGFLPNHYAAALTRYGKFKAADGCKLAWQKDDDGKYGFVFNDSYAEMLADFKRCQSQWLGDGGLVPYDWTIYYLRRKALTQAITKQELAWILLNFNQKRGYYQLRGEEADEDKGKQEEFYALRVTDVVDTGERKGKDTWYDIKLENGMVYHRPAPTPPDWIGQVKEFIVTTQLDKDGKPKTDKDGMVKRSFRMPKEDDWTLIKKKTEADIDKSGKTVGEYIYDALLANPKQKIKGKLVRTVERKYYRKELERILESQKNFIPELRDEALYKACIGELYGVNDAYRHSIEGRGFTYLFVDNIIFYQRPLKSKKSLIDDCPYESHVYTDLVTGERKTASVKCVAKSNPFYQEFRLWQFVSNLKIYQRKKVTDGVLRMDVDVTDEFLVTTDDRVKLFEWLNDRQDISQEILFGKYLNIKKPRGKDAQWPYRWNYVEDKVYPCNDTRGQMLKYLEKVGIDKGFLTADVEKSLWHILYSVEDKQELVHALGTFAGKHELGSKFAEVFSKFPPFKKEYGAYSEKAIKKLLPLMRMGNRWNEGAIDVHTRERIDKIINGECDETIRNRVREKAINLTEVTDFSGLPLWLACYVVYDRHSEARDVSKWTSPNDIDVYLKNFKQHSLRNPIVEQVVTETLRTVRDVWRQYGGFDEIHIEMGREMKQTAEQRKKTTQRITDNENANIRAKVLLTEFMNPDFEIANVRAYSPSQQELLRIYEDGALSNVGEVEDDISEIMKKLSEADVKKRPTHNEIMRYKLWLDQKYLSPYTGTPIPLARLFTTDYQIEHIIPQSRYFDDSFSNKVICESAVNALKDRMLGMEFIKEKHGQVVELGNGGTVEILSVEEYERLVTTNYKDNQSKMRKLLMDDIPDTFIERQLNDSRYISKLVKTLMSNIVREEGEEQDISKNVIATNGTITDRLKKEWGIKDVWNHIILPRFKRLNELTGSGKFTVPSASGHEIPDMPLAMQKGFNKKRIDHRHHAMDAIVIACTTREHVNLLNNESAKSENAVNRYQLSRKLRRYEQTEIIRDGERKTISVAREFIKPWPTFTADVEKVLNGIVVSFKQNLRIINKTTNRYQHYENGKKLMVSQVKGDSWAVRKPLHKETVFGEVNLRFTREVALKEALKQPKAIVDKDLKRKIVTMLELGYDDKKIKQFFEANKEVWHDFNPAKIKVYYYTKDVLDKEGNVKDRYFATRKPLDTSFTSKRIESVTDTGIRKILLRHLEACGGNAELAFSPEGIEAMNRNIVTLNNGKFHQPIYKVRVYEKADKYPVGKRGGKASKFVEAAKGTNLFFAVYESEEMDKATGEVKKKRSYATIPLYEAVRRAKAGLPLAPDDTNGNKPAFVLSPNDLVYLPTKEDIERGTIGMPLDKGRIYKMISSSGNQCFFLKYEVASVIVDKLEFSPLNKMERAITGEMIKEICVPLKVDRIGNIIEINGRKL

SEQ ID NO: 5409 - protein, 1524 aa, synthetic construct
  REGION 1..1524: note = Synthetic
MKKILGLDLGTNSIGWAMVNADETMRENETSYLKPTGISAAGSRIIPMSADILGNFDAGNSVSQTAERTGFRGVRRLHERNLLRRERLLRVLKQMGFLPEHFAKQIDEYGKFINHSEPKLAWRKDEQGKFEFVFKDSFEEMLEDFAQHQPQLVADGKKVPYDWTIYYLRKKALTQRLAKEELAWVLLQFNQKRGYYQLRGEDDDEQQDKLVEYIAQKVVRVEATDDKKGDEIWYNVHLENGMLYRRTSKTPLDWAGKIKEFIVTTDLEKDGTPKKDKEGNIKRSFRAPKEDDWTLLKKKTEFDIDNSHKTVGCYIYDNLLQKPNQKIIGKLVRTVERKYYKEELRQILETQVALIAELNDATLYNRCIGELYPNNEAHRNNIAKPDFVNLFINDILFYQRPLKSKKSLISDCPYESHFDKDGNEHPVKCIAKSNPLFQEFRLWQFVQNLRIYQREKNVDGKLQTDVDITNELLKTEEDYVKLFDWLNDRASIKQDTLLNSYFKFKKEKGKDQYPYRWNYVEDKDYPCNETRSTMLGGLTKCNIDAGFLTRENEMSLWHILYSVEDKAEIGKALKKYAEKNNLPESFAEVFAKVKPFKKDYGSYSEKAIKKLLPLMRMGKYWSADAIDDRTKERIDKILTGEYDENIKNRVREKSINLTDINHFRALPVWLACYIVYDRHSEAKEMGKWEKPEDIDRYLKDFKQHSLRNPIVEQVVTETLRTVRDIWKQEGQIDEIHLELGREMKNPADKRKKMTERILENENTNLRIKALLMEFMNDPEIENVRPYSPSQQDILRIYEENALDNLTKDDKEFDFVSKISKTAQPSKADITRYKCWLEQKYRSPYTGEMIPLAKLFTSAYEIEHVIPQSRYFDDSFSNKVICEAEVNKLKDRQLGFEFIKNHKGEKVQISQGKVVEILSVEAYEKFVKDHYSSNRTKMKKLLMDDIPDGFIERQLNDSRYISKLVKGLLSNIVREKLDNGDYEQEAVSKNLISCNGSITDRLKKDWGLNDVWNSIVLPRFRRLNELTGKNCFTAISAEGHEIPAMPLELQKGFNKKRIDHRHHAMDAIVIACATRDHVNLLNNEAAHSKHNANRYQLQRKLRRFEKMTIDGKEKEIAKEFLKPWDSFTTDAKQALENIIVSFKQNLRVINKTTNRYQHYDKNGKKVFVKQEKGDSWAIRKSMHKDTVFGEVNLRKNDKTVSLKEVLKNPKAIVNKEFKKKVIELLEEGRDAKYIEKYLKDNKDVWSDIDVKKIQVYYFTKDTNDRYFATRKPLDTSFDKKKIESSVTDTGIQKILLAHLEAKGGDPELAFSPDGIDEMNRNIVALNKGKFHQPIQKVRVYEKAEKFAVGQNGNKATKFVEAAKGTNLFFAIFGTEKTNKETGETETVRSYLTIPLNVMIDCQKKYGSQWRNCIETYLQEQQLVTSETKLLFVLSPNDLVYLPTKEEIRNGISTIDRKRIYKFVSCTGNEGHFIPEIIATPIVQTTELGSNNKAQKAWTGEMIKETCLPIKVDRLGNVIELNGKKL

SEQ ID NO: 5410 - protein, 1523 aa, synthetic construct
  REGION 1..1523: note = Synthetic
MKKILGLDLGTNSIGWAVVNANEETRNDATTYLKPVEISAIGSRIIPMSADILGDFDKGNSVSQTAERTGYRSIRRLHERNLLRRERMLRVLKTLGFLPDHFASQINGYGKFIKHCEPKLPWYKDPDGKMEFLFNDSFNEMLADFAANQPQLIENGKKIPYDWTIYYLRKKALSQKITKEELAWILLQFNQKRGYYQLRGEEEEQEDKLVEFLAQKVVSVEATDEKKGDEIWYNVHLENGMIYRRTSKEPLDWVGKVKEFIVTTDLEKDGTPKRDKEGNIKRSFRAPKEDDWTLMKKKTEADIENSHKTVGCYIYDALLQNPNQKIIGKLVRTVERKYYKDELKRILEVQQSLIPELKDESLYKACVEELYPNNEAHRNVIAKPDFAHLFINDILFYHRPLKSKKTLISNCPYESHFGKEGNEYPVKCIAKSNPLFQEFRLWQFVQNLRIFEREKEVAGKLMTDVDVTSEFLKTEDDFVKLFDWLNDRAAIKQDTLLNSYFKFKKQKGQEQYSYRWNYVEDKEYPCNETRITILNGLTKCGVSAGFLTKEQEMALWHILYSVEDKIDIGKALKKCAEKNNLSESFAEVFAKIKPFPKDYGSYSEKAIKKLLPLMRIGKYWSIDAIDTKTKERIDKIITGEYDEKIKNRVREKAINLTDETHFKGLPIWLACYIVYDRHSEAKDIGKWDKPEDIDNYLKEFKQHSLRNPIVEQVVTETLRTVRDIWRQEGRIDEIHVELGREMKNPADKRKRMTESILQNENTNLRIKSMLMEFMNPEMGIENVRPYSPSQQDILRIYEENALDNLTKDDPEFDFVSKISKTAQPSKSDIVRYKLWLEQKYRSPYTGEMIPLAKLFTTAYEIEHVIPQSRYFDDSFSNKVICEAEVNKLKDRQLGFEFIKNHKGEKVQINQGNTVEILSVEAYEKFVKDHYNNNRAKMKKLLMDDIPDGFIERQLNDSRYISKVVKGLLSNIVREKLVNGEYEQEAVSKNLISCNGSITDRLKKDWGMNDAWNNIVLPRFKRLNELTGKNVFTAISAEGHEIPAMPLELQKGFNKKRIDHRHHAMDAIVIACATRDHINLLNNEAAHSKHNAHRYQLQRKLRRFEKTIIDGKEYEIAKEFIKPWDSFTTDTKRALENIIVSFKQNLRVINKTTNYYQHYDENGKKVLVPQQKGDSWAVRKSMHKDTVFGEVNLRMKKTVSLNEAIKNPERIVNKDFKVKMKELLRDGRDVKYIKKYIEDNKDVWSDINLSKIEVYYFTNETNDRYFATRKPIDTSFNRKKIEESVTDTGVQKILLAHLDTKGGDPELAFSPDGIDEMNRNVVTLNKGKFHQPILKVRVYEKAEKFAVGQNGNKSAKFVEAAKGTNLFFAVFATNVEDKETGETKVVRSYLTIPLNVMIDCQKKYGKQWRSNIGTYLKREGLVANDAKLLFVLSPNDLVYLPTQKDLKEGIKGGDKQRIYKMVSSSGNQCFFLNEIVAKAIVDKVEFTSLNKAERAITGEMIKETCVPIKVDRLGNIIEINGLKI

SEQ ID NO: 5411 - protein, 1522 aa, synthetic construct
  REGION 1..1522: note = Synthetic
MKKILGLDLGTNSIGWALIEHDFEKKQGKIVGMGSRIIPMGQDVLGEFDKGNSVSQTAERTKLRSVRRLRERYLLRRERLNRVLNILGFLPAHYAEQIDFSEKLGKFLEGTEPKIAYNNGDFLFKSSFNEMLDEFKISQQGLLEGERKVPYDWTIYFLRKKALTQRIEKGELAWIILNFNQKRGYYQLRGEDEEEKPNKLEEFYSLKVIDIKVDDSPNKKGDTWYSLTLENGWVYRRPSKVPLDDWLGKTRDFIVTTDIDDLGNPKLDKEGNPKRSFRAPSEDDWGLRKKKTEKEILDSSKTVGQFIYENLLANPNQKIKGQLVRTIERKFYKDELKQILASQQKFHPELSDPDLFGDCIRELYKHNHSHQNFLGNKDIVHLLIDDIIFYQRPLRSQKSSIGNCSLEFKTFEIEGVKKAVPYKVTPKSHPLFQEFRLLQWISNLRIIRKEDDKDVTVDFLGTQDKTQALFDYLMAQSEVDCSKLMTFLLTMDGYKGKDLKSQVGKFRWNYVYDSEKGESKTYPVNTTRAEFLKRLGKVNGFGLEMYTEQFEESLWHLVYSVRDKIEFEKALKKFARKNGLEVNSFVENFKKIPPFKSEYASYSLKAIKKLLSLMRFGSKWVEEVIDEQTRQRIEKILTGEYDPDLKDKIRELSKDFQSIQDFQGLPVWFASYLLYGRHSEASELIKWNSSDEMAQYIQEFKQHSLRNPIVEQVVLETLRVVKDIWDKYGYGKKDFFDEIHVELGREMKNPAEQRARLTNQITENENTNLRIRSLLMELLHDPSVENVRPYSPMQQEILKIYEEGVLKSNLEVPDDILKISKTAQPSKSDLQRYKLWLEQKYMSPYTGKPIPLNKLFTPAYEIEHIIPQSRYFDDSLSNKVICESAVNKLKDNLLGLEFIKSFHGQRVSLGFGEEVEIFSEIAYKAFVQDNYAKNPAKKRRLLMDELPEQMVERQMNDTRYISKFITSILSNIVRSEENDTGFNSKNVIPVNGKITSALKQDWGLNDVWNDLILPRFERMNQITGTTAFTSWNENHRKFLPTVPLEYSKGFQKKRIDHRHHAMDALVIACATRDHVNYLNNEHALGKNYKGKEEKQKRRFDLKQKLCYKKTNGHSNENFEWVFLKPWYSFTQEAKDSLERIVVSFKQNLRVINKTSNKYLSYKDENGKLRIDSQGNPIKALTRQTKGDSWAIRKPMHKDTVSGIVSLRNVKSVSLSAALENPENILDKKLKKKIAELVKLKYDKKLLLKYFKDRNYLFEGKDVSKIEVYYFEEDLAASRVSLDTSFSEKKIQSVTDTGIRKILLNHLSKYEGIRDEKGKLIPAETLAFTPEGIEEMNQNIQALNGGKYHQPIYKVRTYEPKGNKFQVGFVGNKHSKFVEAAKGTNLFFAIYVNEDGKRSYETIPFNVVMERLKQGEGPVPLVNEKGDKLLFHLSPNELVYVPEHDEDLNSLDFNNLLKEQVDRIYKMVSSSGPQCFFVKHDVSTPIVNKVEFSALNKTERSVNGLMIKDKCRKVIVDRTGNIL

SEQ ID NO: 5412 - protein, 1522 aa, synthetic construct
  REGION 1..1522: note = Synthetic
MKKILGLDLGTNSIGWALIERDFENREGTILGMGSRIIPMTQDVKDEFGKGNSISQTADRTKFRGVRRLRERHLLRRERLHRVLNVLGFLPTHYNTEIDFVNRLGQFLEETEPKIAWKKNDEEKFEFLFQGSFQEMVADFSANGQDARIPYDWTIYYLRKKALSAKIEKEELAWIILNFNQKRGYYQLRGEEEEENPNKLVEFHSLKIVEVIADEKPNNKGETWYSLHLENGWVYRRSSKTPLLDWKDKVRDFIVTTDLNDDGSVKTDKEGAEKRSFRAPSEDDWTLIKKKTEQEIAQCDKTVGTYIYDTLVQKPTQKIRGKLVRTVERKFYKEELKAILKKQIELQPELFTDDLYSDCVRELYRKNEAHQTALNKRDFVHLFVEDIIFYQRPLRSQKSNIGNCSLEYRVFKVENKEGNEIEKIEYLKAIPKSHPLYQEFRLWQWLYNLKIYQKADDKDITGQFIQSVEDYEQLFDFLNERKEIKQDILVKHLLEKIGFKGRALTSEITNYRWNYVEDKVYPCNETGTQIRTRLSKLDYVPDGFLTPELEYKLWHLIYSVTDKIEFEKALKSFANKHGLDEVSFVEGFRKFPPFKGEYGSFSEKAIKKLLPLMRLGKYWDWDKIDGDTKNRIWKIITGEVDEEIKNRVREKAIHLTTEENFQGVQLWLAQYVVYDRHSEANNAGKWNSVADLEKYLEEFKQHSLRNPIVEQVVTETLRVVRDIWAKYGSGIKDFFNEIHIELGREMKNTAEDRKKITNQVTENENTNLRIKALLAELLNDGRVENVRPFSPMQQETLKVYEEYALGSEERYNVHTGNFEHDPISDEILKISKTPQPTKSELQRYKLWLEQRYRSPYTGQMIPLNKLFTSEYEIEHIIPQSRYFDDSFSNKVICESAINKLKDKNLGLEFIKKFHGTIVETGFGRSVRVFEEQGYQEFIKERYAKNRSKRNKLLLDEIPDKMIERQMNDTRYISKFISNVLSNIVRADNNDDGVNSKNVLPGNGKITTKLKQDWGLNDVWNDLILPRFERMNLLTNSTAFTAWNENHQKFIPIVPLEYSKGFSKKRIDHRHHALDALVIACATGDHINLLNNQSAKSETSRFDLQNKLRNKEKWQDNQGKERDKFTDFKKPWDNFTLDVKNTLEQIVVSFKQNLRVINKTTNRYEKYVEKNGKLVKELVSQTKGDSWAIRKSLHTPMPYGKKVFEFDTLKIADNVGKRELIIDEEIKIKVEEVYQNYKCKVTDTQKYLKKNPLRDNHGNEIIVTAFKVKIEKFRKRQPISELSNRGQGGIKTVEEAIKFIDKVADFKIRQDLLNHLKENDNDLEKSFSAEGLERFNAKRKIPIYKLPIAESGSGRFAVGNKIGTRHKWVEADKGTNLFLAIYQNKNANRSYRTIPLNIVIERQKQWLSSVPDRNEKEDNLLFYLSPNDLVYVPTVEEQEDSETIDFRNLTKEQVKQIYKMVSTTQDKLECVPVHYASPIRANEMGSNNKSQNSLDGIQIKSVCIKLKIDRLGNISKTLSDILR

SEQ ID NO: 5413 - protein, 1520 aa, synthetic construct
  REGION 1..1520: note = Synthetic
MKKIVGLDLGTNSIGWALINAYIDEYNKEHLYGIEACGSRIIPMDAAILGNFDKGNSISQTADRTSYRGIRRLRERHLLRRERLHRILDLLGFLPKHYSDSLNRYGKFLNDIECKLPWVKDETGSYKFIFQESFKEMLANFTEHHPILIANNKKVPYDWTIYYLRKKALTQKISKEELAWILLNFNQKRGYYQLRGEEEETPNKLVEYYSLKVEKVEDSGERKGKDTWYNVHLENGMIYRRTSNIPLDWEGKTKEFIVTTDLEADGSPKKDKEGNIKRSFRAPKDDDWTLIKKKTEADIDKIKMTVGAYIYDTLLQKPDQKIRGKLVRTIERKYYKNELYQILKTQSEFHEELRDKQLYIACLNELYPNNEPRRNSISTRDFCHLFIEDIIFYQRPLKSKKSLIDNCPYEENRYIDKESGEIKHASIKCIAKSHPLYQEFRLWQFIVNLRIYRKETDVDVTQELLPTEADYVTLFEWLNEKKEIDQKAFFKYPPFGFKKTTSNYRWNYVEDKPYPCNETHAQIIARLGKAHIPKAFLSKEKEETLWHILYSIEDKQEIEKALHSFANKNNLSEEFIEQFKNFPPFKKEYGSYSAKAIKKLLPLMRMGKYWSIENIDNGTRIRINKIIDGEYDENIRERVRQKAINLTDITHFRALPLWLACYLVYDRHSEVKDIVKWKTPKDIDLYLKSFKQHSLRNPIVEQVITETLRTVRDIWQQVGHIDEIHIELGREMKNPADKRARMSQQMIKNENTNLRIKALLTEFLNPEFGIENVRPYSPSQQDLLRIYEEGVLNSILELPEDIGIILGKFNQTDTLKRPTRSEILRYKLWLEQKYRSPYTGEMIPLSKLFTPAYEIEHIIPQSRYFDDSLSNKVICESEINKLKDRSLGYEFIKNHHGEKVELAFDKPVEVLSVEAYEKLVHESYSHNRSKMKKLLMEDIPDQFIERQLNDSRYISKVVKSLLSNIVREENEQEAISKNVIPCTGGITDRLKKDWGINDVWNKIVLPRFIRLNELTESTRFTSINTNNTMIPSMPLELQKGFNKKRIDHRHHAMDAIIIACANRNIVNYLNNVSASKNTKITRRDLQTLLCHKDKTDNNGNYKWVIDKPWETFTQDTLTALQKITVSFKQNLRVINKTTNHYQHYENGKKIVSNQSKGDSWAIRKSMHKETVHGEVNLRMIKTVSFNEALKKPQAIVEMDLKKKILAMLELGYDTKRIKNYFEENKDTWQDINPSKIKVYYFTKETKDRYFAVRKPIDTSFDKKKIKESITDTGIQQIMLRHLETKDNDPTLAFSPDGIDEMNRNILILNKGKKHQPIYKVHVYEKAEKFTVGQKGNKRTKFVEAAKGTNLFFAIYETEEIDKDTKKVIRKRSYSTIPLNVVIERQKQGLSSAPEDENGNLPKYILSPNDLVYVPTQEEINKGEVVMPIDRDRIYKMVDSSGITANFIPASTANLIFALPKATAEIYCNGENCIQNEYGIGSPQSKNQKAITGEMVKEICFPIKVDRLGNIIQVGSCILTN

SEQ ID NO: 5414 - protein, 1520 aa, synthetic construct
  REGION 1..1520: note = Synthetic
MKKILGLDLGTNSIGWALINHNFDSKDGNIIGLGSRIIPMSQDVLGKFDSGQSISQTADRTGYRGTRRLYQRDNLRRERLHRVLNILGFLPQHYAADIDFDKHLGQFKNDKEPKINYSKNETGRFDFLFTDSFLEMANDFKNSGYSDKIPYDWTIYYLRKKALSEKISKEELAWVILNFNQKRGYYQLRGEEEEVDENKSRTFETLIVERVEQTNEAIKTSGDKLYDIYFTNGWKYDRQTTKPGDWLNKTREFIVTTSTTKDGEIKRTYKAVDSEQDWIAIKAKTEQDIEKSSKTVGEFIYESLLQNPKQKIRGKLVRTIERRFYKNELKQILEKQVQFHNELKSTALYLNCINELYPHNEAHAANIKDKGFVYLFMDDIIFYQRPLKSKKSTISECTYETRTYKKVIKVDENGNTITKTIEVTQGINAISKSHPLFQEFRLWQFLSFLRIYKHTLQGELDITSELIETESDWVELFDFLNCRHSVEQKHIFEYFYKKGVIQKSDIESYRWNYVEKPYPCNETRSQFITKLKKVENLIPEVFLTKEIEQHLWHIIYSVKDKNEYEQALKKFAAKYSIDETSFFAAFKNFKPFNNDYGAYSYKALNKLLPLMRIGKYWNEENIGNSTLNRINKILTAEYDEKIANRVREKAINLTDISNFKGLPVWLACYVVYNRHSESGDNTKWNKPSDIDKYLNEFKQHSLRNPIVEQVVTETLRTVRDIWQHYGNSAEKYFNEIHIELGREMKNPADKRKQLSARNIENENTNQRIRELLTELMNDDLTEGDVRPYSPSHQEILKIYEEGVYQNPNADFSKVSNDDIDKIRKNSSPSVNDIKRYKLWLEQGYRSPYTGDMIPLSRLFTSDYQIEHIIPQARYFDDSMSNKIICESEVNQLKSSMTAYEFLKNPPLRSVTLNGGKIVNLLSLQEYETHCNQYFKRNRTKLTKLLSEDIPEGFIERQMNDSRYISKLVKSLLSNIVKEDDEQEATSKNIVPVTGAITSKLKQDWGLNDKWNEIVAPRFMRLNEITSSNNFGYFDKEINAFRCEVPDDLKRNFNKKRIDHRHHALDALVIACTTKDHVNYITSLNTSRTNYGLVSKFRKIEERQIKDKKTGESKLIKVPTHYLLPWISFSTQALTHLQTTVISIKQNTRVINKTNNKTWKWVEKNGHLKKELVKQTKGDNWAIRKPMHKETVSGAVSVRIKKEVSFINGIKDWENLVDKNLKSKIKQLYAAGNNEKAVAKYFKDNPYIIDNKDVKTVEIYTYTQNATAVRTMLTDKLTRKQFDRITDSGIKTILERHLKNYTLENGKEQFELAFNPDGIEELNKNIIALNNGKFHQPIYKVRIYEEGSKFNVGYTGNKHTKYVEAAQGTNLFFAIYWNVEKQKREFETIPLNIVIEHQKQVAALPKSERIPVPVNAEKGKLLFVLSPNDLVYVPTQSELENPTSVDFGNLNKEQVGRIMKVNDFSGVTCYFTPNTLSIAIAPKEIDSSFDNKTAKFENVSIKDVSWKLEVDRLGNITNIIR

SEQ ID NO: 5415 - protein, 1520 aa, synthetic construct
  REGION 1..1520: note = Synthetic
MNKKILGLDLGTNSIGWALIEEDFDKRIGSIIGMGSRILPMSQDELGKFDSGAPINTGTAERTNFRGIRRLRERHLLRRERLHRVLNLLRFLPEHYAAQIDFKKRVGQFKEESEPKLAYAFDAATNKAEFIFKTSFKEMLNDFAQHQPPLVSDNRKVPYDWTIYHLRKKALTAKIQKEELAWILLNFNQKRGYYQLRGEEEANETPEKKVEFYSLLVTDVEAAEDKKGADTWYNVHLENGWIYRRTSKVPLDWAGKMKEFIVTTDLNEDGTEKTDKEGKVKRSFRAPLENDWTLIKKKTEHDIDKSHKTVGEYIYDTLLATPNQKIKGRLVRVVERKFYKEELKAILEKQKEFHPELNDGDLYNACLEELYQNNEAHQNSIAKKDFTHLLLNDIIFYQRPLKSKKSLISNCKFEERTFVKDGIKQTQPLKGIAKSHPLFQEFRLWQFIQNLKIYKKATPEDENITDTYLSTEDDYVKLFDWLNSRKDIDQKTLLKQYFKVKNADAYRWNYVENKIYPANETRAEILKRLHKANVPEDFLTKEKQEALWHILYSVEDKSEIQKALTTFAYKNSLPDEFIEQFKRFPHLEKEYGSYSAKALKKLLPLMRMGKYWDEQTIIDSTPLYQHNIQQVITNLQNKEKKLTEEDRQRGKTINNKLLEKLQRLADDPAAYKGLEHFLASYLVYGKHSEDSDVLQWKTPAAIEDYLREFKQHSLRNPIVEQVITETLRVVKDVWNFYGNGEENFFDEIHIELGREMKNPAEERKKITAQMNDNENTNLRLKALLSELMRDSEVENIRSYSPYQQDILKIYEEGVLNANDGNIPDDILNISKQALPTASELKRYKLWLEQGYRSPYTGLIIPLNKLFTPAYQIEHIIPQSRYFDDSLSNKVICEAEVNADKGNMTAFEYIKKKGGSKVNGSPITLLAQNDYEDLVKRSFSKSRSKAKKLLMEDIPEGFIERQLNDSRYISKIVKNLLSNIVREDDEREAISKNVVPVTGAVTSQLKHNWGLEHIWNESVTPRFIRLNTLTGTTNFGSINPTTNKFLPQVPLELQKGFNKKRIDHRHHALDALVIACTTKDHINYLHSLNSERKNFSLVSKLREIEEAQVNGTIRKVPKAFIKPWETFTQDAKEKFQHIIVSFKQNTRVITKTNNRYEHWEKDTDGNLKKVPIRQTKGENKAIRKPMHKDTVAGLVKLGFRKMVSLAAALDSWEMITDKELRNEIKLLVSKGYDKKKLLHFFKTKENKWNNKEMSKVEIFYWDVDKYGKPNNAASRVKLDETFNPVMIACITDTGIQRILYNHLYKYNEEKGGKIIEHPELAFSPDGIDELNKNIQELNGGKWHQPIYKVRTYEPRGNKFSIGHTGNKKDKYVEAAKGTNLFFAIYRNEKEKRSFDTIPLNIVIERKKQHLSPVPEKNEQGDILEMYLSPNDLVYVPEEGEKQNIHSINFKDLCKEQVDRIYKIVSFTNNRLYAIPFAVAKSIVDKVEFTQLNKLEFSLDKRSIKDGCIKLKADRLGNITLA

SEQ ID NO: 5416 - protein, 1520 aa, synthetic construct
  REGION 1..1520: note = Synthetic
MKPKHILGLDLGTNSIGWAVINASKNEEDKEQLDGINCDGVRIIPMDASVLGDFDKGNSKSQTADRTKSRSVRRLYERNKLRRERLHRILDLLGFLPSHYSQQLDRYGKFITGTEPKLSWYKNEQGHWSFIFQDSFDEMLADFYQEHPDFISKGQKVPYDWTIYYLRKKALTQKVNKEELAWILLNFNQKRGYYQLREEEQQERPSKTRLYFDSQIVTDIIDTNQTYKGMKVFSVILEDGTRGKIFKKEIPDWIGQKKDIIVTIDLDKDGKDKYDETGELSCRFKIPSEQEWEEQWELIKTKTQKDLDDSGKTVGAYIYDTLLQMPKQKIRGKLVRTIERKYYKEELRRILEKQKEFHPEFQDRTLYEACLEELYPQNDAHRNLIANRDLIYLLVDDILFYQRPLKSKKSLIADCPYEEYIHTDKHTGEIQHFGIKCIAKSHPLFQEFRLWQFLSNLRIYQKEKTVEGKLYLDVDVTSEFLKDEEDYADLFDWLNQQKSIKQDTFLKCPLFGLKKNDMANYRWNYVEDKPYPGNETRALILGRLEKAGIPADFLTRKKEEALWHILYSVSDKEELGKALISFAEKQQLGENFVEVFLKTPPFDKEYGSYSAKAVKKLLPLMRMGKYWNENDIDGQTRDRIDKIISGEYDEAIRTRVREKAIHLDKVSSFKGLPLWLACYVVYNRHSEAKDIQKWENPSDIDDYLKRFKQHSLHNPIVEQVILETLRTVRDIWKQVGHIDEIHVELGREMKKTKDERAKMTRQIQENENTNLRIKALLTEFMNPEFEIENVHPYSPSQQDLLRIYEEGVWNSVDEVPDEIATIIKKFNESDIKKRPTTSEVLRYKLWLEQKYRSPYTGEMIPLSKLFTPAYEIEHIIPQARYFDDSFSNKVICESEVNKLKSNMLGYEFINKHHGEKVQLTGGKSVEIFSVGSYEQFIKDNYSRNAAKMKRLLMDDIPEQFIARQLNDSRYISKLVKSLLSNIVREAGEQEEMSKNVIVCTGSITDRLKKDWGINDVWNRIILPRFLRLNELTESNRFTSVTASGNVIPAMPLELQKGFNKKRIDHRHHAMDAIVIACANRNIVNYLNNESASKNAQTSRYDLQRLLCDKQKTDDKGDYRWFIKKPWDTFTQDVYTALQEIIVSFKQNLRIINKTTNHYQHYEAGKKAIISQKKGDNWAIRKPMHKDTVYGEVNLRRIKTVSLKEALINLNAVVEKDLKKKLKELLSHNQNEKQIKKYFEENKDVWSEVNLKKIDVYYFSKETKDRFFATRFGNDLVSVFKDCKDMDKAKDKIKKITDTGIQKILLRHLEANENNPEWAFSPEGVETMNKNIIELNDGKWHQPIYKVRVYEKADKFAVGQNGNKSTKYVEAAKGTNLFFAIYETEVEDKNTSEIIKKRSYATIPLNVVIDRQKCGLPSVPEDENGNLPKFVLSPNDLVYVPTKEEIQNGNTVPLDKTRIYKMVSCTGNQCFFIQFHVANVIVDKYEYSAMNKMERAITGEMIKEICIPIQIDRLGNIIKKI

SEQ ID NO: 5417 - protein, 1519 aa, synthetic construct
  REGION 1..1519: note = Synthetic
LTAAILLQKIFTFVRKKTNKTNTMKNILGLDLGPNSIGWAVVQVEKESTEETLFANGKILMAGSRIIPMSQDTLNNYEKGASTSQTDKRTGYRQVRRQYDRFHQRRERLNRVLLTLDYLPEHYAEQLDRYGKLPKDGEPKLAWRQTTDGKSEFIFREAFLEMVAELRKVHPDLKRIPYDWTLYYLRTKALSKKLQPEELSWVLHSFNQKRGYNAVRGKDDDETSNPDKLQEYHCSRLINIEDTGEKLRGNTNYKLTFEGGTVFEVPLRRLTISIGEEIEYIVTTKLDEDGQPKLNKQGKPDISYRIPNADDAWTLNKLRAEFTIDQSHSTVGQYIFNAILRNPQQKIRGELVRTVDRRFYRDELRRILEVQIPLHPALQDREKLEECLLALYPSNEAHRNSMQGRDFKALLMDDVILYQRPLKSKKSLIGECKYETHTYINKEGKREPIGLKCASRSNPLFQEYRLWQFLENLRILKRKTLDGNHYRTDVDVTTLFLRTNESYTSLFDYLRSRAEIDQKTLLKFFKLKEEDYRWNYVEERKYPTSETRAEMLKRLKKAGVPTEFLTHELEMALWEILYSVSGQSELEKALRKFAEKNNLDQETFYQCFRTIKPYSADYCAFSTKALRRLLPLMRRGHYWNYNAIDPQTQQRIERLINGEEDTTISNRVREKAETLRTETDYQGLPIWLASYVVYGRHSEASEIKKWASPEEMDRDIRCFRQHSLRNPIVEQVCLEALRTVRDIWKEIGSIDEIHVELGREMRATAKERESRHNRQLENEQTNLRIKALLQEFMNPEFGIEDVRPYSPNQQELLRIYEDTVLSQEAGRIDEPIREIIRKFSQTDAAKRPTTAEVLRYKLWLEQKYRSPYTGEPISLSKLFTSAYQIEHVIPQSVYYDNSYSNKVICEAEVNLLKGNMLGMPFIMQHAGEKVQCSVGNIVTISTPEAYRAFVEEHYKGKKQKILLSEEIPTNFTARQMNDTRYISRFIIGELSKLVREHNPDGTLEQEAVSKNILILNGAVTDKLKKDWGLVDVWNGIIAPRFRRLNAMEGSQRFGHEAMKDGKRYFQIEMPLELQRGFQRKRIDHRHHAMDAIAIACATRTVVNYLNNDHSHEGAGREDIKRAVSSKRSGQWLVNKPWNTFTQEARKQLQQIVVSFKQNLRVINKTSNRYVRYNPQTRKKVIFVQQKGDSWAIRKPLHKESVFGRVNLRTQKAVNFKTAYANIERIVDKRFKHAVLAAIKRYGGKCTDKQVLKYMQGMPQWKDFDFKKVQIYVFSNDDVKTQTSAIRKRLDDSFDKKKILTITDTGIQRILLRHLEQNGNNPKEAFSPEGIVRLNESMLELNGGKPHLPIFAVRISEPLGNKFSVGMRGNRSKKFVEAAKGTNLFFAIYQQEDGRRLYRSVPLNEVIERQKQGLSSAPEHDENGNALLFVLSPGDLVYLPTKEERNSRIDVQAIDKTRIYKMVSCSNNRASFIQHNIATAIVDKKEYTAANKIEISDEGISIKQYCLPLEVDRLGRYRLK

SEQ ID NO: 5418 - protein, 1518 aa, synthetic construct
  REGION 1..1518: note = Synthetic
MKHILGLDLGSNSIGWALVQQDFENKQGKIMATGSRIIPMDQGILGDFERGNTVSQTAERTTYRSTRRLRERHLLRRERLHRVLHILGFLPPHYDVQIDFTKRYGKFIDNAEPKIAYNNGNFIFMNSFNEMIKDFKKHQPQLFYKKSNGEESKIPYDWTIYYLRKKALSQKITQQELAWLILHFNQKRGYYQLRGEEETENPNKEVAFHSLKVVDVEAEAPNKKGEIWYTIRLENGWIYRRTSKIPLDDWKGKTRDFIVTTDLNDDGTIKLDKEGKEKRSFRAPDENDWNLLKKKTEHDIDFSGKTVGAYIYDHLLQNPNQKIKGKLVRTIERKYYKDELKAILAKQIALQPELFTETLLADCIRELYRKNETQQQNLLSKDFLHLFVEDIIFYQRPLRSKKSTIANCTLEKRSYIDKETNERKEAPIKVCAKSNPYYQEFRVLQWLQNLRIYEIETDREVTAEFIETAEDYEALFNFLMSQKEIDNEGLLKYFLLTKKPQIKDKVAKSELKKWLTTYRWNYVYDAADNSSKKYPMNETGYDLQRYLQKVEGLPANFLTFDITYRLWHLLYSVKDKVEFEKALKKFAQEYQLDEASFVDSFKNFKPYPNEYGSFSEKAIKKLLPLMRFGNHWDFNRIDVSTQKRIDDLINGVANDEIRTIIREKAEKYQLNSESCFQGLPLWLAQYVVYNRHAEATDIEKWTSVNDLEAYLEDFKQHSLRNPIVEQVVTETLRVVRDIWQRYGGGQANFFDEIHIELGRELKKTAEERKQLSNRNQENENTNLRIKKLLAELKEDASIQNVRPYSPVQQELLKIYEEGVFSATDEVEEDIQKIRKKAEPTTPEIQRYKLWLEQKYKSPYTGEVISLTKLFTEEYEIEHIIPQSRYYDDSLSNKVICESAVNKLKTNQLGLEFIQNHHGEKVRITGNKEVTIFTEEQYKEFVKKHYANNSAKQQKLLLNEIPEKMVARQLNDTRYISKYISEILSKIVRSDEKDEGVNSKNVIPCTGKITTALKQDWGLNDVWNELILPRFERMNQLTQTELFTSYNDRLQKNLPTVPIEYSQGFQKKRIDHRHHAMDALVIACATKEHINYMNNQHALDKSKDKKEKQQSRIDLRTILCEKKNNNWQFKKPWATFTQEAKEALEHIVVSFKQNLRVINKATNYYEKWEEKNGVLVKKKVKQEGTNWAIRKKLHEDFPYGKVKYQVNFLKISENISKIDLIVDEFIKRQLEKIYVENHRKVNLTKKYLKENPIRDQKGEEVISTDFREENIKYRKRRPISVLSDRNRKTGITSIEKMLKTIAKVADNVLKRELFLYLEECNNDIDVAFSPEGIEQFNSKRKIPVYRLPFFEEGEKKNELGNKGKYVEAAKGTNLFFGVYQGKGKRTYATISLNEVIERQKQGLPSVPERNEKGEPLLFSLSPNDLVYVPMEGEIAETIDFNNLSKEQKERIYKTVSFTGNECHFVKSTIASLIKSYDAKSKIGELGSLNKLEVTISGDSRIKEVCIKLKVDRLGNITKA

SEQ ID NO: 5419 - protein, 1518 aa, synthetic construct
  REGION 1..1518: note = Synthetic
MKRILGLDLGTNSIGWALTQQNFDKKEGKIDGIGSRIIPISQDILGKFDSGQSHSQTSERTGYRGVRRLIQRNLLRRERLHRILNILGFLPQHYAESIDFEKHFGQFKKNTEVKLNYKKNESGKYEFIFMDSFNEMVEVFLKKKQNTKIPLDWTIYYLRKKALSKKISKEELAWIILNFNQKRGYYQLRGEEEETDNNKQEEFYTLKVKDVIPTEDKNNKGIWYNVILENDWIYRRQSKEPLDNWIGTSKEFIITTTISKDGKEKRSFRAPKEDDWNLLKKKTEQSIKNSKKTVGEYIFDTLLANPSQKIKGKLIKTIERKLYKKELSAILKEQKKHHPELQNRDLYKKSIEELYPRNEAHQNNIKEKDFTYLFLNDIIFYQRPLKSKKSTISNCSYETRTYKKKIELIEDEKKIVKEIIVKEPLKAISKSNPLYQEFRLWQFLANLKIYDKTKLDRDVTSDFIKTDEDYVNLFDFLNVRKEVDQKNIIQYFITNKVITKSDKENIRWNYVEDKKYPCNETKANFLSRLSKVKNIDPITFLTPKIEQSLWHIIYSIKDKTEFEQALKTFAKKHNLDIDSFIDNFIKFPPFKNEYGQYSEKAIKKLLPLMRKGKYWNENEVDLEVKERIKNILERLNFIDFDKTKIDENITDDDIPKPLLKSFIEFKNKNALQGLNTYQACYAVYNRHSENNTSSYWKTPMDIEKYLKNFKQHSLRNPIVEQVVTETLRVVKSIWEYYGNSAENFFDEIHVELGREMKNSADKRKRISDRNKENENTNQRIKSILQELKDEGIKNIKPYSTSQQEILKIYEEGVYQSSNETSDEIEKIRKNNAPTKAEITKYRLWLEQGYISPYTGQIIPLSRLFTTDYQIEHIIPQSRFFDNSLSNKIICESEVNQLKDNKTAYEFIKNNSGRIVDLGGGKTVKLFKLEDYENHCSNYFKRNRSKLKKLLSEEIPEDFINRQLNDSRYISKLIKGLLSNIVRQENEQEATSKNLIPVTGAITSKLKNDWGLNDKWNELIAPRFIRLNKMTSTSNFGYWDEKINAFRTQVPDEIAYGFNKKRIDHRHHALDALVVACTHRKHIQYLNTLNSEKKNYSLRDSLLIKNKEGHYTKNFLLPWYNFTSEAKNNLEKIVVSFKQNLRVINKSNNKTWQWVEKDGKLKKQLIQQTKGNNWAIRKPMHTETVYGKVLIKKKRKNPISLNKAIENWELIIDKKIKAIVKEKAKFYKSNLKLLKKYFRDNPIHIHGKKIDKVDIYEIVEATASRVALSEKFTRKQLESITDSGIQLILENHLKNYIDDKGKERFDLAFNSEGLDSLNKNIITLNNGKQHQPIYKVRTYEIGNKFNIGETGNKKDKYVEAAKGTNLFFAIYWDASKQKRVYETIPLIEVIEHQKWRATLPKEEFKKTPLTPIKEEKGQFLFSLSPNDLVYVPTDEEIDNPSLVNFEKLTNNQVNNIYKVVSFTGNRLYAIPNNIASPIQKKYEFTQLNKLEFDLKGKSIKDRCWKLKTNRLGKIIQVLK

SEQ ID NO: 5420 - protein, 1517 aa, synthetic construct
  REGION 1..1517: note = Synthetic
MKKKLGLDLGSNSVGWALVEQDFKSKDGRILGMGSRIIPMSQDILGDFDKGNSVSQTAERTGYRATRRLRERYLLRRERLHRVLYVLGFLPEHYAKQIDFERRLGKFIKEAEPKLAYKVVEDKIKGKNEYEFVFIESFNEMLSDFREHQPQILLSEDGESRLVPYDWTIYYLRKKALTKKIKKEELAWILLNFNQKRGYYQLRGEEEEGNPNKMVEFYSLKVVDVNADEGQKGSSEIWYSLTLENGWVYRRSSKTPLSNWKGKVRDFIVTTDLNDDGTVKTDKESNEKRSFRAPGEDDWTLLKKKTERDIEQSDKTVGTYIYDTLLQNPKQKIKGKLVRTIERKFYKNELRRILQKQKEFHPELRNGDIYNDCVRELYRNNDAHRLLLSKKDFVHLLVDDIIFYQRPLRSQKLSIGNCTLEYRKYKDASGVEHTKYLKAIPKSHPYYQEFRLWQWLCNLSIYKREDDTNVTLKFLTNTSDYAKLFDFLNNRKEVDQKSLLKYFKLNEKTHRWNFVEDKKYPCNDTGYEIRRRFAKIETLPEGFLNPDIEKKIWHIIYSVTDKKEYEKALKSFANKYQVDEIQFVDAFRKVPPFKREYGAYSEKAIKKLLPLMRLGKYWCWDAIDKCSRERIEKIITGEYDENIDDRIREKARHFRDESDFQGLQHWLAQYVAYGRAAITDKWNSVDDLEQYLEDFKLHSLRNPIVEQLIMETLRVVKDIWIKYGNGVKDFFDEIHIELGREMKNTKDERKRIANQIAENENTNLRIKAILAEMVKYTEMENVRPYSPMQQEILKVYEDGVLNSDIEIDEDILKISKMAQPSSADLRKYKLWLEQRYRSPYTGAIIPLNKLFTPEYEIEHIIPQSRYFDDSFSNKVICEAAVNTLKDNQLGYEFVRHHHGEKVQIGHKTVQVFEITEYEDFIKRHYAKSRSKRNKLLMEDIPEDMVKRQMNDTRYISKFISSVLSNLVRAEANDDGINSKNLIPVNGKITNQLKQDWGLNDVWNELILLRFERMNQLTNSSNFTAWSKNHQKYLPTVPLEFSKGFSKKRIDHRHHSMDALVIACTTRDHVNLLNNKYAKSKERFDLSRKLRLFERVNYVDPRTGRRVEREVPKDFIKPWINFTSEAKTAMENIVVSFKQNLRVINKATNRYEKWVERDGVKVKEVRAQKGVNWAIRKPLHKDTVAGLVLLRRRKIVSLNAALETVNEIADRELRKEIQSMQLKGLDRKQITKYFKDIKYQWRGQDISRLEIFYWDNDNVASRVSLNDTFDEKRIGTITDTGIQKILLNHLDSCKGRLDARGKDIPAPLIAFSPEGIEEMNKNIVSLNNGRPHQPILKVRTYEPKGNKFYVGQTGNKRAKYVEAAKGTNLFFAIYQDQVGKRKYETIPLNIVIERQKQGLGSVPSENEQGDKLLFYLSPNDLVYVPSEEEKGDADNADFGDLSTPQLYNIYKVVSFTGYQIFFVKHDVAAPIVNKGEFSPLNKMERAWDGRMIKEHCIKLKVDRLGVISRFNAYIDITV

SEQ ID NO: 5421 - protein, 1516 aa, synthetic construct
  REGION 1..1516: note = Synthetic
MKNILGLDLGTNSIGWAVVGSVTDAAEKEILAGIKGCGSRIIPMDASQLSDFAKGNTVSQTADRRSKRTARRMNERFILRRERLHRVLNLMGFLPEHYAAFLDRYGKFIDADDHKIAWRTNSDGWQEFVYRQAFNEMYEEFKSKNPEFLKNGGKIPYDWTIYYLRKKALYSPITKEELSWILLNANQKRGYNQLMGMDEQQEQEDRSKSVEYLSSTIVEVTDSGDKKGKATWWNCKLDNGMVYKRPSEVKPDWEGKTKEFIITTDLDKDGKPKLNKYGEIQRSFRMPGENDWTLIKTRTEDQVNKSGEFVGEYIFNALLKEPTQKIRGKLVRTIDREFHRAELKAILGKQVGFIKELTDRDLYRQCIEELYPSNDGYRNSIASRDFIYLLADDIILYQRPLKTKKSLIDNCPYESHIYTDKETGEVKTAPVKCIAKSQPLYQEFRLWQFVQNLRIYDNFSGEDETSFVIPTEAKRVEVFKYLNDISSTNQESFFKEFLGVKKPKGKDSKLPYVWNYVEGKDYPCNETRGPILSRLKKSGIPSSFLTRDIENDLWLILYSSESRKELEEALRKFAGKHDLAETFVENFKKFPAFEKDYGAYSAKAIKKLLPLMRMGEFWSETAISNDVKANIENIINGNVSASIPQKVRDQLSSYKSISDFKGLPLYLACYVVYGRHSEASDSQLWTSPEDIDAYLNNFKQHSLHNPIVEQVVTETLRTVRDIWRCFGKIDEIHIEMGRDLKSPADKRRQYQMRALENENTNMRIRALLMEFTNPDFKIDYVRPYSPSQQDLLRIYEETVLNSGEELPDYVVDVLRNLGNGKTEQPTHAEILKYKLWLDQKYRSPYTGQPIPLAKLFTPAYEIEHVIPQARYFDDSYNNKVICESEVNKLKSNMLGHEFIDKHGGEAVSLNMGGTVRILTKDKYEDLVKKIYGNERMKIKFKNLMLDDIPEDFINRQLNDSRYISRLMLGLLSNIVRKEGETEATSRNVIATNGSITDRLKVDWGIKDTWNKILLPRFRRMNEITGTNEYTTINRNGHEIPNVPDDMSKGFIIKRIDHRHHAMDAIVIACASRNIVNYLNNSSACKGAKISRYDLQHLLCNKVLQGDGSYRWVIKTPWTGFQNDVYNALNNIIVSFKQNLRVINKTTNYYQHYEDGKKIIAKQMKGDNWAVRKSMHKDTVFREVNLRMIRQENLKSAIEHLDDIVNRDLKEKLKEFLREGISLAKIKGYFEQEKDTWSDVNLKKIDVYYFTQEDKNPKTGLPKHRFFSTRKPIDMSYTEEKIKTQITDTAIQKIMLAHLAENGNDPKVAFSPDGIDRMNDNIVRLNSGRMHQPIFKVPFFEEGQKFSVGNVGAKAKKFVESDKGTHLFFAIYENEAEDKETGEIKKVRSFADIPLNVAIDREKQGLAPAPENENGMKPVMVLSPGDLVYVPTEEEIKDGKLGPSIDRDRIYKMVSAEPGKCYFIPQSVASVIKDKVEFESHNKSMKSADGKVFIQKVCVPVKVDRLGHIISINLNMI

SEQ ID NO: 5422 - protein, 1514 aa, synthetic construct
  REGION 1..1514: note = Synthetic
MKRILGLDLGTNSIGWALVENDENDRKGKIIGMGSRIIPMDMSELDNFNKGASISKTAERTRLRMTRRLRERHLLRRARLHRILNIMGFLPEHYRNSIDFIDKKGCFFEGQEPKIAYKPDKNSEQFCFLFTSSFHEMLEDFRKFQPELIQNRKKVPYDWTIYYLRKKALTQKISKEELAWIILNFNTKRGYYHLRGEDEDNQDNKKIKEFRALKVVNVTEREGANSSGKKWYDMELENGWVYSRQSNLPPNLEGKTIELIVSYTLDNNGNIKKDKNGKEKYSLSMPGEEDWNLVKIKTENDLKTSKKSVGEYIYDHLLKNPDQKIRGKLISTIERKFYKEELSRILKTQMNFYEELKNRELYQKCVEELYPNNKSHQQTLLQKDFIHLIVEDIIFYQRPLKSKRAFVNNCPLEYRVYVDKKSGELIKSGVKCIPKSHPLFQEFRLWQYVRNLRIYERERMVNGRLMVNVDVTNELLPDEEHIVRLFDLLNDRKSFKQDDVLRFVGIKSPKDRKRYSWNYPEDKELPGNETRHLILAWLKKVDGVPEDWLDPEKLKALWHLLYSVTDREEIIKGLHSFAKKYELPDTFVEHFKKIPRLEREYGSFSEKAIKKLLPLMRMGKYWKAEEIPADLLEKAQKIIDAEADDRISDEVREKLLHLKDISQLKGLPLWQASYLVYGRHSETGEVVKWRTSEDLEKYILQFKQHSLRNPVVEQVILEALRVVKDIWEHYGEGKEGFFNEIHVEIGRELKNPADKRKKITSQIQENENTNLRIKALLEELFNDPSVKNVRPYSPAQQEILRIYEDGVLNGQKEIPDDILKISKMARPSKSQLVKYKLWLEQKYRSPYTGEIIPLSQLFTSAYEIEHIIPQARYFDDSFSNKVICEAEVNREKGHQLAFEFITKRGGDEIELNFGKKVTILNVEEYQKFVKDHYGRSLRSLSKMRKLLMEDIPDDFIDRQLNDSRYISKVVRNLLSNIVRAEDENSLVSKHLITCTGGVTTRLKHEWGLNDVWNELITPRFVRLNKMGKEKFGEWINKKGKQVFQIQMPLELQKGFNKKRIDHRHHALDALVVACASRSHVNYLNNDSARANASETRYDLRNKLCYKDKTDSNGNYRWKFYKPWESFTEEAKNRLAGTVVSFKSNRRIMTRSSNRYFKWVDTSEGKKKKLVRQIKGDNQAIRKPLHKDTVLGKVSLRKEKKVSLSKAIDLWESIVDKPLKKRIQSLREQGYDKKLLLKYFKDRNNQFNGQDISRVNIYFFDNNLAARRVTLDASFNSEKRIDGITDSGIKKILYAHLQNEKYHGKKDEKGNEISPYELAFSPEGLEEMNANIKKLNGGKPHCPIYKVRLAETIGEKFKLGEKGNKNKKYVEAAKGTNLFFAVYVDEKGVRSFETIPFSVALERRKQKLAVVPEENENKEKLLFYLSPNDLVYVPDEDEKLIDYRQLSINPTRIYKMVSSSGTQCFFIPHFVASPIVQTMELGPNNKSERAWDGQMIKNVCYKLSVDRLGNVKIEK

SEQ ID NO: 5423 - protein, 1513 aa, synthetic construct
  REGION 1..1513: note = Synthetic
MNKKILGLDLGTNSIGWALILQDFENKQGEILGIGSRIIPMDQGTLGKFAEGSSISQTAERTSFRNARRLRERYLLRRERLHRVLNILNFLPEHYVSQIDFEKHLGKFKEETELKLTYKNKEFIFKTSFDEMLADFRQHQPHVLVNEKGKPKLVPYDWAIYYLRKKALSKKIEKEELAWILLNFNQKRGYYQLRGEEEGDNPNKKIEFHSLKIIDVIADEIQKDKTDIWYSLILEHGWIYRRQSKTPLFDWKDKIRDFIVTTDLNNDGSIKTDKEGKEKRSFRAPGEDDWTLLKKKTEQEIDQSGKTVGAFIYDTLLQNPNQKIKGKLVRTIERKFYKEELRRILEKQIELQPELFTSDLYSDCIRELYRNNESQQSSLSKRDFVHLFINDIIFYQRPLRSQKSSISNCSLEFRNFKDENGNKQKQYLKAIPKSNPYYQEFRIWQWMYNLSVYKKDDDTNVSKEFLSSIGDMENLFDFLNNRKEIEQKPLIKYLLEQKGLKGKLLNAEVEKFRWNYVEDKQYPCNETATLIREKLTKIKGISENFLTRGIEQSFWHLVYSVTDKHDYEKALKSFAAKHSLDEDSFVDIFRKFPPFKSEYGSFSEKAIKKLLPLLRVGKYWNWDTIDKEVQIRIDHIIDAEANDEIRQIVKEKADKHQLRARSDFQGLPLWLAQYIVYNRHSEADISEKWNSAKDLEDYLKSFRQHSLRNPIVEQVITETLRVVKDIWVKYGNGTKDFFNEIHIELGREMKNTAADRKGITNQITENENTNLRIKSLLAELKNDPQVENVRPYSPMQQEILKIFEEGVLNADIEIEEDILKISKTAQPSSSDLKRYKLWLEQKYRSPYTGEMIPLNKLFTPEYEIEHIIPQSRYFDDSFSNKVICEAAVNKLKDNQIGLEFIKNHHGEKVLIGMDKVVQVLEVEDYEDFVKQHYAKNRSKRNKLLMEDIPEKMIERQMNDTRYISKFISNLLSNIVRSESNDDGVNSKNIIPGNGKITTELKQDWGLNDVWNELILPRFERMNQLMNTTHFTTWNENHQKLLPAVPLDLSKGFSKKRIDHRHHAMDALVIACATREHVNYMNNEHALRKGKTKEEKQTIRYDLRTKLCDKKHNKDSDQNYEWIFKKPWASFTADAKSALEHIVVSFKQNLRVINKATNYYEKWVDKNGIKVKELQEQKGTNWAIRKSMHKDTISGLVKLKKKKTVSLNVSLDAIADIVDEGLKKEIQKLQKVGWDKKKLSKHFKDLNYKWNEKDISKVEIYYWEKDNVASRVPLNDTFDEDRIKDTITDTGIQKILLNHLKNYKGQSDKKGKEIPAQLLAFSPEGIEEMNKNIMMLNGGKFHQPILKVRTYEPKGNKFNVGQTGNKKVKFVEAAKGTNLFFAIYTDENGNRTYETIPLNIIIERQKQGLSSVPLQNETGEKLLFQFSPNDLVYVSSENDKQSNIQPTFDSRCIYKVVSFTNNRLYAIPHIVAKSIVDKNEFTQLNKLETSLDGLSIKEHCYKLKTDRLGNISKL

SEQ ID NO: 5424 - protein, 1512 aa, synthetic construct
  REGION 1..1512: note = Synthetic
MRTILGLDLGTNSIGWAVINSVIKEQTERIWIEMAGSRIIPMDAAILGDFDKGNSISQTAERTRFRGVRRLRERQLLRRERLHKVLKILGFLPEHYLKGIDFEKHTGKFLSGSEPKLPWVKDRWGKYSFLFQTAFNEMLADFAKHQPSLVFDGKKIPYDWTVYYLRKKALTEMISKEELAWILLNFNQKRGYYQLRGEEEEDNAGKSVEFYALKVLSVEATDEKKGRDIWYNVHLENGWVYRRSSNVPLDWEGRVKEFIVTTDLNPDGTPKLDKYGEVKRSFRAPKEDDWMLIKKRTEADITGTHKTIGSYIYDALLQEPQQKIIGKLVKTVERKFYKEELNFILQKQCAFHAELQDRDLYMRCIEALYPGNEVQRRNIANRDFIYLLIDDVLFYQRPLKTKKSLIANCPYEENEYVNRKTGEIKTAPLKCIAKSHPLFQEFRLWYFLSNIRVYQKEREVNGTLHLDVDVTTEFLKTEDDYVALFDWLNSRKEIDQKAFLRYPAFGLKKEINNYRWNYVEDKFYPCNETRHAILSRLEKAGIGIDFLSDEKETALWHILYSVSDKQEIEKALATFAVKNGLNESFVEVFKKFPPFKSEYGAYSAKAIKKLLPLMRCGKYWDMSLIDGTTKERIERIIAGECDESIGAKVREKAMNLSDISCFKRLPLWLACYVVYNRHSEDKEITKWETPADIDAYLAAFKQHSLRNPIVEQVITETLRVVRDIWKQVGKIDEIRIELGREMKNPADKRKRMTTQILENENANLRIKALLAEFVNPEYGVENVRPYSPSQQEILRIYEDAVLKGEEQIPEDIDVILKKFNTSKLPTKSEFLRYKLWLEQKYRSPYTGELIPLAKLFTAAYEIEHVIPQSRYFDDSFSNKVSNKVICESAVNKLKDNQLGYEFIKNHHGQKVEVGFGKTVEIFSVDSYERFVKEQYAKSGIKMKKLLMDDIPEQFIERQLNDSRYISKVVKGLLSNIVREKNDSGEYEPEAVSKNILVCTGSVTDRLKKDWGMNDVWNSIVSPRFERLNALTETQCFGHWENKDGKKVFQTAVPLEYQKGFSKKRIDHRHHAMDAIVIACATRNHVNYLNNESASRNAKISRYDLQRLLCDKSRGDGNGNYRWIIKKPWTTFTQDAREALSGIIVSLKQNLRIINKTTNIYQHFDANGTRVYEKQKIGDSWAIRKPMHKDTVFGAVNLRKVKVVRLSVALDTPSMIVNKRVKNKVLELLSYKYDKKKIEKYFKENAFLWKELDIAKVAVYYFTENTTEPLVAVRKSLDSTFNEKKIASVTDTGIQKILLNHLKSKEGKAELAFSAEGIEEMNRNLLQLNDGKGHQPIYKVRVYEPRGNKFKVGVLGNKGAKWVEAAKGTNLFFAIYITEDGNRTYETIPLNWVIEREKQGLVPVPDRNEKGDKLLFWLSPNDLVYLPTEEERDFGRINEPIDRGRIYKMVSSSGNQCFFIPQSISNAIISTKELGSNNKAEKSWDGEMIKNICIPVKVDRLGRIIEVKYRVNE

SEQ ID NO: 5425 - protein, 1512 aa, synthetic construct
  REGION 1..1512: note = Synthetic
MKNILGLDLGTNSIGWAVINSEEDGPIVKKRIELAGSRIIPMDAAVLGNFDSGVTKSQTAERTSFRSIRRLRERQLLRRERLHKVLQILGFLPEHYVNDIDFENHPGKIKRNTEPKLPWRKNSMGQFEFIFQDSFEAMLTDFATHQPVFVSEGKKVPYDWTLYYLRKKALTEGISKEELAWLILNFNQKRGYYQLRGEEEEEQSNKLVEFYALRVVKVEATDDKKGKDTWYNVHLENGWIYRRTSNIPLDWEGKVKEFIVTTDLNEDGTPKLDKYGEVKRSFRAPKEDDWTLIKKKTESDIANSHKTVGCYIYDALLQNPHQKIKGRLVRTVERKFYKEELRLILEKQLSFHPELQDRDLYRACIDALYVSNEAHKNNISGRDFVYLFIDDIIFYQRPLKTKKSLIDNCPYEENQYMDRETGEVKQAPIKCIAKSHPLFQEFRLWQFISNIRIYQRERVLDDGKLETDVDVTPDFLKTEDDYTTLFEWFNDRKEVDQKAFLKNPQFGLKKTFTEYRWNYVEDKSYPCNETRNAILNGLQKAGVSADFLSREVEEALWHILYSVEDKIEIESALRKFASKHDLDDRFADVFKKLPPFKKEYGAYSAKAIKKLLPLMRIGKYWELSNIDDKTKERIDKIITGEWDENIHDRVREKAIKLSDITDFKGLPLWLSCYVVYNRHSEARAIAKWESPEDIDSYLRLFRQHSLRNPIVEQVITETLRTVRDIWKRVGQIDEIHVELGREIKNPADKRAKMTAQIVENENTNLRIKALLAEFINSEYEIENVRPYSSNQQEKLKIYEDTVLNGVKEIPEDINTILKKFRESDLKKRPTKSDFLHYKLWLEQKYCSPYTGRIIPLGKLFTSAYEIEHIIPQAHYFDDSFSNKVICEAEVNGLKDKKLGYEFIKHNPGKMVEIGFGKPPVRIFSVEEYERFVKENYSGIKNKMNKLLMDDIPETFIERQLNDSRYISKVVKSLLSNIVREKDSNGEYEPEAISKNVIVCTGSVTDRLKRDWGVNDVWNSIIYPRFERLNELTGSQQFGCWENKEGKRVFQTAVPLEMQKGFSKKRIDHRHHAMDAIVIACATRNHINYLSNESASKKAKISRTDLQRLLCTKCRTDDNGNYKWIVKKPWPAFTQDIRKALENITVSFKQNLRVINKTTNYYVHFDESGKKVLEKQINGDSWAIRKPMHKDTVFGKVNLQKVKEVRLSLALDTPKMIVDKKLKEKVLQLYSYKYDKKRIDKYFKENASLWKDLNLSKVAVYYFTNDSTEPLVAVRKPLDTSFNAKKIKESVTDTGIQKILLNHLSNNQDDPNLAFSPDGIDKMNKNLTALNDGKYHQPIYKVRVCEPQGNKFSVGTSGNKTSKYVEAAKGTNLFFAVYQTEDGKRSYETIPLNVVIEREKLGWTPVPENNNNGDKLLFWLSPNDLVYVPTADELNNGMRLDNMDKGRIYKMISCSGPQCFFIPQNVSNAIIPVIELGANNKAEKSWNNEMIKVVCVPIRVDRLGCITQINNQK

SEQ ID NO: 5426 - protein, 1512 aa, synthetic construct
  REGION 1..1512: note = Synthetic
MKKILGLDLGTNSIGWALIENSFTEKEGKINDMGVRIIPMSADILGKFDAGQSHSQTAERTGYRGTRRLYQRDNLRRERLHRVLHILGFLPKHYDEHIDFEKRLGQFKEGKEIKLNYRCNVENKHEFIFISSFNEMLTEFKKAQPELFYLKSNGEETKIPYDWTLYYLRKKALSQPLTKQELAWIILNFNQKRGYYQLRGEEIDDDKNKQFVKLKVKEVINSGEAVKGKPLFDVIFENGWKYDKQVVKTEDWIDRTKEFIVTTKVLKNGDLKRSYKTVDSEKDWAAIKAKTEQDIERSNKTVGEFIYETLLENPTQKIRGKLVKTIERKFYKEELKNILIKQIELQPTLFSEELYKACIEELYPRNEAHQNAIKNRDFIYLLMDDIIFYQRPLKSQKSNISGCQLEQRVYYKANKDSGENEEVKQAVKAIPKSHPLFQEFRNWQWLQNLKIYNKVDTEKGELTDVTKQLLPSEDSWVNLFNFLQCKKELEQKQFIKYFIDKKLINKTEKDHYRWNYVEDKKYPFTETRAQFISRLTKVEGIEEINTFLDKKTQIGTKDNSPFVSRIEQLWHIIYSVSDIKEYESALEKFAIKHHLNEESFVANFIKFPPFKSDYGSYSKKALNKLLPLMRRGNYWTENDISEKVKLRVSEIMERVNALNLKEDYSSKELAETLVNVSDDDVKKQLIKSFVSFKDRNPLMGLNTFQATYLVYGRHSEVGDIQNWKTPDDIDTYLKNFKQHSLRNPIVEQVVTETLRVVRDIWKHHGKSQTNFFNEIHVELGREMKNPADKRKRISERNTENENTNNRIREILKDLMNDASIQGDVRDYSPSQQGILKIYEEGVYQNPKVDYSKVSEDEITKIRRSNNPTQKEIQRYRLWLEQGYISPYTCKPIPLSKLFTHHYQIEHIIPQSRYFDNSSSNKIICESEVNEDKDNKTAFEYLKDKGENVINGHKLLSLAAYEAHVNKYFKNNRQKLKNLLSEDIPEGFINRQMNDSRYISKLVKGLLSNIVREEGEQEVTSKNLIPVTGSVTSKLKNDWGLNDKWNELILPRFKRLNQLTQTNDFTTANTNGNTIPTVPDELLKGFSKKRIDHRHHALDALVVACCTRNHSNYLSALNTENKNYGLRDKLLIKNDNDHYTKSFQMPWHGFTTEAKNQLEETVISFKQNLRVINKANNKFWSYKDENGKLNLDKNGKPIKKLRKQTKGDNWAVRQPLHEETISGIVNLPWVKAEKEKFTYATRKSLDKSFDLKKIEKITDTGIQKILRNYLMQEKFKELDKKDKEVYNSELAFSQEGLEDLNSNIEQFNDQKPHKPIYKVRLFEKGSGRFALGFKGINAKKYAQGSPNLYFNIYRNEDGQYYETVPLNKVIIHQKNAANMPKKNRTPVPISNTAINRSKEVLVDYKMTLSPLDLVYIPTEEELNNINSLDFNNLSKSQRKRLYNVNDFSGYTIYFSPNTLAKSICPKEVDMKFDEKKQKPTGSFDSKTASLDGMSIKERCIKLIIDRLGNISKA

SEQ ID NO: 5427 - protein, 1512 aa, synthetic construct
  REGION 1..1512: note = Synthetic
MKKILGLDLGTNSIGWAVVCHSDTDGQTERKWIEMAGSRIIPMDAAILGDFDKGNSKSQTSERTGFRGIRRLRERVLLRRERLHKVLKLIGFLPQHYIDSLDFSNHSGKFQLGTEVKLPWRKNEIGKYEFLFQNSFNEMLADFAKKQPELVAMGRKVPYDWTIYYLRKKALSEKITKEELAWILLNFNQKRGYYQLRGEEEEEKKNRLEDFYALKVVEVEQTDDKKGKDIWYNVHLENGWIYRRSSNVPLDWKDKIKEFIVTTELNEDGTPKVDKDGCVKRSFRMPKEDDWKLLKKKTEADIERSHKTIGCYIYDTLLQSPQQKIKGKLVRTIERKFYKDELRLILDKQQAFHPELQDRELYKACLDVLYPMNVAHKNNVANRGFVYLFMEDILFYQRPLKSKKSLIDNCPYEENQYIDVTTGEIKKAPIKCIAKSHPLYQEFRLWQFIDNIRIYQKEKKVDGKLLTDIDVTTEYLSSKDDYVALYEWLCVRKEIEQKTFLKYPAFGLKKEIENYRWNYIEGKSYPCNETRSLILHYLEKAGISSTFLSTKIEESLWHILYSVEDRIELETALRTFASKYQLSCNFVEVFKKFPPFKKEYGAYSAKAIKRLLPLMRMGKYWKVDAIDGNTAERIEKILSGECDEKILNKVWEKTIHLSETSDFQGLPLWLACYVVYNRHSEVKEVAKWKSPEDIDIYLKSFKQHSLRNPIVEQVITETLRVVRDIWKRVEQIDEIHVELGREMKNPSEKRRQMTERMLENENANIRIKALLTEFMNPEYEMENVRPYSPSQQEILRIYEDTVLNGAGDIPEDIEIILKKFKENDIKKRPGKSDFLRYKLWLEQQYRSPYTGEIIPLGKLFTTAYEIEHVIPQSRYFDDSFSNKVICESEVNKLKDNMLGYEFIKKHAGEIVELGFGKSVKIFSVEAYERFVGENYYKAGSKKSKLLMDDITEKFIERQLNDSRYISRVVKGLLSNVVREEDANGEYESEAISKNVIVCSGSVTDRLKKDWGVNDVWNNIVYSRFERLNRLTESQQFGHWENREGKRFFQTELPLEYQKGFSKKRIDHRHHAMDAIIIACATRNHVNYLSNESASKHARIARYDLQRMLCDKSKADRGGNYKWIIQKPWATFTQDVYRTLLDIIVSFKQNLRVINKMTNYYQAYDDAGKKVFKKQKKGDSWAIRKSMHKDTVFGQVNLRKIKEVRLSVALESPEKIVDKKIKEKVLQLFAYQYDKKKIEKYFKENASLWKEVNLAKIPVYYFTDESSELLVAVRKNLDTGFTEKKIRESVTDTGIQKILLNHLSNKGDKPELAFSPDGIDEMNRNLVILNGGKPHQPIYKVRVCEPLGNKFKVGTNGNKSAKYVEAAKGTNLFFAIYVTDDGKRTYETIPLNVVIEREKLGWLPVPEKNDKGGNLLFWLSPNDLVYLPTEEELMNGIISDSIDRNRIYKMVSCTGNEGHFIPENISNPIIPTLELGSNNKAQRAWTDEMIKETFIPIKVDRLGQITEIINKIR

SEQ ID NO: 5428 - protein, 1512 aa, synthetic construct
  REGION 1..1512: note = Synthetic
MKKILGLDLGTNSIGWAVVNADEITRDDGSRYLKPNGISAAGSRIIPMSADILGDFEKGNSISQTAERTRMRMARRLHERALLRRERLLRVLNLLDFLPKHFADKIDRYGKFTDDSEPKLAWRKNTEGKYEFIFQDAFNEMLAEFKDKQPEIVEEGKKIPYDWTIYYLRKKALEKALSKEELSWILLQFNQKRGYYQLRGEEEEIPQDKKIEYLAQKVVKVEATDQKKGDDVWYNVYLENGMIYRRTSKAPLDWEGKVKEFIVTTEVENDGETPKKDKEGNIKRSFRAPKEDDWTLLKKKTEADIENSHKTVGCYIYDSLLNNPKQKIIGKLVRTVERKFYKEELTQILKKQVELIPELRDDNLYKQCIEELYPINEAHRNTIAKTDFANLFINDILFYQRPLKSKKSQIDNCPYEERIFIDSKTGEKKKVPVKCIAKSNPLFQEFRLWQFIQNLRIYQREKEIDGKLLTDIDITSECLKSEEDYVRLFDWLNDRETIEQEDLLKHLFNTKKSKNKENPYRWNYVEDKVYPCNETRATILKGFSKCGINASVLSPELEMALWHILYSVEDKKEIETALTHFAQKQGWNDDFAKVFSKAKPFKKDYGSYSEKAIKKLLSLMRMGKYWNQDNIDKNTLDRIDKIINGEYDEKISNRVRDNAINLKDISDFRGLPVWLACYIVYDRHSEAKDCTKWNSPEEIDSYLKKFKQHSLRNPIVEQVVTETLRTVRDIWIQEEQIDEIHLELGRDLKNPADKRKKMSENILKNENTNLRIKAMLMEFMNPSMGIENVRPYSPSQQDILRIYEENALDNLTKDDKDFDFISKISKQAQPSKTDIIRYKCWLEQKYRSPYTGKTISLSKLFTPAYEIEHVIPQSLYFDDSFSNKVICEAEVNKLKDRQLGYKFIAEHHGEKVQLSQGEVVEILSVDAYEKFVKENYANNRIKMKKLLMESIPDEFIERQLNDSRYISKVVKGLLSNIVREKIDDENYEPEAVSKNLISCNGAITDRLKKDWGMNDVWNSIILPRFIRMNQITGKDCFTTTNAEGHLIPQMPLELQKGFNKKRIDHRHHAMDAIVIACTTRDHVNLLNNEAAHSKFNATRYQLQRKLRRFEKAVIDGKEREVAKEFLKPWDSFSSDSKNILENIIVSFKQNQRVINKTTNAFLHFDENGKKTFIKQGKGDSWAIRKSMHKDTVFGEINLRKVRSVSLNEAIKVPERVLNKKIKEKILELKNNKIDAKNIKKYIEENHTGGYGIDSSKIDVFYFTKETKERFFATRKTLDTSFNQAKIKDSIADSGIQKILLAHLKSKNGDAEQAFSPDGIDEMNKNIVELNNGKFHQPILKVRVYEKADKFAVGQKGNKKVKFVEAAKGTNLFFAIFEKDGKRSYLTIPLNVMIDCQKQYGNQWKNNIEAYLKEKELVEKDVKLQFILSPNDLVYLPTEGSIDKKRIYKVVSFTNNRLYAIPYAIAKSIVDKNEFTQLNKIEFTDNKESIKDACVPVIIDRLGNVIEFNGKRL

SEQ ID NO: 5429 - protein, 1511 aa, synthetic construct
  REGION 1..1511: note = Synthetic
MKRILGLDLGTNSIGWALVSQDECKSEILGLGSRIIPMSQDILGDFDKGNSVSQTAERTFFRGVRRLRERHLLRRERLHRVLNVLGFLPDHYAKCIDFEKRFGQFVEEQEPMIAYRRNVETAKMEFVFPDSFAEMVADFKEHQPQLLTDGRLIPQDWTIYYLRKKALTSEITKEELAWILLNFNQKRGYYQLRGEEQEDDKQKMVEYYSLNVVDVAEGEVSKTKGEKWYSVVLENGWVYRRTSKAQLDWVGKTKDFIVSTDLDENGAIKKDRDGNEKRSFRAPLEGDWTLVKKKTEADVEHSHKTVGAYIYDTLLLNPQQKIKGKLVRTIERKFYKQELEAILRKQLEFHSELQSRDLYSACLEELYENNDAHRNSIGAKEFVHLFLNDIIFYQRPLKSKKSLISNCPYEFRTYADQKTGEIINEPIKCIAKSHPLFQEFRLWQFLQNLKIYARERAVNGKIETDVNITHELLKTEADWIALFEWLNEHKEIEQKTFLKYPAFGFKKDADKYRWNYVEDKQYPCNETRTLIASRLAKVLNVPDDFLSKEREEALWHILYSVDDKHDIVKALGTFATKNGLGNDFVDCFKKLPPFKKEYGAYSAKAIKKLLALMRRGKYWDSSAISSDVLARIDKLQTGEYDAKIKDRVREKAINLVRVDDFQNLPLWLACYVVYNRHSESGDIRYWKTPADIEYFLREEFKQHSLRNPIVEQVITETLRVVKDIWAHYGKGIENYFSEIHIELGREMKNPADKRKSMTEKISENENTNLRIKSLLAEMLNDGSIAEVRPYSPSQQEILKIYEEGVMSAETDIPDDILKISKLSLPSTSELIRYKLWLDQKYCSPYTGQMIPLAKLFTSAYEIEHVIPQSRYFDDSLSNKVICEAEVNKDKDRATAYEYIKNNSGKKVELSFGKEVTLFTLSAYEDNVKRNFAKNRGKLKKLLMEDIPDDFIARQLNDSRYISKMVKGLLSNIVREEGEQEATSKQVISNNGSITSTLKQDWGLGDIWNEIIAPRFERMNQITNSSSFGAMRNNHFLPQVPLELQKGFNKKRIDHRHHALDALVIACATRNHINYMNNSNAAKSKEAVRHELRGALCFKKSNSDGGTGYQWVFKKPWDTFTQDAREALLCTVVSFKQNLRVINKTVNHYQKWEVDEHGHKQKVTVRQTKGDSWAIRKPMHKETVSGLVALRFKKEMQLSSALDTPEMIVDKSLKAKVKELLSIPYDKKHIVKFFKDNDNQWCGRNISRVEVYYFERENAASRVAVDEKFNSSMIRCITDTGIQRIMLSHLQKYSQEVNGKIVEQPDLAFSSDGLEAMNRNIKALNNGVNHQPIYKVRTFEPIGNKFVVGHSGNKGAKFVEAAKGTNLYFAIYVNSEGKRSYQSIPLNVVVERQKQGLYPVPETNALGNSLLFYLSPNDLVYVPTTEEQENANAVNFNNLTKEQVTRVYKVVSFTGNRLYAIPLNVAQSIVDKVEFTQLNKVESELIYKKSIKEICCKLKVDRLGRIVDAIKH

SEQ ID NO: 5430 - protein, 1511 aa, synthetic construct
  REGION 1..1511: note = Synthetic
MKKVTLGLDLGTNSVGWSVINSIITKQSEKIWLEMAGSRIIPMDAAILGDFDRGNSTSQTAERTRLRGIRRLRERCLLRRERLHKVLHILEFLPEHYSEQISWDKHPGQFMNLTEPKLAWKRSETGKYEFIFQAAFNEMLADFAQHQPTLVANGKKVPYDWTIYYLRKKALTEKITQQELAWILLNFNQKRGYYQLRGEEEEEKSNKQVEYYALKVVCVEATDEKKGKDTWYNVHLENGWIYRRSSNVPLDWEGKIKEFIVTTDLNEDGTPKVDKQGEVKRSFRAPKEDDWTLIKKKTEADVADSRKTVGWYIYDILLQKPQQKIRGKLVRTIERKFYKEELKQILEKQSVFHTELQDRDLYKKCLECLYPQNDAHKRNIANRDFVYMFTEDILFYQRPLKSKKSLIDDCPYEKNEYVDKETGEIKHASLKCIAKSHPLFQEFRLWHFLSNIRIYQKERQQGDRLLTDVDVTSEFLNTEEDCVALFEWLNERKEIDQKNFLKYPQFNLKNKAVNYRWNYVEDKMYPCNETRYLIKSRLDKADVFSGDFILSAENEMALWHILYSVSDKVELEKALATFATKHALDKVAFVETFKKAPPFEKEYGAYSAKAIKKLLPLMRMGKYWSADAIDETTRERIDKIVTGEYDEKIHNKVREKSIHLQSVDDFRGLPLWLVCYVVYGRHSEVKDIAKWEMPSDIDAYLKAFKQHSLRNPIVEQIIVETLRVVRDIWKRVGTIDEIHVELGREMKNTAKDRAKMTMQVLENENANLRIKALLTEFVNPEYNIENVRPYSPSQQELLRIYEDGILNYVADIPEDIENFLKKLKDSKSPSKSEFMRYKLWLEQKYRSPYTGEIIPLAKLFTPAYEIEHIIPQSRFFDDSFSNKVICESEVNKLKDKYLGYEFIKEHHGRKVELNFGKVVTIFSVEAYEQFVKEHYSKSRAKMKKLLMDDIPEEFIKRQLNDSRYISKVIKTLLSNVVREKDKDGEYEQEAISKNVVVCTGSVTDRLKKDWGLNDVWNSIVSSRFERLNQLKDTQCFGHWECKDGKRFFQIELPLELQKGFSKKRIDHRHHAMDAIVIACASRNHINYLNNESARKDAEITRRDLQRLLCDKYKTDDNGNYKWMIKKPWDTFTQDVQAVLNDIVVSFKQNIRVINKSTNYYQCYDEKGKKTLLAQTKGDNWAIRKPMHKDTVFGRVNLRKVKEVRLSVALDTPEMIVDKKMKAKILQLFSYNYDKKRIEKYFKENTALWKDLNLTKIAIYYFTDNSSEPLVAVRKALDTSFTEKKIIESITDTGIQKILLKHLESKEGKADLAFSPDGIDEMNRNLEFLNNGKPHQPIYKVRVYEPRGNKYSVGETGQKSTKFVEAAKGTNLFFAVYAVGDGKRVYETIPLNIVIEREKQGYTPVPEKNEAGNKLLFWLSPNDLVYVPTEEELERGRIEEPIDRKRIYKVVSFTGNRLYGVPYAIANMIVDKVEYFSLNKVEITDSKESIKEKCIPLKVDRLGNIIKIGTLK

SEQ ID NO: 5431 - protein, 1511 aa, synthetic construct
  REGION 1..1511: note = Synthetic
MKRILGLDLGTNSIGWALVDSEERKILGMGSRIIPMDQGVLDTFSGGNPIETQTAARTAYRSTRRLRERVLLRRARLLRVLNVMNFLPEHYVSQIDFEKRLGQFLDGTEPKLAWRQKDEGKSEFIFQQSFNEMIEEFKNNGTIGENQKIPYDWTIYYLRKKALSRKIDKEELAWILLNFNQKRGYYQLRGEEEEENSNKLVEYYSLKIVDVIADEKPNGKGDTWYSLHLENGWVYRRPSKIPLLGWKGKIRDFIVTTDLNDDGTVKKDKEGIEKRSFRAPSENDWTLLKKKTENDIEKSHKTVGTYVYEALLQNPMQKVRGKLVRTIERKFYKDELKQILEKQKEFHPELRDEDLYNDCVRELYCSNETHKFILSKRDFVHLLLDDILFYQRPLRSQKSAISDCTLEFQAYKDKNGNKVKGHLKATSKSNPLYQEFRIWQWLYNLKIYRKEDDKDVTLEFITGIEDKELLFEFLNNRKNIEQKPLLEYLIKAKGLKKQVKAEAYRWNYVEDKTYPCSETRTMISTRLAKVENLPDDFLTKEVEQRLWHIIYSVTDKNEFEKALKTFAGKYNLDVTSFVDNFKKFPPFKNEYGSFSEKAIKKLLPLMRLGKYWKWSDIDSYTQNRISKIITGEYDEEIKDKVREKAIHLTNENDFQGLQLWLAQYIVYGRHSEADIAGKWHSIADLEKYLNEFKQHSLRNPIVEQIVTETLRVVKDIWQEYGQGVENFFNEIHIELGRDMKNTAEERKRLANTITENENTNLRIKALLMELKNNSDGKLEVENVRPYSPMQQDILKIYEEYAIGAELDNERDEKVKEDIKQISKAAQPTTVELQRYKLWLEQKYCSPYTGKVIPLSKLFTEEYQIEHIIPKSRYYDDSFSNKVICEAAVNKLKDKYLGFEFIKNYHGQIVETGFGQKVTVFDEESYQNFVKQHYVHSRSKRMKLLLEEIPEKMIERQMNDTRYISKFVFPLLSNLVRAEKEDDGINSKNVLPGNGKITTILKQDWGLNDVWNDLILPRFVRMNELKKTTAFTSWNGQYQKYLPAVPLELSKGFQKKRIDHRHHAMDALVIACATRDHINLLNNKYANTDKVRYDLQRKLRLFEQVTYIDPETKKEVTKNVPKEFKKPWDNFTIDARNELESIIVSFKQNLRIINKATNVYTKYENGKKIKVNQKGSNWAIRKPLHKETVFAKVSLRKRKTVRLSEALKDSEKIVDKGLKQEIRRLTCQYGKFDAGTILRYFKDRKYEFEGADVSKVEVYYFDEENAAVRKNVDTSFTKKIIQESVTDTGIQKILINHLAAKGDKAEMAFSPEGIEEMNKNIVQLNGGKFHLPIFKVRVYETIGNKFPVGVKGNKKDKYVEAAKGTNLFFAIYVDENGVRSYETIPLNIVIERLKQGLNAVPERDKKEHNLLFYLSPNDLVYVPTDDERENVCAINFGQFSNEQKKRVYKMVSCTGSECHFLPHYVANSIVNKVEYSPLNKIGRSLTGEMIKNVCIKLKVDRLGNIKGRTYER

SEQ ID NO: 5432 - protein, 1511 aa, synthetic construct
  REGION 1..1511: note = Synthetic
MVMGKKILGLDLGTNSIGWAIINGNIDNENKVQLEEIEAAGSRIIPMDAAILGDFNKGNSTSQTAERTRYRGVRRLRERHLLRRERLHRVLDLLGFLPEHYTNHLDRHGKFSTGIECKLPWKPDENGIHEFIFKDSFNEMLFDFATHAPELVAGNKKVPYDWTLYYLRKKALTQKIKKEELAWILLNFNQKRGYYQLRGEEEKENSSKLEEFYALKVVKVEDSGEKKGKDSWYNIHLENGMIYRRTSATPLEWEGKIKEFIVTTDIDAEGNPKKDKEGNIKRSFRAPKEEDWTLSKKRTEADIEKSGETVGRYIYDTLLQNPSQKIRGKLIHTIERKYYRDELQQILKAQIKFHPELQNKELYTTCIQELYPNNEAHRNNIAARDFIHLFMNDIIFYQRPLKSKKSLIENCPYEQNTFVDTETGEIKTSPIKCIAKSHPLFQEFRLWQFISNIRIYQKEGENAGVDIDVTRQLLPTEEDYAELFSWLNDKKEIDQKNFLKYPAFHLKNKAANYRWNYVEEKTYPCNETHAQILAYLGKAHVAPTFLTREKEEALWHILYSVEDKQEIEKALRSFARKNNLNAEFADVFKKFPPFKKEYGAYSAKAIKKLLPLMRSGKYWNETAIDAQTKTRIDKIIAGEYDDNIRNRVREKAINLTSINDFHSLPTWLACYIVYDRHSEMKDITRWKTPADIDDYLQSFKQHSLRNPSVEQVITETLRTVRDIWKQAGRIDEIHVELGREMKNPSGKRADITRQILENENTNLRVKMLLTEFMNPEFEIENVRPYSPSQQDILRIYEDTVLNSTPELPEDISSILDKFKQGDTKRYPSRSEILRYKLWLEQKYVSPYTGEVIPLGKLFTPAYEIEHIIPQARYFDDSFSNKVICEAEVNKLKSNCLGYEFIKKHPGEKVFLGSGKTVEIFSVEAYERFAREHYSRNRGKMKKLLMEDIPEQFIARQLNDSRYISKVVTSLLSNIVREEGEEEALSKNVIVCTGGVTDRLKKDWGVNDVWNKIILPRFVRLNEITGCSRFTSVSANGHIIPSIPLELQKGFNKKRIDHRHHAMDAIVIACANRNIVNYLNNQSASNKAKVSRHDLQSLLCTKYKTDDKGNYKWILNKPWETFTQDMQTALQNIIVSFKQNLRVINKTTNHYLHYENGKKVYTSQMKGTSWAIRKPMHKETVFGEVNLRKIKTISLKEAIKQPQAIVEKDLKKKLIAMLELGYDSGKIKKYFEDNRDVWQDINLSKIEVYYFTRETKDRYFATRKPLDTTFTRKKIIEEITDTSIQKILLRHLEENNDDPNLAFSPDGIDAMNRDIKRLNDGTHHQPIYKVRWYEKADKFAVGQSGNKSSKFVEAAKGTNLFFAIYETESVDPKTGTLARKRTYATIPLNTVIERQKKGLAPAPEDANGDSPKYVLSPNDLVYLPTAKEVSDGKIHFPIERERIYKTVSSTGYQCFFIKAEVAKSIVDKVEFSPMNKMERAITREKEMIKETCLPIKIDRLGNIIKIGDFKPE

SEQ ID NO: 5433 - protein, 1510 aa, synthetic construct
  REGION 1..1510: note = Synthetic
MKRILGLDLGTNSIGWALIDSEEQRILGMGSRIIPMDQGVLDTFSGGNPIETQTAARTAYRGIRRLRERALLRRERLIRVLNMMKFLPEHYASQIDFEKRLGQFFDEKEPKLAWKQNDEGRSEFIFQQSFNEMIEEFKNSGVVGEDKKIPYDWTIYYLRKKALSQEIEKEELAWILLNFNQKRGYYQLRGEEEEENPNKLVEYYSLKIVDVIADEKPNSKGDTWYSLHLENGWIYRRSSKIPLFEWKDKTRDFIVTTDLNDDGTVKKDKEGTEKRSFRAPSENDWALLKKKTESDIEKSHKTVGTYVYETLLQNPMQKVRGKLVRTIERKFYKDELKQILEKQKEFHPELRDEDLYNDCVRELYRSNETHQFILSKRDFVHLFLNDILFYQRPLRSQKSAIGDCILEFKTYKDKDGNEIKEYLKVISKSNPLYQEFRIWQWLYNLKIYRKEDDEDVTSQFIANIEDKEQLFDFLNNRKNIEQKPLLEYLIKAKGLKKQVKTEAYRWNYVEDKIYPCGETKTMISTRLAKVENIPDDFLTKEIEQKLWHIIYSVTDKNEFEKALRTFAEKYDLDITPFVDNFKKIPPFKNEYGSFSEKAIKKLLPLMRLGKYWEWNDIDNNTQNRISQIITGEYDEEIKDIVREKSIALTHENDFQGLQLWLAQYIIYGRHSEADIAGKWHSVADLEKYLNEFKQHSLRNPIVEQIITETLRVVKGIWQKYGQGAENFFSEIHVELGRDMKNTADERKKIANVVTENENTNLRIKALLMELKNNSDGKLEVENVRPYSPMQQDILKIYEEYAISTGLDNEKDEKVKEDIKKISRVAQPTTIELQRYKLWLEQKYCSPYTGKVIPLGKLFTEEYQIEHIIPKSRYYDDSFSNKVICEAAVNKLKDKCLGLEFIKNFHGQIVETGFGQKVTIFDEESYLNFVNLHYAHNRSKRTKLLLEEIPEKMIERQMNDTRYISKFVLPLLSSLVRAEKDDDGINSKNILPGNGKITTILKQDWGLNDVWNDLILPRFVRMNELTRTTAFTSWNEQYQKYLPTVPLDLSKGFQKKRIDHRHHAMDALVIACATRDHINLLNNKHANTDTVRYDLQRKLRLFERVTYIDPQTKKNVTKDVPKEFKKPWDNFTVDARNELERIIVSFKQNLRIINKATNIYTKYENGKKIKVNQKGLNWAIRKPLHKETVFAKVSLRKRKIVRLSEALKDWEKIVDKKLKQEIKRLTCQYGKFDVDTILRYFKDRKYQFGEVDVSKVEVYYFDEENAAVRKNVDTSFTEKFIQESVTDTGIQKILLNHLATKGNKVEIAFSPEGIEEMNKNIVQLNEGKLHLPIFKVRVYETIGNKFSVGVKGNKKDKYVEAAKGTNLFFAIYVDENGIRSYETIPLNIVIERLKQGLSVVPEKNRKEHSLLFYLSPNDLVYVPIEDERENIHAVNLDQLNNEQRKRIYKMVSCTGSECHFVPYYVASPIINKVEYSPLNKIGRSLTGEMIKDVCIKLKVDRLGNIKGISGL

SEQ ID NO: 5434 - protein, 1510 aa, synthetic construct
  REGION 1..1510: note = Synthetic
MKKILGLDVGTNSIGWAVINASIDEEGKEHLNKIECAGSRIIPMDAAVLGDFDKGNSKSQTADRTQSRGVRRLYERARLRRERLHRVLNVLGFLPSHYACYIDRYGKFINSAEPKLPWRRDEKEKPVFIFQDSFDEMLADFRRSQPDMLSDGRRIPYDWTIYYLRKKALTQKIRKEELAWILLNFNQKRGYYQLREKTESKQSSKTRQYFDSQVVVDIVDTGQIYKEMKVLVVVLKDGSKGKIFKKEIPEWIGLKKDIIATVDLDKDGNDKYDENGDLCCRFKVPTEQEWDEEWELIKAKTQSELNATGKTVGAYIYDTLLQMPSQKIRGKLVRTIEREYYKSELHQILEKQKEFHEEFQNKDLFLACVNELYPQNEAHRNEISGRDLVYLFIEDILFYQRPLKSKKSLISDCPYEEYVHADEKTGEEKHFGVKCIAKSHPLYQEFRLWQFISNLRIYQREKVIEGKKCFDVDVTSVFLKTEDDYTDLFDWLNKQKSIKQDAFLKYAAFGLKKNEANNYRWNYVEDKVYPCNETHAFLLERLNKAGVASDFLNSREEEFLWHILYSISDKEELDKALGKFAAKYGLDVKFVEVFRTAPPFEKDYGAYSAKAIKKLLPLMRMGKYWDEKSIDEHTRERIGKLVLGEYDGAIHMRVREKSIHLTDVSSFRGLPLWLACYVVYNRHSESRDLQKWQTPADIDGYLRKFKQHSLHNPIVEQVILETLRVVRDIWKQVGHIDEIHVELGREMKNPKDKRARITRQIQENENTNLRIKAMLVEFMNPEFGIENVRPYSPSQQDLLRIYEEGVLNSVNELPDEIADIIKRFTDSDVKKRPSRSEVLRYKLWLEQKYRSPYTGEMIPLGKLFTPAYEIEHIIPQSRYFDDSFSNKVICEAEVNKLKDNLLGHEFIVKFHGAKVSLSGGSSVNVFSVSDYEQFVKDNYSRNQTKLKKLMMDDIPEQFIARQLNDSRYISKLVKSLLSNIVREENEQEETSKNLLVCTGGVTDRLKKDWGINDVWNKIILPRFQRLNELTDTTRFTALNASGHAIPSMPLELQKGFNKKRIDHRHHAMDAIIIACAGRNIVSYLNNESACKGAKISRYDLQRLLCDKQKTDEMGNYRWMIKKPWDSFTQDVYVVLQNIIVSFKQNLRVINKTVNYCQHYVDGKKKMVKQEKGDSWAIRKPLHKDTVSGEVNLRDIKTVTLKDALKNLNVIVEKDLKKKLKELLEMHLSDKQIKQYFEVHKETWRDVDLKKIKVYYFTKETKDRFFAVRTLLDTSFNQKKIIGKVTDTGIQKILLRHLEINENDVERAFSSEGIERMNKNIVMLNNGKWHQPIYKVRIYEKADKFAVGQTGNKSSKFVEAAKGTNLFFAVYETEQINQGTGEVVRKRNYATVPLNVVIDRQKRGLPSAPEDKNGNLPKFVLSPNDLVYIPTQEELETGHVVYPLDKKRIYKMVSCTGNRLYVIPYAVANMIIDKKEYSQLNKIEFTDDKLSIKELCFPLKIDRLGNLKAEL

SEQ ID NO: 5435 - protein, 1510 aa, synthetic construct
  REGION 1..1510: note = Synthetic
MRYILGLDLGTNSVGWAVVEAIIDEDGKEKLVKINSLGSRIIPMDAATLGDFNAGKTVSKTKNRTERRLMRRILQRKVLRRERLLRVLSLMNFLPKHYAQCLDRYGKIISDPEPKLAWVKEDGCYRFLFQESFSEMLSDFYGKNPELRASGKRIPYDWTIYYLRKKALTQKITKEELAWILLHFNQKRGYYQLRVEEDQQSKSKREDYYELKVISVEDTGEKKGKRSLYKITFENGWEFDYSSVLSPDWVGKTKSFIVTTELEKDGKEKTDDSGKIKRSFRAPKDDDWELLKKKAESGIEESHKTVGTYIYDALLQNPQQKIRAKLISTIDRKYYKDELNRILEKQKEFHTELNDRELYEACVDALYPNNLAHRDLLYKQCDFTDLLVEDILFYQRPLKSKKSLIDECPYESHVYKKAGKIERVPLKCIARSHPLYQEFRLWQFISNLRIYQRQKEVNGKLEVDADVTSQFLKSESDYVVLYEWLNSQKEIKQNALLKHLRLKSAEYRWNYVEDKAYPCNATHALLIERLGKAGVKSSFLNGETEESLWHLLYSISDLTELKKALQAFAGKHNLDVEPFVGAFLRVPPFEKRYGAYSAKAIKKLLPLMRMGKYWREEAIDSSTRVKITKIITGEYDAQISERVREKVGHLEDVADFCGFPLWKACYLVYGRHSEPNTAEQWKEPSDIDRYLKSFKQHSLRNPIVEQVIMEALRTVRDIWKQVGRIDEIHVELGREMKNPADRRAAMTKRILENENTNLRIKSLLYEFMNNPEWKIEDVHPYSPMQQEKLRIYEEGAMAEDAKGVPVDILRKFNEKDAKKRPTKSDVVRYKLWLEQHYHSPYTGEGIPLAKLFTPAYEIEHVIPRKRYFDDSLSNKVICESAVNKLKGAMTGYEFIKNRSGEIVITGEGNSKVEIFSVEKYEQFVKDNYSQNRAKMRKLLMEDIPDDFIDRQLNDSRYISRMVKSLLSNIVREDGELEAISKNVIVCSGGVTDRLKKDWGINDVWNRIILPRFERLNELSKDGSTYTVYNKSGKLIPYMPLEYQKGFNKKRIDHRHHAMDAIVIACASRNIINYLNNESAKGNAEVSRRDLQKILCSKQVTDEQGNYQYLVDKPWSTFTQDVYTALSGVIASFKQNVRVIGKASNYYWHYNESGKKVLSKQVKGNGWTVRKPLHKDTFYGEVNIRKETTTTLKKAMENPKVIVEKDLKRKLLDLLKERADYAGIKKYFETNKDAWQDVNLQKIRVYCFTGDTKDRFFASRKSLNDFSASKIEKIEESIGKVTDTGIQKILRRHLAANGGDPQVAFSPEGIERMNANLVALNLGKPHQPIYKVRICEQANKYPVGKRNGKIAKFVEAAKGTNLFFAVYESESVDGQTGEIVRKRVFDTVPLRDVIERQMHGLSSVPEMDSSGNRLKFVLSPNDLAYVPTEAERAAGKVFEPIDKERIYKMVSCTNTQCHFIKANVATVLRDGIEFEKQNKMERALTGEMIKEICIPIKVDRLGNIIDKNLTL

SEQ ID NO: 5436 - protein, 1510 aa, synthetic construct
  REGION 1..1510: note = Synthetic
MKRILGLDLGTNSIGWAIINKSFDNEGNELLCGIEAAGSRIIPMDATILGDFNKGNKVSQTKNRTQARSVRRMYERQHLRRERLHRVLSVLGFLPPHYSQQLDRYGKFLPDKEPKLAWYINDAGKSHFLFQDSFQEMLDVFRKYNPSVIIGSHKVPYDWTIYYLRKKALCKKIKKEELAWILLNFNQKRGYFQLRDEEEEQVSTKTRQYFDRQQVVDIIDTQEVYKGLKIIQVVLANGTQGKIFKKEIPDWIGQIKDIIVTVDIDKDGKDKYDEDGSLSCRFKVPSETEWETEWKLIKEKTQHDLEASGKSVGEYIFDTLLHNPTQKIRGKLVRTIERKYYKEELYRILSKQKEFHDELNDKQLYERCLEELYPNNPAHKNLMATHDLPYFLINDVLFYQRPLKSKKSLIDNCSFEGHEYIDRETNERKFSPIKCIAKSHPLFQEFRLWQFVSNLRIYQKEKEIDGRLMTDVDVTQEFLRDEEDYVALFDWLNGKKEIKQEQFLKYPTFGLKKKANQYRWNYVEDKPYCCNETRSLMLVRLEQAGIPLTFLTREREKALWHILYSVSNKQELKQALASFAGKNGLNKNFVEIFVNTPAFEKSYGSYSAKAIKKLLPLMRMGHYWKEENIDVHTLERINKILSGEYDENIKNRVREKAIHLEDLSSFRGLPLWLASYIVYDRHSEVKEACQWKSPQDIDEYLKAFKQYSLRNPIVEQVVLETLRTVRDIWKQIGTIDEIHVELGREMKNPAEKRKKMAQKMLEKENTNLRIKSLLVEFMNPELGIENVRPYSPSQQDLLRIYEEGAWNASNADDKMHDEMLSILKKFNESDSKKRPTSSDIKRYRLWLEQKYRSPYTGAVIPLSKLFTPAYQIEHVIPKALYFDDSFSNKVICESEVNKLKDKQLGYEFIKKHHGEKVQLSLGGVVEIFSVDAYEQFIKENYSQNSAKMKKLLMDEIPEQFTERQMNDSRYISKLVVSLLSNIVRNEEEQEAQSKNVVVCTGGVTDRLKKDWGVNDVWNKIILPRFERMNQQTGTSDFTSVNSNGHTIPAMPLDLQKGFNKKRIDHRHHAMDAIVIACASRNIVNYLNNQSAGEHGKISRYDLQHLLCTKVQDGNGYQWVINKPWKTFTQDVYETLRNVIVSFKQNLRVINKTSNYYQRKENGRTILSKQDKGDNWAIRKSLHKETVFGEVNLRKTGSTSLKVVLTNPKVVVDKDLKKKLIELIQQGFNEKQIKNYFKEHKDSWQDVNLKKIPVYFFTKDTQEHYFASRKLLDDTFKQDSIKESITDTGIQTILLKHLKEEGNDPKVAFSPEGIERMNKNIVHLNNGHQHQPIYKVRKYEKGDKFAVGARGNKSSKFVEAAKGTNLFFAIYEQEQVEKSNGEVVKKRTFATIPLNVVISRQKQGKSSAPADENGNLPLFVLSPNDLVYVPTREELKNGQLPDNPHPDRIYKMVSSSGNQCFFIQYGVSSMLWDKNEFSALNKMERAITGEMIKEICIPLNINRLGHITYRL

SEQ ID NO: 5437 - protein, 1510 aa, synthetic construct
  REGION 1..1510: note = Synthetic
MKKHILGLDLGTNSIGWALVEVDENNKPCSIEGMGSRIIPMSQDILGNFESGNSISQTAERTAYRGTRRLRERHLLRRERLHRVLNVLGFLPEHYMNQIDFEKHLGKFFTDLEPKLAWKENANGKYEFIFQSSFNEMVSEFKKAQPYLFENGKLIPYDWTIYYLRKKALSQKIKKEELAWILLNFNQKRGYYQLRDEVDEENPNKLVEFHSLKVIDVVPDESANSKGETWYSLHLENGWIYRRSSKTPLFDWKDKVRDFIVTTDLNDDGTIKTDKEGNVRRSFRAPAEDDWTLLKKKTEADIDKSKKTVGTYIYDALLENPSQKIKGKLVRTIERKFYKEELKQILQKQQEFHPELQDEDLYNEAVRELYRSNESHQLALGKRDFTHLFLEDIIFYQRPLRSKKSSIGNCSLEYRKYRDKEGVEHIEYLKAAPKSNPYYQEFRLWQWLYNLTIYRRNDDTNVTQEFLNSVEDYETLFDFLDNRKEIRQDTLIKFLLEQKGFKGKMLANEASKYRWNFVDDKEKVYPCNETKALIVSRLAKVENLPDGFLKRETEQQLWHIIYSVTDKDEYEKALKSFAERHGLDVASFVENFKKFPPFKSEYGSFSEKAIKKLLPLIRTGKYWDWGKIDESTKKRIDKIITGEYDENIKERVREKAIHLKEEGYFQGLQLWLASYIVYGRHSEPGIAGKWNSVNDLEKYLHEFKQHSLRNPIVEQIVTEALRVIRDIWAHYGNGVKDFFSEIHIELGRQMKLPAEDRKKLSDQVLENEKTNLRIKALLAEMLHYPEVENVRPYSPMQQEALKIFEDGVLSSNIEIDDDILKISKTAQPSSSELRRYKLWLEQKYRSPYTGQVIPLNRLFTADYEIEHIIPQSRYFDDSFNNKVICESAVNKLKDNQTSFEFIKNHHSEIVEVGFGKTVRIFEEEEYQKFVKEHYAKNRSKRNKLLMDEIPEKMIDRQMNDTRYISKFISSVLSNIVRSETNDDGINSKNIVPLNGKITGRLKQDWGLNDVWNDLILPRFERMNELTGSKDFTAYNERYQKYLPTVPLEFAKNFQKKRIDHRHHAMDALVVACATRDHVNFLNNQHALDKKKTKEEKDKSRFDLRNKLCFKNKGDDKGNYNWQFFKPWGNFTVDARNELEKIIVSFKQNLRVINKSVNYYQRYIDGEKVVDKQTKGDNWAIRKPLHKDTVSGLVRLRKTKTVSLNAALDNYLDIVDKSLRKHIISLVSQNYDKKKLVRYFKERENQWNGIDITKVAIYYWENDNVASRVSLDTSFNEKRIIETITDTGIQMILLNHLENYKGRLDDQGKEIVPESLAFTPEGIDEMNKNIILLNNGKFHQPIFKVRTYEPKGNKFNVGYVGNKKTKYVEAAKGTNLFFAIYVDDEGKRSYETIPLNIVIERLKQGLKEVPERNEKGHNLLFSLSPNDLVYVPGEEELTTSLNHQLDRNRIYKMVSSSGNQCFFVKSEVANPIVNKVEYSVLNKMEKSIDGIMIKQVCRKLQVDRLGNIQFA

SEQ ID NO: 5438 - protein, 1509 aa, synthetic construct
  REGION 1..1509: note = Synthetic
MKTILGLDLGTNSVGWAVINSVIKEQAERIWIETAGSRIIPMDAAVLGDFDKGNSISQTSERTRLRGARRLRERQLLRRERLHKVLNILGFLPNHYLEYIDFEKHPGKFLADAEPKLAWVKDEQGKYTFLFQAAFDEMLADFAIHQPSLVSGDKKIPYDWTIYYLRKKALTEMISKEELAWILLNFNQKRGYYQLRGEEEEDNAGKSVEFYALKVLTVEATDEKKGRDVWYNVHLENGWIYRRSSSVPLDWEGQVKEFIVTTDLNPDGTPKLDKYGEVKRSFRAPKEDDWMLIKKRTEADIANTHKTVGAYIYDTLLQKPQQKIIGKLVKTVERKLYRDELSLILQKQCAFHAELQDRALYARCVEALYPSNEVRRKNIANRDFVYLLMDDILFYQRPLKTKKSLIANCPYEENEYVDRETGEIKKAPLKCIAKSHPLFQEFRLWNFLSNIRIYQKEKEINGTLHLDVDVTAEFLKTEDDYVALFDWLNSRKEIEQKTFLKYPKFGLKKEISNYRWNYVEDKQYPCNETRHAILSSLEKANVCIDFLSNEKEVALWHILYSVSDKQEIEKALRTFAAKNGLDESFVEAFKKFPPFKSEYGAYSAKAIKKMLPLMRCGKYWDVSSIDDTTKERIKKIVTDEYDERIAVKVRDKVMNLSDISCFRRLPLWLACYIVYNRHSEDKEAVKWESPADIDAYLASFKQHSLRNPIVEQVITETLRVVRDIWKQVGRIDEIHIELGREMKNPADKRKRMTAQILENENANLRIKALLAEFMNPEYEIENVRPYSPSQQEILRIYEDTVLHAEDQLPEEIDAILKKFNSSKVPTKSEFLRYKLWLEQKYRSPYTGELIPLGKLFTAAYEIEHVIPQSRYFDDSFSNKVICESAVNKLKDNQLGYEFIKNHHGQKVEVGFGKSVEIFSVDSYERFVKEQYAKSAVKMKKLLMDDIPEQFIERQLNDSRYISKVIKGLLSNIVREKNDSGEYEPEAVSKNIVVCTGSVTDRLKRDWGMNDVWNSIVYPRFERLNSLTDTQSFGHWENKSGKKVFQTELPLEYQKGFSKKRIDHRHHAMDAIVIACATRNHVNYLSNESASRNAKISRYDLQRLLCDKNRTDDNGNYKWVIKKPWDTFTQDAREVLSKIVVSLKQNLRIINKTTNVYRHFDATVNRVYEKQKTGDSWAIRKPMHKDTVFGAVNLRKVKVVRLSVALDTPAMIVDKRVKNKVFELLSYKYDKKRIEKYFKENAFLWKELDLAKVAVYYFTEATTEPLVAVRKPLDSTFNEKKIKESVTDTGIQKILLNHLCTKEGKPDLAFSAEGIEEMNRNLLQLNNGKSHQPIYKVRVYEPRGNKFSVGVLGNKGTKWVEAAKGTNLFFAIYITEDGKRTYETIPLNVVIEREKQGLVPVPDRNEKGDKLLFWLSPNDLVYLPTEEEREFGRINEPIDRGRIYKMVSCTGNEGHFIPANVANPIVPVIELGSNNKAQRAWTNEMIKDICIPIKVDRLGHIIEVKYRIDE

SEQ ID NO: 5439 - protein, 1509 aa, synthetic construct
  REGION 1..1509: note = Synthetic
MKKILGLDLGTNSIGWAVINSFIDSEGKESLQGIASAGSRIIPMDAAVLSDFNKGNSKSQTAERTRFRGIRRLLERRLLRRSRLLRVLRIMVFLPEHYAAQLDRYGKFLSGAEPKLAWKKDAAGKYEFLFQVAFNEMLAEFQQSCPDLLKDGKKIPYDWTLYYLRKKALSAPVGKEELAWILLNFNQKRGYYQLRSEEEVEDTKKQVEYHALRVVSVEATGESKGKDKWYNVYLENGWICPKASSMPLDWVGKVKEFVVTTELDDQGNPKLNKNGEVKRTFRTPQENDWGLLKARTQNLIDSSGKTVGTYIYDSLLTNPGLKVRGKLVSTIERKYYKDELYQILNKQAEFHPELKDSALLTECLLELYPQNEPHRNVRSSSDFVHFLIEDILFYQRPLKSQKSQIEDCPYESRVYRKADGTLCRIPLKCVSKSHPLFQEFRLWQFIANLRIYEREKIVNGSLKTDVDVTSEFLKDEADYVALFDSLSKKAEITQKTFLAEPVLNLDKKRRDAYRWNYVEDKTYPCNTTHADMAARLRKAGISEDVLTADMELSLWHILYSISDKKELTKALTKFASQRHLGDAFVAEFEKMPPYASDYASYSLKAIRKLLPLMRMGHYWQEEAIDPLTRNRIEKLLTGEWDEKIHLRVREKSMHLTELSSFRGLPLWLACYIVYDRHAEAREITRWENPGAIDDFLAEFRQHSLRNPIVEQVIMETLRVVRDVWKQEGRIDEIHVEMGREMKNPADKRKKMTAQALENEYTNLRIKALLTEFLNPEFGIENVRPYSPAQQEILRIYEEGVLAETSDKDLPSDIADILKKFKEERIEKRPSRSEVQRYKMWLEQKYRSPYTGKPIPLGKLFTPAYEIEHVIPQSRYFDDSYTNKVICEAAVNKLKGNLLGYEFIKRHHGEVVELGGGESVSIFSVAAYEQFVKEHYANNRLKKEKLLMEDIPDGFIERQLNDSRYISRVIKSLLSNIVREEGEQESTSKNVIVCTGGVTDRLKKDWGMGDVWNQIILPRFRRMNKLTDSKDYTAISLNGNLIPAVPLELQKGFSKKRIDHRHHAMDAIVIACANRNIVNYLNNASALSEARTARTDLQRLLCDKKKTDANGNYQWLIRKPWDTFTQDAYQVLQDIVVSFKQNLRVINRTTNYYQRYDESGKKVFVPQTGGDSWAIRKPLHKDTVYGEVNLRREKTVSLKDVLKMPERIVDKSFKYKLKELLTQQYGIKEISAYFEKNKSDWPDIDLKKIKVYYFTGETKYRFFATRKPLEGSFDQKKIENGVTDTGIQKILVNHLLQNGNNAEVAFSPDGIEAMNLHIASLNGGKPHQPIYKVRVYEKADKFPVGCKGNKSDKFVEAAKGTNLFFAVYEYSQIDKETGKVSRKRSFASVPLNQVIDRLKRGLSPAPEDDKGNAPAFVLSPNDLVYLPTEEEREKGVIESVLDKSRIYKMVSCTGNRSFYIPFTVANVISDKLEFSSMNKVEKAISGEIIKDSCIPIKIDRLGNIRCINNL

SEQ ID NO: 5440 - protein, 1509 aa, synthetic construct
  REGION 1..1509: note = Synthetic
MKKILGLDLGTNSVGWAVINSVVNDEGKEQLVNISSCGSRIIPMDAATLGDFDKGNSKSPVAERTRLRGVRRLLERSLLRRERLHRVLSVMGFLPEHYASQLDRYGKFLPEREPKLAWYQDETGKYRFLFQDSFNEMLEDFRQHHPELVAEGKKIPYDWTIYYLRKKALSQKITKEELAWILLNFNQKRGYYQLRGEEEKEDNKKSVEYYALKVVAVEDSGDRKGKDIWYNVKLENGWVYRRASSIPLDWVGKVKEFIVTTDLDEKGNPKKDKDGNVKRSFRAPKEDDWGLLKTRTQAQIDESGQTVGTYIYESLLRMPDQKIRGKLVRTIERKYYKDELRKILVKQSEFHAALQDHNLLLACIEELYPNNEAHRRLLSTSDFIYFLVEDILFYQRPLKSQKGLIDDCPYESHVYRDKKNGSLQHVPLKCVSKSHPLFQEFRLWQFLASLRIYQRERQVDGSLKLDVDITNEFLQSEDDYVKLFDWLNDRKDIDQKTFLAYKPFGLKKNELPKYRWNYVEDKSYPCNETRADIIFRLNKAGVPEEFLTREKEEALWHILYSISDKRELTKALGTFAEKNGLNETFVEIFSKMPPFESDYAAYSLKAIRKLLALMRMGKYWDEQAIDEQTRSRIEKMLTGEYDETIRTRVREKAMHLTDISSFRGLPLWLACYVVYDRHSEAKELVKWETPDDIDHFLRKFKQHSLRNPIVEQVIMETLRTVRDIWKQEGKIDEIHVELGREMKNPSKERARITAQVLENENTNLRIKALLTEFMNPEFEIENVRPYSPAQQEILRIYEEGVLSGVAEKDLPDDIASILKKFRENDVKKRPTTSEVLRYKLWLEQRYRSPYTGRIIPLGKLFTPAYEIEHVIPQSRYFDDSLTNKVICESAVNKLKDNCLGYEFIKKHSGEKVELGNGETATIFSVEEYERFVKDSYLGNSKKMKKLLLEDIPDNFIERQLNDSRYISKVVKSLLSNIVCEEGEQEGMSKNVIVCTGGVTDRLKKDWGVQDVWNRIILPRFLRLNKITDSTDFTSVSTNGHLLPAVPLHLQKGFNKKRIDHRHHAMDAIVIACAGRNIVNYLNNASARKGSEISRYDLQHLLCDKVKTDANGNYKWILRKPWETFTQDVYAALTNIVVSFKQNLRVINRTTNHYQHYNEDGEKKMIPQTKGDRWAIRKPMHKDTVYGEVNLRKEKTLPLKDVLNNPSIVVDKSLKNKLYELLKSQYDLKAITKYFETHQDVWADVNLKKIKVYYFTKETNERFFATRKSLDSSFNQKKIEEEVTDTGIQKILLRHLQQNGNNPDIAFSPDGVERMNQNMTILNNGKWHQPIYKVRTYEKADKFAVGESGNKVKKFVEAAKGTNLFFAVYESIQEDEATGKQVRKRTFATIPLNEVIKRKKQGLPVAPEDSKGNLPIFVLSPNDLVYLPTEEECNTGKIIQPLARERIYKMVSCTEGECHCIPEYVASPILQTIELGSNNKAQRAWSGEMIKEICVPVKVDRLGNVSLVKI

SEQ ID NO: 5441 - protein, 1509 aa, synthetic construct
  REGION 1..1509: note = Synthetic
MKRILGLDLGTNSIGWAVLNSETVEQTEKMWIEMAGSRIIPMDAATLGDFDKGNSTSQTAERTRLRAARHLIERCLLRRERLHKVLHILDFLPEHYSKQLNWDEHAGQFCKQSEPKLAWEKKENGQFDFIFQTAFNEMLADFAQYQPALVENNKKVPYDWTIYYLRKKALTQKISKQELAWIILNFNQKRGYYQLRGEEEEEVKNKLVEYHALKVTRVEATDEKKGKDIWYNVYLDNGWIYRRASNVPLDWEGKIKEFIVTTDLNEDGTIKIDKRGEIKRSFRAPNEDDWTLIKKKTEADISDSHKTIGWYIYDTLLQKPQQKIRGKLVRTVERKYYKEELKQILERQSTFHAELQDRELYKQCLDCLYPQNEAHKQNIANRDFCYLFIEDIIFYQRPLKSKKSLISNCPYEKNKYVDKETGEIKQVALKCIAKSHPLFQEFRLWQFISNLRIYQKEKTIEGKLHTDVDITKEILQNEEDYTCLYEWLNERKEIDQKSFLKCPLLGLKNEVANYRWNYVEDRVYPCNETRYLIKSRIEKAKASLDNVLSTENETALWHILYSVSDKQELEKALSTFALKHHLNKESFVEVFKKAPPFEKEYGSYSAKAIKKLLPLIRMGKYWSEDCIDEVTKERIKKTIIGECEEAVNRLIRDKAIQLQKVDNFRGLPLWLACYIVYGRHSEAKDITKWEEPADIDAYLASFKQHSLRNPIVEQIIVETLRVVRDIWKRSGSIDEIHIELGREMKAPAKQREKMSMQILENENANLRIKMLLQEFINPEYEIENVRPYSPSQQELLRIYEDGIFNQVTSVPEDIEDFLKKLKDRKAPSKSEFMRYKLWLEQKYRSPYTGEVIPLAKLFTPAYEIEHIIPQSRFFDDSFSNKVICESEVNKLKDRSLAYEFIKEHPGEKVELSFGKPVRIFTVEEYELFVKEHYSKSRTKMKKLLMDDIPDTFVERQLNDSRYISKVVKTLLSNIVRKKDANGEYEQEAISKNVIVCTGSITDRLKKDWGINDVWNNIISFRFERLNQLKQTQCFGHWENKDGKRFFQTDLPLEYQKGFSKKRIDHRHHAMDAIVIACASRNHINYLNNESARKNSPISRYDLQRLLCDKHKTDESGNYKWVIKKPWNTFTQDVQVVLNETIVSFKQNLRIINKNTNYYWSYNSNGKKVLSSQTKGDNWAVRKSLHKDTVFGRVNLRMTKEVRLSIALDTPEMIVDKQLKRKIKQLIDYKYDKKRIEKYFKENAVLWKNVNLAKVAIYYFTDTTSEPMVATRKPLDTSFTYKKILSSVTDTGIQKILLAHLKNKEENSELAFSPDGIDEMNQNLKELNGGKLHQPIYKVRVYEPLGYKFNVGETGNKTQKFVEADKGTNLFFAVYANEDGKRAYETIPLNVVIERKKQGVTPVPDRNGAGNKLLFWLSPNDLVYVPTEDEIERGKIEEPIDRRRIYKMVSSTSISCFFIPYYIANPIIDTIELGSNNKAEKAWSGEMIKRICIPISVDRLGNIVKKGYLM

SEQ ID NO: 5442 - protein, 1509 aa, synthetic construct
  REGION 1..1509: note = Synthetic
MKRILGLDLGTNSIGWSLIEHDFKNKQGQIEGLGVRIIPMSQEILGKFDAGQSISQTADRTKYRGVRRLYQRDNLRRERLHRVLKILDFLPKHYSESIDFQDKVGQFKPKQEVKLNYRKNEKNKHEFVFMNSFIEMVSEFKNAQPELFYNKGNGEETKIPYDWTLYYLRKKALTQQITKEELAWLILNFNQKRGYYQLRGEDIDEDKNKKYMQLKVNNLIDSGAKVKGKVLYNVIFDNGWKYEKQIVNKDEWEGRTKEFIITTKTLKNGNIKRTYKAVDSEIDWAAIKAKTEQDINKANKTVGEYIYESLLDNPSQKIRGKLVKTIERKFYKEEFEKLLSKQIELQPELFNESLYKACIKELYPRNENHQSNNKKQGFEYLFTEDIIFYQRPLKSQKSNISGCQFEHKIYKQKNKKTGKLELIKEPIKTISRSHPLFQEFRIWQWLQNLKIYNKEKIENGKLEDVTTQLLPNNEAYVTLFDFLNTKKELEQKQFIEYFVKKKLIDKKEKEHFRWNFVEDKKYPFSETRAQFLSRLAKVKGIKNTEDFLNKNTQVGSKENSPFIKRIEQLWHIIYSVSDLKEYEKALEKFAEKHNLEKDSFLKNFKKFPPFVSDYASYSKKAISKLLPIMRMGKYWSESAVPTQVKERSLSIMERVKVLPLKEGYSDKDLADLLSRVSDDDIPKQLIKSFISFKDKNPLKGLNTYQANYLVYGRHSETGDIQHWKTPEDIDRYLNNFKQHSLRNPIVEQVVMETLRVVRDIWEHYGNNEKDFFKEIHVELGREMKSPAGKREKLSQRNTENENTNHRIREVLKELMNDASVEGGVRDYSPSQQEILKLYEEGIYQNPNTNYLKVDEDEILKIRKKNNPTQKEIQRYKLWLEQGYISPYTGKIIPLTKLFTHEYQIEHIIPQSRYYDNSLGNKIICESEVNEDKDNKTAYEYLKVEKGSIVFGHKLLNLDEYEAHVNKYFKKNKTKLKNLLSEDIPEGFINRQLNDSRYISKLVKGLLSNIVRENGEQEATSKNLIPVTGVVTSKLKQDWGLNDKWNEIIAPRFKRLNKLTNSNDFGFWDNDINAFRIQVPDSLIKGFSKKRIDHRHHALDALVVACTSRNHTHYLSALNAENKNYSLRDKLVIKNENGDYTKTFQIPWQGFTIEAKNNLEKTVVSFKKNLRVINKTNNKFWSYKDENGNLNLGKDGKPKKKLRKQTKGYNWAIRKPLHKETVSGIYNINAPKNKIATSVRTLLTEIKNEKHLAKITDLRIRETILPNHLKHYLNNKGEANFSEAFSQGGIEDLNKKITTLNEGKKHQPIYRVKIFEVGSKFSISEDENSAKSKKYVEAAKGTNLFFAIYLDEENKKRNYETIPLNEVITHQKQVAGFPKSERLSVQPDSQKGTFLFTLSPNDLVYVPNNEELENRDLFNLGNLNVEQISRIYKFTDSSDKTCNFIPFQVSKLIFNLKKKEQKKLDVDFIIQNEFGLGSPQSKNQKSIDDVMIKEKCIKLKIDRLGNISKA

SEQ ID NO: 5443 - protein, 1509 aa, synthetic construct
  REGION 1..1509: note = Synthetic
MKKTLGLDLGTNSIGWAVINSNIDSEGKEKLVGISSCGSRIIPMDAATLGDFGKGNTKSPVAERTRLRGIRRLLERSLLRRERLHRVLSVMGFLPEHYASQLDRYGKFLPETEPKLAWYKDDSGRYQFLFQKSFHEMLEDFRQHQPELVAGEKKIPYDWTIYYLRKKALSQEITKEELAWILLNFNQKRGYYQLRGEEEQEENNKSVEYHALKVVSVEDSGERKGKDIWYNVTLENGWVYRRASNIPLDWTGKVKEFVVTTELDDAGNPKKDKEGNVKRSFRAPKEDDWGLLKTRTQAQIDESGKTVGTYIYESLLCMPNQKIRGKLVRTIERKYYKDELRQILVKQSEFHAALQDHNLLLSCIEELYPNNEAHRRLLSASSFIYFLIEDILFYQRPLKSQKGLIDNCPYESHIYKDKKDGSLHHVPLKCVSKSHPLFQEFRLWQFLSNLRIYQRERMMDGSLKLDVDVTREFLPSEEDYVKLFDWLNERKEISQKFLLAYKPFGLKKNEQANYRWNYVEDKSYPCNETRAEIKSRLSKAGVPEEFLTEEKEEALWHILYSISDKKELTKALGTFAAKNGLNESFVEVFAKIPPFESNYAAYSLKAIRKLLALMRMGKYWNEQTIDRQTRDRIEKILTGEYDETIRSRVREKAMLLTDISSFRGLPLWLACYIVYDRHSESKELVKWETPADIDHFLSKFKQNSLRNPIVEQVITESLRTVRDIWKQEGKIDEIHVELGREMKNPAKERARITAQVQENENTNLRIKALLAEFMNPEFEIENVHPYSPGQQEILRIYEDGVLSGIAEKDLPDDITAILKKFRENDVKKRPTTSEVLRYKLWLEQRYRSPYTGRVIPLGKLFTPAYEIEHVIPQSRYFDDSISNKVICESAVNKLKDNCLGYEFIKKHSGEMVELGNGETVPVFSVEEYERFVKESYFGNSKKMKKLLLEDIPDSFIERQLNDSRYISRVVTSLLSNLVCEEGEQDGLSKNVIVCTGGITDRLKKDWGVQEVWNRIILPRFLRLNEITGRTDFTSTSVNGHLLPALPLYLQKGFNKKRIDHRHHAMDAIVIACANRNIVNYLNNSSARKNSEISRYDLQRLLCEKVKTDANGNYKWILRKPWETFTQDVYAALTNIVVSFKQNLRVINRTTNYYQHYNEAGEKRMIPQTKGDRWAIRKPMHKDTVYGEVNLRKEKTLPLRDVVKNPSIVVDKSLKNKLYELLKSQYDLKAIAKYFEIHQDVWADVNLKKIKVYYFTKETNERFFATRKSLDPSFDQKKIEEEVTDTGVQKILLHHLQQNNNDPDMAFSPDGIDRMNQNMTILNDGKWHQPIYKVRTYEKADKFAVGESGNKAKKFVEAAKGTNLFFAVYESVQEDEAIGKQVCKRTFATIPLNEVIKRKKQGLPAAPEDLKGNLPKFVLSPNDLVYLPTEEERNSSRIIQPLDRERIYKMVSSSGSQCFFIKVFVANSIWDKNEYSSLNKMERAITNEMIKEICVPIKIDRLGNVSLIQI

SEQ ID NO: 5444 - protein, 1509 aa, synthetic construct
  REGION 1..1509: note = Synthetic
MKNILGLDLGTNSIGWAVVNGSVNDNGSEQLVKIQASGSRIIPMDAAMIGDFNKGNSISQTAERTRLRGIRRLSERYLLRRERLHRILDILGFLPSHFAQDLDRHGKIVKGKEPKLAWRKNEAGQFEFIFQDSFKEMLEDFKLNHPNLITDDKKVPYDWTIYYLRKKGLTSKISKEELAWILLNFNQKRGYYQLRGEEEKKNDNVMIINSKVIDVVKAEKDKKYEKYWYNALLENGLLYRAAFYNDISFWKGHTKEFVLKTIKLKSGGTKQELSFLPSFDEIEKMEKKQKDKMYFKIKLKTEADIDQTHKTVGTYIYDTLLGNPSQKIRGRLVRTIERKYYKEELKLILDKQKEFHPELQDRALYAACVEELYTINEAHRNNIGNRDFTYLFLEDILFYQRPLKSKKSLIDNCPYEENHCLDKETGEIKSFPVKCIAKSHPLFQEFRLWQFIVNLRIYRKGLAQDVDVTNELLKTEEDYVALFDWLNGKKEIDQKAFLKYPLFGLKKEVENYRWNYVQDKPYPCNETRSSMLARLEKCDISIEFLTKENEEALWHILYSVEDKNEIVKALQKFADKHDLNASFVDVFRKFPPFKKEYGSYSAKAIKKLLPLMRMGKYWSENSIDKGTRERIDKIITGEYDEKIENRVREKAIHLADVSDFRGLPLWLVCYIVYGRHSEAKEITQWKSPADIDSYLKSFKQHSLRNPIVEQIIIETLRVVRDIWKQVGNIDEIHVELGREMKNPADKRKKMTQQISENENTNLRIKYLLTEFLNPEYEVENVRPYSPSQQDILRIYEEGVLNSVSDLPEEISDILKKFTETDLKKRPSRSEVLRYKLWLEQKYRSPYTGEVIPLGKLFTSAYEIEHVIPQSCYFDDSFSNKVICEAEVNKLKSNLLGHEFIVKHHGEIVELPFGKKVRIFTVDEYEQFVKDNYSRTRGKMKKLLMDDIPEEFVTRQLNDSRYISKVVKPLLSNIVREKGEEEAISKNVIPCTGGVTDRLKKDWGINEVWNKIILPRFQRLNELTGTNKFTTKNVGIQEIPTMPLELQKGFNKKRIDHRHHAMDAIIIACANRNIINYLNNESATAKAELSRYDLQKLLCDKAKTDNNGNYKWVIRKPWASFTQDTYLALENIIVSFKQNLRVINKATNRFLHYNEEGKKIFVKQGKGDNWAIRKSMHKDTVFGEVNLRRIKTVALNEAMKNPQSIVVKDFKRKLLELWNLGFDAKRIKKYFEDNRETWSDINLSKIEVYYFSKDTKDRFFATRKPLDTSFDRKKIENNITDTGIQKILLRHLELKDNNPDIAFSPDGIDEMNRNIIQLNNGKYHQPIIKVRWYEQADKFAVGQTGNKSSKFVEAAKGTNLFFAVYESNILDKKTNTIIKKRNYATIPLNVAIERQKQGLPVAPEDENGNDPIFVLSPNDLVYLPTDDELANGIIAQPLDRGRIYKMVSCTGNEGHFIPARIANPILQTIELGSNNKAQKAWTDEMIKEICMPIKVDRLGNVLESSSSYKK

SEQ ID NO: 5445 - protein, 1508 aa, synthetic construct
  REGION 1..1508: note = Synthetic
MFFLGKNKILTTMKKILGLDLGTNSIGWALINVSQNDDGEESFENIAISGSRIIPMDQASIGDFNRGNTISQTKERTQHRGTRRLYERGHLRRERMNRVLSILNFLPEHYKICLDEYGKIKPDLEPKIAWKLNSCQHYEFLFMKSYNEMLQDFKKCHQTLLESGKNIPYDWTIYYLRKKALSLPVSKYELAWILLNFNQKRGYYQLRGEDVSENTQKAEEYYSLKVVDLIETGEKKGKDLWYNVVLENGFIYRRTFPEKPDWIGKVKDFIVTTDLEKDGKPKVDKEGNIKRSFRMPKEDDWGLLKKKTEADIDKTNKTIGEYIYDALLAEFECKVRGKLVGVVERKYYKAELARILEAQKKFIPELNDIGLYERCITALYPNNTAYRNSIASRDFTYLFVNDILFYQRPLKSKKYLINDCPMESRHYIDKGTGECVTIPLKCIAKSNPLFQEFRLWQFITNLRIYERERKIDDSIKENIDVTSQFLPNYTSYSKLYDWLNNKQSINQKTFLCYPEFGLPQSARDTYRWNYVEEKDYPCNETRSLMLKYLSKAGVPSEFLTSNTERELWHILYSVEDKIEIAKALSSFAKRHFLGDAFVEVFRRIPSFKKDYGAYSEKAIKKLLPLMRMGQYWKEDSIDSNTHERINMILTGEYDERIRNRVREKSIGLKDIHDFQGLPVWLANYIVYDRHSEAKSIVKWSGPDDIDVYLNSFKQHSLRNPIVESVILETLRTVRDIWKAEGQIDEIHIELGRELKNSADKRKRISNQILENENTNLRIKAMLQEFLNPEYGIENVRPNSPSQQDLLRIYEEAVLDNTDVPDDIQQILGKFSKLDDAKRPTPSEMLKYKAWLEQKYRSPYTGAIIPLGKLFSPEYEIEHIIPRAVYFDDSFSNKVICESEVNKLKDNMLGYSFIKKHQGEIVTLNGGKTVKILSVEAYEKFVQDNYSGKKSIAKKRNLLSENIPEKFIQRQLNDSRYISKVIKTLLSNVVRVEGEQEDISKNVITCTGSVTDRLKKDWGINKIWDEIIMPRFKRMNDVMQTNGFVAVNANGKEVPTVPISYQRGFNKKRIDHRHHAMDAIVIACATRNIISYLNNESACKGARISRYDLQRLLCDKVHDGRKRDYNWVIRMPSNTFVKEVKSSLRDIIVSFKQNIRVINKSSNKYEVIKDGKKIKVAQVKGDNWAIRKSLHKDTVYGEVNLRRQKNVSINEALKNPSCIVDKVIKNEVLSDLNKGYNLKEIKYNLTRSHPDISSMAVYYYTGDSKDRFFAVRTTLDESFTKEVIESSITDSGIQHILLKHLESNDNKPTIAFSPDGIDKMNANIVDLNNGMYHKPIRKVRKYEKADKFAIGESGCKSKKFVEADKGTNLFFAIYQSEGKRTFATIPLIDVIMREKNGEHPVPDVNANGDKLLFYLSPNDLVYVPTADEIESGHINDVIDKDRIYKMVSSSGRQCFFVSETMAVSIVDKKEFSPLNKMERALSGEMIKDICIPIKVDRLGRITNIIDSIK

SEQ ID NO: 5446 - protein, 1507 aa, synthetic construct
  REGION 1..1507: note = Synthetic
MKKILGLDLGTNSIGWAVIDAVNDESGKEELKNISCSGSRIIPMDAATLGDFDKGNSKSQTAERTRLRGVRRLLERSLLRRERLLRVLSVMNFLPEHFSSQINRYGKFVENSEPKIAWKVNEEGKYIFLFQESFREMLEEFRSCNPGLLENGKMIPYDWTIYYLRKKALTRKIAKEELAWILLNFNQKRGYYQLRGEEEQEDDKKLVKYYALKVVSVEDSGDRKGKDIWYNVHLENGWVYRRASSIPLDWEGKVREFVVTTELDENGNPKTDKNGEVKRSFRSPKEDDWTLLKTKTQDSIEESGKTVGAYIYDELLVNPSQKIRGKLVRTIDRKYYKDELRCILDAQKEFHNELRDNNLYLSCVEELYPSNEIHRNILLNKDFTYLFLEDILFYQRPLKSKKSLIDDCPYEERVYKQKDGSLCHVPLKCTSKSHPCFQEFRLWQFLSNLRIYQREKQVDGSLRTDVDVTSEFLKNEDDYVALFDWLNDRKDIDQKVFLTYKPFNLTKKNQSAYRWNYVEDKSYPCNETRALILKFLNKAGVSSSFLSKEKEESLWHLLYSISDKKELDTALYTFAGKNGLGQEFVSAFSKIPPFDSSYASYSLKAICRLLPLMRMGKYWSEENIDFSTHTRMEKIINGEYDDSIRSRVREKSLHLSDISSFRGLPLWLACYIVYDRHSEVKDIVKWNSPDEIDNYLNKFKQHSLRNPIVEQVVTETLRVVRDIWKHEGHLDEIHVELGREMKATAQERARRTIQVLENEYANLRIKALLSEFQYPEFGIENVRPYSPSQQEILRIYEDGVLSSISEKEMPEDISSILKKFNEGDVKKRPTRSEVLRYKLWLEQNYHSPYTGEPIPLGKLFTSAYEIEHIIPQSRYFDDSLSNKVICESAANKLKGNSLGYEFIKKHHGEVVDLGNGKTARIFTVGEYEEFVKRTYGSNSQKMKKLLLEDIPDGFIERQLNDSRYISKLIKGLLSNIVRNEDEDEAISKNVIVCTGGITDRLKKDWGIQDVWNRIILPRFVRLNEIEGSDVFTTVSSSGHLIPSMPLHLQKGFNKKRIDHRHHAMDAIVIACANRNIVNYLNNTSARKGAETSRYDLRNLLCEKDKTDGNGNYKWMLRKPWESFTQDVYSALQNIVVSFKQNLRVINSTTNFYQHYDDEGKKKMIKQIKGDSWAIRKPMHKDTVYGEINLRCVKTVSLKEAMNNIQRIVDKPFKNKLVELVGLGYDVKCINKYFESRSDEWNELDLKKIKVYYFTKETNNRFFATRKPLDTSFSQKKIDGEVADTAIQKILTNHLLKNGNNPELAFSPDGIERMNQNIVSLNNGKEHQPIYKVRIYEKADKFAVGEKGNKKSKFVEAAKGTNLFFAIYESIKENNETGEVIRKRTYNSIPLNVVIERLKKGLSPAPEDDEGRLPSFVLSPNDLVYLPTEEERKTGKVSEPLNKDRIYKMVSSSGNQCFFIKASISSMIVDKKEYSPLNKMERAVTGEMIKEICLPINVDRLGKIKIKH

SEQ ID NO: 5447 - protein, 1507 aa, synthetic construct
  REGION 1..1507: note = Synthetic
MKKILGLDLGTNSIGWAVVTSVGEGQNENRLIELSGSRIIPMDAATLGDFDKGVTKSQTSERTTFRGIRRLRERGLLRRERLHKVLKILGFLPEHYANEIDFDHHPGKFKPDVEPKLPWKKNEMGQWVFLFQNSFQAMLADFSHYQPEWVADSKKVPYDWTIYYLRKKALTEKISKEELAWILLNFNQKRGYYQLRGEDEEESSNKLKEYCALQVVRVEATDEKKGKETWYNVHLENGWIYRRTSAVPLKWEGMVKEFIVTTDLNEDGTPKLGKDGSVKRSFSIPKEGDWTLIKKKTEADITKSNKTIGTYIYDTLLHNPGQKIKGQLIRTVERKYYKEELRAILLKQISFHSELQDNDIFKRCVEALYPNNEVHKRNIANRDFVYLFIDDILFYQRPLKTKKSLIDNCPYEENQYVDKETGEIKRASIKCIAKTQPLFQEFRLWQFIDNIRIYKREKEVDGRLQTDVDVTVDFLKTEADYVALFEWLNDKGKIDQKSFLANPAFGIKKVAEQYRWNYVEDKSYPCNETHSLILSLLEKSEISTSFLSEEGGREEALWHILYSVEDKQEIVKALTKFATKYNLPNRFVEVFCKCPPFKKEYGAYSAKAIKKLLPLMRRGKYWADTAIDDKTAERIKKIINGEFDESICKQVREKCANLSTLNDFRGLPLWLACYIVYNRHSEAKETTKWESPEDIDIYLRNFKQHSLRNPIVEQVVLETLRTVRDIWKKVGRIDEIHVELGREIKNSSEKRKQISEQIQANENANLRIKALLIEFMNPEFGVENVRPYSPSQQELLRIYEDGVLNSVEELPDDIAVFLKKFDVMRQPTRSEFLRYKLWLEQRYRSPYTGNVIPLGQLFTPAYEIEHIIPQARYFDDSFSNKVICESAVNKLKDNLLGYEFIKEHHGRKLSEHIQIFSVEAYETFVKEHYAKSRNKMKKLLMDEIPEKFIERQLNDSRYISKLVKRLLSNIVREKDKDGEYEQEDISKNMVVCTGTVTDRLKRDWGMNDVWNQIVYPRFDRLNHLTDSCQFGGWEDKAGKRVFQTAMPLEYQKGFNKKRIDHRHHAMDAIIIACATRNHVNYLSNESASKNSKVSRTDLQRQLCDKKKTNDKGDYIWSIKKPWDTFTQDARKSLEHIIVGFKQNLRVINKSSNTYQCFDEHGIKVLKKQVHGDNLAIRKPMHKDTAFGSVNLRRVKEARLSVALDAPSMIVDKKMKKKVLELMSYKYDKKGIERYFKENIYLWKNLNLSKVPVYYFTDNTSEPLVAVCKPLDASFNMKKIKEAVTDTGIQKILLKHLSNNDDNPALAFSPDGISEMNKNLTVLNDGKLHQPIYRVRVYEPKGNKFNVGSVANKRSKYVEAAKGTNLFFAVYQTSSGDRVYETIPLNIVIERLKMRWTPVPEMNAKGDRLLFTLSPNDLVYIPTVEECESGNISPEIDSRRIYKMVSSSGPQCFFVPHTVANPIVSTLELGANNKAEKSWDGEMIKSICVPVKVDKIGNIISIGGRKNL

SEQ ID NO: 5448 - protein, 1507 aa, synthetic construct
  REGION 1..1507: note = Synthetic
MKRILGLDLGPNSVGWALVNSIVKEQTERIWIEMAGSRIIPMDAAVLGDFEKGNSISQTAERTRIRGMRRLRERQLLRRERLHKVLNILGFLPKHYRDEIDFNKHPGKFLANTEPKLPWVKNEQGKYTFLFLNSFEEMLQDFKEHQPSIVSDKKKVPYDWTIYYLRKKALTQKISKEELAWILLNFNQKRGYYQLRGEDEEENTGKQVGYYALKVVSVEATDEKKGKDIWYNVHLENGWVYRRSSNVPLDWEGQVKEFIVTTSINPDGTPQLDKSGEIKRSFRAPKEEDWMLIKKRTEMDIENSQKTVGCYIYDTLLQNPQQKIIGKLVKTIERKYYKEELRQILQKQCILHCELQDKNLYKQCVEALYPSNEAYRTNIVNRDFVYLLMEDILFYQRPLKSKKSLIDNCPYEEYEYVVDKHTGEVKKAHLKCIAKSHPLYQEFRLWQFLYNLRIYQKEKEINGTIHTDVDVTSEFLKIEDDYVTLFDWLNRREKIEQKTLLKYPAFNIKKDVDNFRWNYVEDKTYPCNETRSLILSCLNKANLSEDFLSYQKEEALWHILYSVNDKQEIVKALQTFARKNGLDGTFVDAFKKIRPFNKEYGAYSAKAIKKLLPLMRTGKHWNVESIDGKTKERIDKIITGEYDEKISNRVREKAIYLSDISCFKGLPLWLACYVVYGRHSEQKEITKWETPDDIDAYLSTFKQHSLRNPIVEQIIMETLRVVRDIWKKAGSIDEIHIELGREMKNPADKRKRMTAQILENENANLRIKALLTEFMNPEYEIEDVRPYSPNQQEKLRIYEDGALNAAEQVPEDIETILKKFKENKQPTRSEFLRYKLWLEQKYRSPYTGELIPLGKLFTEAYQIEHIIPQKRYFDDSFSNKVICESAVNSLKGAQLGYEFIKEHHGEKVETGFGKVVTIFSVTAYEQFIKEHYAKSKAKMKKLLMDDIPEQFIERQLNDSRYISKVIKGLLSNIVREKDESGEYEQEAISKNVLVCNGSVTDRLKKDWGMNDVWNNIVYPRFERLNTLIGKECFGHWENKNGKRIFQTEVPLEYQKGFSKKRIDHRHHAMDAIVIACATRNHINYLNNASASKNAQISRYDLQHLLCDKTKTDDKGNYKWVIKKPWDTFTQDTKGILDNIIVSIKQNLRVINKTTNIYQHFDTDGKRTFYKQTKGDSWAIRKPMHKDTVFGIVNLRKTKEVRLSIALDIPYLIVDKKVKKKVFQLLKYKYEKKRIEKYFKENACLWKELNVAKVPVYYFTESSSERMVAVRKTIDTSFNAKKIQESVTDTGIQKILLKHLEQKDDKADLAFSAEGIEEMNRNIIALNDGKKHQLIYKVRVYEPLGNKFNVGTTGNKGKKFVEAAKGTNLFFAIYRTEDGKRIYDTIPLNIVIEREKQGLLPVPDKDEKGNTLLFWLSPNDLVYLPTEEEREFDRINEPIDKKRIYKMVSSSGNQCFFIPVNIANAIVPILELGANNKAEKSWEGNMIKSICIPIKVDRLGNIIKIKKV

SEQ ID NO: 5449 - protein, 1506 aa, synthetic construct
  REGION 1..1506: note = Synthetic
MEKKILGLDLGTNSIGWAVIKADVDEKGKEQLEGIEAAGSRIIPMDAALLGNFDKGNSVSQTSERTAFRGMRRLRERHLLRRERLHRVLDVLGFLPEHYANSLNRYGKFSANEECKLPWARQEDGTYEFLFQDSFHEMLADFAHRAPEVVAEGKKVPYDWTLYFLRKKALTQPIRKEELAWLLLHFNQKRGYYQLRGEEEEKPSKREEFCALEVVRVEDSGEKKGKETWYNIYLEDGRIYRRTFTTAPDWVGKVKEFIITTDLDKDGIPKKDKEGKIKESFRVPKEDDWILVKKKTEADIDKSGETVGEYIYDALLRNPVQKIRGKLVATIERKYYRDELRRILETQIGFHPELQDEGCYQACIQELYPNNEVHRNNVGGRGFVHLFVDDIIFYQRPLKSKKSLIADCPYEENTYVNQETGEVKSAPIKCIPKSHPLFQEFRLWQFISNLRIYQKDGERPGSDKEITGQLLQTSEDYACLFAWLNDRMKIEQKSLLKYPAFHLDAKKNGYRWNYVEDKSYPCNETRAQMLSFLGKAHVPADFLTREKEEALWHILYSVEDKREIERALQRFARKNGLGSEFAEALKKFPPFEKDYGAYSAKAIKKLLPLMRAGKYWNEAEIDAETRMRMERMISGEYDEGVNERFREQAMRLRSVEDFHSLPVWLACYIVYGRHSEAKSIDKWEMPGDIDYYLKAFRQHSLHNPIVEQVIMETLRTVRDIWKQVGRIDEIHVELGRKMKNPKEQRAAMTRQILENENTNIRIKALLTEFMNPEFGVENVRPGSPSQQEILRIYEEGVLNNVTELPIEIASILEKFRQGDIKRHPSRAEVLKYRLWLEQKYISPYTGEMIPLGKLFTPAYEIEHVIPQSRYFDDSFSNKVICESEVNKLKSNCLGYEFIKKHQGEKVELGFGKTVEIFSIESYERFVKEHYGKTKEKMRKLLMEDIPEKFTARQSNDSRYISRVVTALLSNVVREEGEAESVSKHVVVCTGGITDRLKKDWGLHDVWNKIILPRFIRLNKMKGDSQFTAVSANGHDIPTVPLDLQRGFSKKRIDHRHHAMDAIVIACVNRSIVNYLNNLSANEQVGISRRDLQALLCVKSKTDHNGNYEWLVKKPWETFTQDALVVLQNIIVSFKQNLRVINKTTNRYTHYEQEKKVSALQTKGTSWAIRKPMHKDTVFGEVNLRRIKYIPLKEAFKRPQDVVEKDLKKELCAMVERGWSIEQAKKHFEENRDVWQDVNFSKIAIYYFTKETKERYFATRKLLDTTYNRKKIEEEITDTGIQKILLRHLEANGDDPELAFSPDGIEAMNWNIKELNGGKNHQPIYRVRWYEKGDKFAVGQTGNKGAKFVEAAQGTNLFFAIYETSDEDSTNKIAAKRTYATIPLATVIERQKKGLPVAPENENGETAKYILSPNDLVYLPTSEEVSDGKVYFPIDRGRIYKMVSANGSQCFFVKSEVAKSIEDKFEFSSLNKMERAVTKEMIKETCLPIKIDRLGNLIQVGDFKPEN

SEQ ID NO: 5450 - protein, 1506 aa, synthetic construct
  REGION 1..1506: note = Synthetic
MKKILGLDLGTNSIGWALINSDSENNNNKILGMGSRIIPMSQDILSDFTQGNSISQTAERTQYRSTRRLRERHLLRRERLHRVLHLMGFLPKHYDEMIDFENHPGKFLPETEPKIAWSKNDESKYEFIFKKSFEEMMADFKANQPELLTDGKKVPYDWTIYYLRKKALTQKIEKEELAWILLNFNQKRGYYQLRGEEEDEENPNKSIEYHALKVTHVEADEAEKNKSDIWYTIYLENGWIYRRSSKIPLFDWIGVTKEFIVTTELNDDGTVKIDKEGKEKRSFRIPSEDDWTLLKKKTETDIDKSKKTVGTYIYDTLLKKPDQKIRGKLIRTIERKYYKKELKKILTKQKEFHPELKDRNLYRSCVVELYPNNKAQQNNIRNKDFTYLFIEDIIFYQRPLKSKKSLISNCKFEYRTYKDKEGNIRKAPLKCVPKSHPLYQEFRLWKFVQDLRIYEREKKINGKLYIDYDVTNEFIKTEEDLVNLFDWLNKRSGIKQNTLLSSYFKVKKTNKTDKQLPYRWNYVEDKEYPCNETRFSITNRLEKINDLPNNFLTNRKEFELWHLLYSVIDKNELEKALKKFAAKNNLPINEFVDAFVKFPPFERDYGSYSEKALKKLLPLMRMGKYWNYEAIDLNTRQRIEKLLTGEVDETIHDKVREKTSHLTDEKQFKGLPEWLAAYVVYGRHSEMSEYTKWNTYHDLNNYLQDFKQHSLRNPIVEQVIMETLRVVRDCWEKYGNIDEIHVELGREIKNPAEKRKKITKTITQNENTNLRIKALLIELANDGVENARPYSPTQEEILKIYEEGVLNSTIDIPNDIEKIVRKATPTKQELNRYKLWLEQKYRSPYTGEIIPLAKLFTPAYEIEHIIPQSLYFDDSLSNKVICESEVNKLKGNQLAYEFIKTHHGEKVELNFGKTVEIMSKEAYEKFVNENYRNNFFKRKKLLMDDIPDEFIERQINDTRYITKVVKSLLSNIVREEDEQEPTSKNVIVTTGQITNTLKRDWGLNDIWNEIIYPRFERLNRLTNSTLFGQWVNENGKRFFRTQVPLDLQKGFSKKRIDHRHHAMDALVIACTTRNHVNYLNNESAKSSNRETRYDLRNKLCKKVKTDDKGNYIWQFIKPWETFTQDAKIELENIVVSFKQNLRVINKTTNYYQRYVNGKKVIDKQTKGDHWAIRKSLHKDTVAGQVNLRFKKKVSLSVAIDQPENIVDKQLKREIKNLQKEKFDKKQILKYFGNLNYRWQGKEIKQPEIYYFSNDKVEMTASRVNLDTSFGTKKIESITDTGIQKILKNHLSKFDENVNGTIIEHPELAFSPEGIEEMNKNIRELNDGKPHKPIIKIRTYETKGNKFNVGTKGNKKLKFVEADKGTNLFFAVYIDDDGKRNFETIPLNIIIERLKQGYEAVPEKNEKGHRLLFHLSPNDLVYLPTEEDIINGNVSIPLDNNRIYKMVSCTGNVADFIPFYVANPIVKTTELGSNNKAQRAWTGEMIKEICIPLEVDRLGNIVKIKTT

SEQ ID NO: 5451 - protein, 1506 aa, synthetic construct
  REGION 1..1506: note = Synthetic
MRKIVGLDLGTNSIGWALLNASENEKGLVLSGIERSGSRIIPMDAAILGDFDKGNSKSQTSERTRFRGIRRLRERHLLRRERLHRVLNVLGFLPQHYLNEIDFDNHPGKYLTDTEPKLPWKKMASGKYEFLFNSSFEEMLNDFRDSQPLLVGEGRKVPYDWTIYYLRKKALREKINKEELAWLLLHFNQKRGYYQLRGEDEEENSNKLVEFHALKVESVKATDQKKGKDVWYEIILENGWIYRRASSVPLDWKGKTMEFIVTTDIEEDGTPKVDKDGCVKRSFRAPKEDDWTLIKKKTEADIDQSAKTVGTYIYDTLLQHPSQKIRGKLVRTVERKYYKAELEAILKKQTEFHPELQNVDLYNKCITNLYPNNDSHRENIAKKDFTHLFLNDIIFFQRPLKTKKSLISDCPFEYRKYKDQKTGEEKISPIKCIAKSNPFFQEFRLWQFISNLRIYQREKEVDGKLKVDVDITGEWLKDEDDYVALFEWLNDRKEIKQDVLLQSYFKQKKIKGQTVFPYRWNYVEEKVYPCNETRASILSRLDKANVSSDFLTKEKEMALWHILYSVEDKYEIVKALVHFKEKNQLDDAFVEAFRKFPPLKKEYGTYSEKAIKKLLSLMRRGQFWSKDDIDAHTRMRIEKIITGEVDDSILERVRDKAIHLFDIADFQGLPVWLASYIVYNRHAEAQEMTKWLTADDMDVYINSFKQHSLRNPIVEQVILETLRTVRDIWKEAGQIDEIHVELGREMKNPADKRKQLTEQTLENENTNLRVKQLLMEFLNPEYEIENVRPYSPMQQEIFRIYEEYVLNSVEVPDDMMDVIKKFRESDIKKRPGKSEIMRYKLWLEQKYRSPYTGEIIPLGKLFTPAYEIEHVIPQSRYFDDSFSNKVICESEVNKLKSNQLGYEFIKNHHGQKVSLGFGKTVEVFSVSAYEEFIKQNYSSARNRSKMKKLLMEDIPEAFIERQLNDSRYISKVIKGLLSNIVREKDEQEAISKNVITCTGGVTDRLKKDWGLNDVWNDIVFPRFERLNQLTNSEQFTVYNERVQKYLPAIPLELQRGFNKKRIDHRHHAMDAIVIACATRNIVNYLNNESASRRSKFSRYDLQHDLCEKRRTDDRGNYTWLIKKPWDTFTQDARLALENIIVSFKQNLRVINKATNFYQHYDASGEKVFVKQVKGSNWAIRKPMHKETVFGNVNLRRIKYVKLSVALDMPSMIVDRSLKDKVKSLMALKYEKKRIDKFFKENANDWKKYDFTKIAVYYYTNDTKDRLIAVRKPLDSSFNKKKIEESVTDTAIQKILLRHLGNFEEKAELAFSLEGIDELNRNLKALNGGKLHQPIYKVRVCELQGSKFNVGIIGNKSTKYVEAAKGTNLFFAVYQTENGERTYDSIPLNVVIERQKQGLLSVPEVDENGNKLLFWLSPNDLVYVPTEDEVVNNRIGDKLKSKRIYKMVSCTKGEAHFIPCNIAYPIVPVLELGSNNKAQRSWTGEMIKEICLPLKVNRLGIIIHRSK

SEQ ID NO: 5452 - protein, 1505 aa, synthetic construct
  REGION 1..1505: note = Synthetic
MKSILGLDLGTNSIGWAILKSDENKNNNLQSIKIEGAGSRIIPMDSAVLGDFDRGNSISQTAERTRLRGIRHLIERSIQRRERLHRVLDILGFLPSHYSQALNRYGKIQEGEEPKLAWQKDKFGKSTFLFTDSFNEMLKDFKSSHPELIGKKIPYDWTIYYLRKKALSQKVTKEELAWILLNFNQKRGYYQLRNDEDNASRNKKVEYLALKVIAVEDSGEKKGKDTWYNVHLENGWIYRRTSNIMLDWVGKIKEFIVTTDINDDGTVKKDKEGNIKRSFRSPNEDDWTLIKERTQSDIENSGKSVGEYIYDCIIQNPSQKIRGKLVRTIERKFYKEELIRILNKQLEFHPELKDKDLYNACIDELYQSNESYRQNIANRNFTYLFVEDILFYQRPLKTKKSLIANCPYEEYTTIDKATGEEKRICVKCIAKSHPLYQEFRLWQFISNLRIYKKEPANDIDVTQLFLKNEDDYVALFDWLSNKKTINQKAFLQKFDLKKHEEYRWNYVEDKDYPCNETRAQILSFLSKANISEDILDTLFENELWHILYSVEDKQELIKALGKFAKNKKLDKLFVEIFQKFPPFKKEYGAYSAKAIKKLLPLMRMGKYWQQENIDPSTIERIDKIITGEYDDKIKSRVREKAINLTNIAAFKALPLWLACYIVYNRHSEAKEITKWATPDDLQNYLNSFKQHSLRNPIVEQIITETLRTVRDIWKQYGNIDEIHLELGREMKNPADKRRKMTQQILENENANMRIKKLLLDFANPEFEIENVRPYSPSQQEILRIYEEAVINRQDTYKNENTNNYKYKNKEEKEEIENILKKFKESDTKKQPTRSEVLRYKLWLEQKYRSPYTGQPIPLAKLFTPAYEIEHIIPQSLYFDDSLSNKVICESVVNKRPYKDNQLGYEFIKKQSGRIVQELSTSNKIVKIFTVDEYKQFVIDNYSNNRTKMRKLMLETIPEEFIARQLNDSRYISKVVKGMLSNIVREEGEEEAISKNIIVCTGGVTDRLKRDWGINDVWNRIILPRFTRLNEITGTTHFTTISTNGHEIPSMPLEMQKGFNKKRIDHRHHAMDAIIIACATRNIVNYLNNESASKNSKISRNDLKTLLCEKTKTDENGNYKWVVKKPWKNFTNDVYCILNDIIVSFKKNLRVINKATNYYTRFKNGEKNIVEQDGTNWAIRKPMHKDTVFGEVNLRKIKTVSLNEAIKNPSRIVEKEFKIKLQSLLSHGYDAKKAKKYFEEEKDAWRDINLSKIEVYYYTKETKDRYFATRKPLDTSFNQKKIEESVTDTGIQKILLRHLEQKGNNPELAFSADGIDEMNKNIVQLNKNKYHQPIYKVRVYEKADKFAIGTRGNKSSKFVEAAKGTNLYFTVYESEKWDDKAGDYKKVRKFATIPLNIVIERLKQGLSPAPADENGNNPKFVLSPNDLVYVPTEKDFKDLKQKNIYKIVSFTGNRLYAVPYPVANSIVDKLEYSQLNKVEFTDDKTSIKEVCIPIKIDRLGNIINIE

SEQ ID NO: 5453 - protein, 1504 aa, synthetic construct
  REGION 1..1504: note = Synthetic
MKNIVGLDLGTNSIGWAVVNGSVNDDGSEQLVKIQASGSRIIPMDAAMIGDFNKGNSISQTAERTRLRGVRRLSERYLLRRERLHRILDILGFLPFHFAQDLDRHGKIVKGKEPKLAWRKNEAGQFEFIFQDSFKEMLEDFKLNHPNLITDDKKVPYDWTIYYLRKKGLTSKISKEELAWILLNFNQKRGYYQLRGEEEEENKNKLVEFYALKVVAVEDSGEKKGKDIWYNVHLENGWVYRRTSNMPLDWVGKTKEFIVTTDLEKDGTPKKDKEGNVKRSFRAPKEDDWSLVKKKTEADIDQTHKTVGAYIYDTLLGNPSQKIRGRLVRTIERKYYKEELKQILEKQKEFHLELQDRALYAACVEELYTINEAHRNNIGNRDFTYLFLEDILFYQRPLKSKKSLIDNCPYEENQGLDKETGEIKSFPVKCIAKSHPLFQEFRLWQFIINLRIYRKDLAQDVDVTNELLKTEEDYVALFDWLNGKKEIDQKAFLKYPVFGLKKEIENYRWNYVQDKPYPCNETRLLMLARLEKCDISIEFLTKENEEALWHILYSVEDKNEIVKALQKFADKHDLNASFVDVFRKFPPFKKEYGSYSAKAIKKLLPLMRMGKYWSEDSIDKGTRKRMDKIITGEYDEKIENRVREKVIHLADVFDFRGLPLWLVCYIVYGRHSEAKEITQWKSPADIDSYLKSFKQHSLRNPIVEQIIIETLRVVRDIWKQVGNIDEIHVELGREMKNPADKRKKMTQQMSENENTNLRIKYLLTEFLNPEYEVENVRPYSPSQQDILRIYEEGVLNSVSDLPEEISDILKKFTETDLKKRPSRSDVLRYKLWLEQKYRSPYTGEVIPLGKLFTPAYEIEHVIPQSCYFDDSFSNKVICEAEVNKLKSNLLGHEFIVKHHGEIVELPFGKKVRIFTVDEYEQFVKDNYSRTRSKMKKLLMDDIPEEFVARQLNDSRYISKVVKSLLSNIVREKGEEEAISKNVIPCTGGVTDRLKKDWGINEVWNKIILPRFQRLNELTGTNKFTTKNVGIQEIPTMPLELQKGFNKKRIDHRHHAMDAIIIACANRNIINYLNNESATAKAELSRYDLQKLLCDKAKTDNNGNYKWVIRKPWASFTQDTYLALENIIVSFKQNLRVINKATNRFLHYNEEGKKIFVKQGKGDNWAIRKSMHKDTVFGEVNLRRIKTVALNEAMKNPQSIVVKDFKRKLLELWNLGFDAKRIKKYFEDNRETWSDINLSKIEVYYFSKDTKDRFFATRKPLDTSFDRKKIENNITDTGIQKILLRHLELKDNNPDIAFSPDGIDEMNRNIIQLNNGKYHQPIIKVRWYEQADKFAVGQTGNKFSKFVEAAKGTNLFFAVYESNILDKKTNTIIKKRNYATIPLNVAIERQKQGLPVAPEDENGNDPIFVLSPNDLVYLPTDDELANGIIAQPLDRGRIYKMVSSSGEQCFFIKHIVANVLVDKFEFSPLNKMERALTGEMIKMICIPIKVDRLGNVLESSSSHKK

SEQ ID NO: 5454 - protein, 1504 aa, synthetic construct
  REGION 1..1504: note = Synthetic
MKKILGLDLGTNSIGWAVVHSDIDRDGNENLLEISSSGSRIIPMDAATLGDFDKGNSKSQTAERTRLRGVRRLLERSLLRRERLLRVLSVMGFLPQHYASQLDRYGKFISDAEPKLAWYKTPDGKYTFLFQDSFQEMLSDFQMFHPELLEKGKKVPYDWTLYYLRKKALSQKVSKEELAWILLSFNQKRGYYQLRGEDEQEDVKKEVKYYALKVVSVEDSGEHKGKDIWYNVFLENGWKYRRASSVPLDWVGKVKEFVVTTDLDENGNPKKDKDGEVKRSFRSPKEDDWGLLKTKTQESIDESGKTVGAYIYDTLLHVPDQKIRGKLVRTIERKYYKEELYKILTKQTEFHAELRDASLLKDCAVELYPQNEAHRNILLSQDFAHLFVEDILFYQRPLKSKKSLIDDCPYESHIYKKDGNLLNTPLKCVSKSHPLFQEFRLWQFISNLRIYQREKMVGGSLKSDVDVTGDFLQSEADYVALFDWMNDRKSVDQKAFLAYKPFGLNKKNQVAYRWNYVEDKSYPCNETRYSISSRLAKAGVAKGFLTGEKETALWHILYSISDKEELVKALKTFAVKNNLDDAFVEAFAKMPPFENEYAAYSLKAIKKLLPLMRMGKYWCKEAIDDKTLSRIDKLLTGECDETIRRRVREKSMHLTELSSFRGLPLWLACYVVYDRHAEAKDITKWESPKDIDLFLSKFRQHSLRNPIVEQVITETLRTVRDIWKQEGSIDEIHVELGREMKNPADKREQMTRRSLKNEDTNLRIKALLMEFINPEFEIENVRPYSPSQQDILRIYEEGALNSASEKELEGISDILKKFRETDVKKRPSHSEVLRYKLWLEQRYRSPYTGKMIPLGKLFTPAYEIEHVIPQSRYFDDSFSNKVICEAAVNKKKDNLLGYEFIKQHSGEIVELGNGNTVSIFTVEEYEQFVKEFYVNNRKKKENLLLEDIPDGFIERQLNDSRYISKVVKSLLSNIVREEGEQDAISKNVIVCTGGVTDRLKKDWGVQDVWNRIILPRFLRLNALSDSSYYTAVSACGNVIPAMPLHLQRGFSKKRIDHRHHAMDAIVIACANRNIVNYLNNASARKGEKISRYDLQRMLCDKVKTDEKGNYKWIIRKPWDTFTQDVYVALQNIVVSFKQNLRVINRTTNHYWRYDEDGKKTLQSQEKGDSWAIRKPMHKDTVHGEVNLRKIKTLSLKEAMKNPVMIVDKVLKRKLMELLHVGFDQKAVSRYFEEHQTEWQGINLKKIEVYYFTKDTNDRYFATRKPLDTSFTQKKITEEVTDTGIQKILLNHLLKNDNDANVAFSPDGIERMNQKISDLNGGKWHQPIYKVRVYEKADKFAVGTAGNKGRKYVEAAKGTNLFFAVYESEIIDKKTGEVIRKRNYASIPLNVVIDRQKKGLSSAPEDENGKLPIFVLSPNDLVYLPTEEEHKSNQVSLPINKERIYKMVSCTGGECHFIPCFVAAPILQTTELGSNNKAQCAWTGEMIKEICIPIKVDRLGNISFK

SEQ ID NO: 5455 - protein, 1504 aa, synthetic construct
  REGION 1..1504: note = Synthetic
MKNIIGLDLGTNSIGWSVVNGIINEDGSEQLVKIEASGSRIIPMDAAVLGDFDKGNTISQTAERTRLRGVRRLCERYLLRRERLHRILDLLGFLPPHYAQELDRYGKIIKGKEPKLAWCKNDTGQFEFIFQDSFREMLEDFKRNQPDLMTDDRKIPYDWTIYYLRKKGLTSRLSKEELAWILLNFNQKRGYYQLRGEDEEENKNKQVEFCALKVVAVEDSGEKKGKDIWYNVRLENGWIYRRTSNVPLDWVGKIKEFIVTTDIEDDGTPKKDKDGNVKRSFRAPKEDDWTLIKKKTEADIDQTHKTVGTYIYDTLLQKPDQKIRGGLVSTIERKYYKQELQQILAKQKEFHPELQDRTLYAACIEELYSINEAHRNNIANRDFTYLFLEDVLFYQRPLKSKKSLIDNCPYEVTHGRDKATGELKSFPVKCIAKSHPLFQEFRLWQFITYLRIYKKELKQDVDVTNEFLKTEEDYIALFDWLNDRRNIDQKAFLKYPAFGLKKNAEHYRWNYVQDKLYPCNETRSLMLLYLEKSAVSADFLNKENEEALWHILYSVEDKHEIAKALQSFAYQHGLDDRFVDVFQKFPPFKKEYGSYSAKAIKKLLPLMRMGKYWNESAIDNVTCERINKIITDECDEKIGNKIRQKAIHLADISDFKALPVWLACYIVYGRHSEAKEITKWETPADIDSYLQSFKQHSLHNPIVEQIITETLRTVRDIWKQVGHIDEIHIELGREMKNPADKRAKMTQQISENENTNLRIKYLLTEFLNPEFEIENVRPYSPSQQDLLRIYEDGVLNSVSELPEDITGILKKFAETDIKKLPTRSDILRYKLWLEQKYCSPYTGEMIPLGKLFTPAYEIEHVIPQSRYFDDSFSNKVICEAEVNKLKDNLLGFEFIKKHYGEKVELAFGKPVKIFSVGEYEKFVKDNYSHTRGKMKRLLMDDIPDEFITRQLNDSRYISKVVKTLLSNIVREEGEEEAISKNVIPCTGGVTDRLKKDWGVNDVWNKIILPRFQRLNELTGTNKFTTRSIGNHEIPTMPLELQKGFNKKRIDHRHHAMDAIVIACANRNIINYLSNESATAKAKLSRFDLQKLLCDRDKTDDKGNCKRVIKKPWESFTQDTYLALEDIIVSFKQNLRVINKATNHFLHYNEEGKKIYAQQEKGDNWAIRKPMHKDTVYGEVNLRRIRTVSLNEAIKNPQCIVVKDLKKKMLALLGLGFDAKKIKKYFEDNKDIWRDMNLSKIEVYYFSKDTKDRFFAVRKLLDTSFDRKKIESSIADTGIQKILLRHLELKDNNPNIAFSPDGIDEMNRNITQLNNGKAHQPIIKVRVYEKGDKFAVGQTGNKSSKFVEAAKGTNLFFAVYETDVIDEKTNNVIKKRSYATIPLNVAIERQKQGLPVAPEDENGNEPIFVLSPNDLVYLPTADDLANGVIAQPIDKNRVYKMVSCTGNEGHFIPSKIANPILQTTELGSNNKAQRAWSNEMIKEICIPIKVNRLGRILKIGSLNIG

SEQ ID NO: 5456 - protein, 1503 aa, synthetic construct
  REGION 1..1503: note = Synthetic
MKRILGLDLGTNSIGWALIQHDFENKDGRIQDIGSRIIPMGQDILGKFEAGQSISQTAERTDYRGIRRLYQRDKLRRERLHRVLNLLGFLPQHYADAIDFDRKLGQFKPETEVKLNYIKNADGKYEFIFKDSFDEMLHEFKATQPHIFQANHKGKTPQIPYDWTIYYLRKKALSKAISKEELAWVILNFNQKRGYYQLRGEDLDEDKNKQFVQLKVKEVIDTGEKVKGKSLYDVLFENGWKYDRQITKTEDWIGRTKEFIVTISTLNSGETKYSYKAVDSEKDWAAIKAKTERDIENSQKTVGEFIYETLLDRPNQKIRGELVKTIERKFYKEEFKKIISKQVSLQPDLFSRELYQACIEELYPRNEAHQSQLKDQDFIHLFSEDIIFYQRPLKSKKSDISACPYEFRVFKKKDIETGETEIVHQGVKAIPKSHPLFQEFRLWQWLHNIRIHQKNRTTGDKIEIDVDITSELLKTEEDWSNLFDFMTSKREVEQKHIIKYFIDKGLLSNNAKDNYRWNYVEDKKYPAYDTRSQFISRLKKIKGIEPTDFLTEKTCLGKNNSGQILSREEQLWHIIYSVTDKKEYQSALGKFAQKHGIDVDPFVEAFIKFPPFDSDYGSYSKKAINKLLPLMRRGKYWDENAILDTSKERIDEILERVNSLKLKEGYSKKELAEKLEKVSDDDIPKQVVKSFVPLSNQPYTGLNTYQACYAVYGRHSEVGDIQYWRAAEDIDLYLKGFKQHSLRNPIVEQVVCETLRVVRDIWKKQRSEDPHFQFDEIHLELGREMKNSAEKRKQLSDKINENENTNHRIKEILKELTNDPMIEGDVRSYSPGQQEILKLYEEGIYQNPNTTYDTVSEDEIKKIRRNNNPSKSDILRYKLWLEQGYISPYTGKPIQLSKLFTTAYQIEHIIPQSRYFDNSFGNKVICESAINEDKDNKTAYEYLKAKGGSIVDGHLLFKLDEYEAHVSRYFKRNKTKLKNLLSEDIPEGFINRQLNDSRYISKLVKGLLSNIVRENNEKEATSKNLIPVNGAITSKLKNDWGLNDKWNELITPRFQRLNELTKSKNFGFWDKDINAYRIQVPDEISKGFNKKRIDHRHHALDALVTACTTRNHTHYLNALNAEKKNHNLRSKLLIQNEHGHYTKTFQMPWSSFPVEAKNKLETTIISFKQNLRVINKANNKFWSYKDVNGNLNIGKNGKPEKKLRKQNMGDHWAIRKSLHKETVSGIVNGIDVPKDKIAVSVRTSLTEIKTQKHIDKIVDSRIRNIIIPNHLKNYIDEKGKINFPEAFSPAGIEDLNENITHLNEGKPHQPILKVKLYEVGNKFQIGETDNKSKKYVEAAKGTNLFFAIYWDEKKQKRTFETVPLNEVIEHQKQVAHLPKSQRTPIQSNPNKGKLLFTLSPNDLVYVPTEEENENPGLIDFSNLNKDQASRIYKMVSSTGNECHFIQASIASLIKKYDTKSRFGEMGSLNKLEITIDIDAPIRIKENCIKIKVDRLGNIQKSIL

SEQ ID NO: 5457 - protein, 1503 aa, synthetic construct
  REGION 1..1503: note = Synthetic
MKNILGLDLGTNSIGWAVIKASTNEEGKEQLHNIDSAGSRIIPMDAAILGDFDKGNSKSQTADRTQSRGIRRLYERSNLRRERLHRVLSLLGFLPAHYARYIDRYGRFIDYAEPKLSWDKDEQGHPVFIFQDSFDEMLNDFRQFQPALVDNGRKVPYDWTIYYLRKKALTQKIRKEELAWILLNFNQKRGYYQLRGEETNTSTTAKSRQYFDSQIVIDIIDTGQLYKGMKVLTVVLEDGSKGKIFKKEIPDWIGQKKDIIASVDIDKDGNDKYDENGELSCRFKIPSEQEWDEKWELIKTKTQHDLDVSDKTVGAYIYDTLLQMPCQKVRGKLVRTIERKYYKKELYQILEKQKEFHEEFRNRDLYLACINELYSLNEAHRNEIASRNLVYLFIEDILFYQRPLKSKKSLIADCPYEEYTCTNKETGEIEHFGVKCIAKSHPLYQEFRLWQFLANLRIYQKEQVDNGKTCYDVDVTSDFLKTEDDYTELFDWLCEQKSIKQDSILKCPVFGLKKNDINKYRWNYVEDKSYPCNETHALLLEWLNKAGIASSFLNSTTEEDLWHILYSVSDKKELEKALNKFAERYGLAAKFVEVFQSVPPFEKDYGAYSAKAIKKLLPLMRMGKYWSEDNIDEQTRRRIDKMISGEYDDTIRNRVREKAIHLTDVTSFRGLPLWLVCYIVYNRHSEARDVKKWTEPADIDDYLRKFKQHSLHNPIVEQIILETLRTVRDIWRQVGHIDEIHVELGREMKNPKDKRAKMTRQMQENENANLRIKAMLVEFMNPEFEIENVRPYSPSQQELLRIYEEGVLNSVSEISDEIATIIKKFNESDIKKRPTTSEVLKYKLWLEQKYRSPYTGEMIPLGKLFTPAYEIEHIIPQSRYFDDSFSNKVICESEVNKLKTNLLGHEFISKHHGEKVLLANGKCINVFSVEDYERFVKDNYSRNPVKLKKLMMDDIPEQFIARQLNDSRYISKLVKSLLSNIVRESDEQEDISKNVIVCTGGVTDRLKKDWGINDVWNKIILPRFQQLNKLSGNTCFTSVSANAHIIPTVPLEFQKGFNKKRIDHRHHAMDAIVIACAGRNIVNYLSNESACKNSKISRYDLQRLLCDKQKVDAQGNYCWMIKKPWDSFTQDVYAVLRNVIVSFKQNLRVINKTTNYYQRYIDGKKKMVKQKGGDNWAIRKSLHKETVFGEVNLRDIKTVALKDAIKNPNAIVEKDLKKKLKELLRLHFNEKQIKGYFEEHKDVWQDVDLKRIKIYYFSNETKDRFFASRKPLDSSFNQKKITESVTDTGIQKILLRHLEANGNVADNAFSPEGIEEMNKNIVLLNNGKWHQPIRKVRVYEKADKFAVGQKGNKGSKFVEAAKNLFFAIYETEQEDPKTGEITRKRSYATIPLNVVINRLKRGLSPAPEDKNGNSPKYVLSPNDLVYLPTQEELKSGHICYPLDENRIYRMISCTGGRVYFLPYFVASMIVDKYEYKDEFTKDKQSIKEICIPINVDRLGNLIK

SEQ ID NO: 5458 - protein, 1503 aa, synthetic construct
  REGION 1..1503: note = Synthetic
MKRILGLDLGTNSIGWAQINLDFKNKKGGITGIGSRIIPMDAAELGKFDSGQTISQTADRTGYRSKRRLYQRDNLRRERLHRVLNVLNFLPQHYSESIDFDKKVGQFKPDTEVKLPYRIDDNGEFHFVFQDSFNEMIEEFRFKNPTLFYARENGEETKVPYDWTIYYLRKKALTQKITKEELAWILLNFNQKRGYYQLRGEEEADKNKKFEALKVSSVIDSGQKVKGNILYDITFENGWEYDSQITKKEDWLDKTREFIVTTTTRKDGSLKRSYKKVNSEEDWLAIKEKTQNEVDVYNDKNQTYGIGSYIFDTLLNNPTQKIRGKLVKTIERKYYKDELQKILDKQIEIHQDLFTDESLKNCIEELYPRNEAHQNLLLAKDFKHLFVEDIIFYQRPLKSKKSSISDCPYEVRFYKKGEELKKQSLKCIPKSNPIFQEFRLWQFIHNLKIYEKAGDKEGMPLKDEEVTTQFLSNDDDYTSLFEKLNNSKEINQKQFLSHFKLKETTHHWNFPEDKKYPCNDTRAQIANRLSKINGVNVDSFLTSDMLQSLWHLIYSVTDKKDYEKALHTFAEKNSLSIDGFIENFKRFPPFESSYGAYSEKAIKKLLPLMRMGNHWNISNITTEVQERIDSIASRLNAVDYNVEKIEAIADDDVPMRLLKSFAKEKNKENPLKGLNTYQACYAVYNRHSEIGDVLQWKQPQDIDTYLTSFKQHSLRNPIVEKVILETLRVVRDIWTTYGEEEIINGKKQYKPLFDEIHVELGREMKNDKKTRERISKSNTERENTNERIKAILEELKSDPSVTDDIRPYSPSHQEILKIYEDGLFSSLKEVDNSIEKIRKNNKPTKGEIIKYKLWLEQGYISPYTGKIIPLTKLFSTAYQIEHVIPQSRYFDNSMNNKIICESAVNEEKDNKTAYEFLKERGGSLVDIGHGNTVQLFTIENYEKHCQTYFRKNKTKLELLLSEDIPEGFINRQLNDSRYISKVIKGLLSNIVREDGELEATSKNLIPVNGAITAKLKNDWGLNDKWNEIIAPRFKRLNELTKSQDFGYWDEKINAFRIQVPKELERNFSKKRIDHRHHALDALVIACTTRDHINYVTSLNTSRKNHKLVNKLRATKTITDNKGKTRTVAKEYHKPWEGFTAAAKTSLEKTIVSFKKNNRVMKKANNKFWSYKNEYGNVNLNKNGKPIKKLRAQIKGQNRSIRKPLHEETISGLVHLPWVKIENGKFTTATRKELDKSFSLKKIEKITDTGIQKILRNYLTQKKFEELDKNGNVVYNTEIAFTQDGIEEMNKSIKTFNNGKNHKPIYKVRIFEKGSGRFALGSKGINDKKYAQGAPNLFFNIYKNGDSKYYETVPLNEVILHQKNNTILPIKERTNVPIKNVIIIKGKETIVDFVDCLSPLDLVYIPTNEELENLEDIDFENLNIEQLKQVYNVNDFSGVTCYFTPNTLATSICPKEVDLKYDEKKKKTTGSFDTKTASLNGNSIKERFIKLNIDRLGNVAKVGI

SEQ ID NO: 5459 - protein, 1501 aa, synthetic construct
  REGION 1..1501: note = Synthetic
MFSQRNNPYCELLSDTNIEYILFGQIRKPVKAIIYIYYFRAINLTIMGKTILGLDLGTNSIGWALIQNNFENKEGKIRGMGSRIIPMGQDVLGEFGKGNSVSQTADRTRFRSTRRLRERHLLRRSRLHRVLNVLGFLPEHYTKELDFENKVGQFVEETEPKIAWKKNEIGKFEFLFQQSFHEMLEDFKANGLYIKIPYDWTIYYLRKKALTEKISKEELAWLILNFNQKRGYYQLRGEGEDVNDNVKEFVIALTITNVEKGEVDKKNDKRTWYKMALSNGWEYSATFTTEPKWENTEKEFLVVEEYDDNGNIKIVKDKKSDTTGKEKRRITPLPTFDEINLMSKKDQDKIYGKIKARTELTINNSRTTVGTYIYDTLLQNPKQKIKGKLVRTIERKFYKTELKQILEKQKEFHPELQSEDLYNDCVRELYRNNDAHQITLSKKDFVHLLLDDIIFYQRPLRSQKSSISNCTLEFRKYKDANGVEHTEYLKAIPKSNPYYQEFRIWQWIYNLNIYKKDDDTNVTQGFLGTAADFENLFDFLSNRKEVEQKAVMKFLLEQKNFKGRMLNTEVEKYRWNYVEDKKYPGNETKTMIATRLGKVENVPANFLTREIEQQLWHIIYSVNDKAEYEKALKSFAAKNNLDENSFVDGFRKFPPFKSEYGSFSEKAIKKLLPLMRLGKYWNWGEIDTLSKDRILKIINGEYDENIKDKVREKAINLTSENHFQGLQLWLAQYIVYGRHSEAAMAGKWNSAGDLEDFLKEFKQHSLRNPIVEQVVTETLRVVKDIWQQYGNGVKDFFSEIHIELGREMKNTAEDRKKITNMVTENENTNLRIKALLAEMMNDKEVENVRPFSPMQQEILKVYEDGVLNSDIEIDDDILKISKTAQPSSSDLKRYKLWLEQKYRSPYTGAIIPLNRLFTPEYEIEHIIPQSRYFDDSFSNKIICEAAVNKLKDNYIGLGFIKQFGGTIVECGMGKTVTVLKQGEYEDFIKKHYAKNRGKRTKLLLEDIPEKMIERQMNDTRYISKYISGILSNIVRTEDGTDEGINSKNIVPGNGKITTQLKQDWGLNDVWNELILPRFERMNTLTNSKDFTAWNENYQKFLPTVPIEISKGFSKKRIDHRHHAMDALVIACATRDHVNLLNNQSARSDMKRYDLQNKLRRKEKYFNQKEGREKDAFKEFYKPWETFTQEARAALENIVVSFKQNLRVINKATNHYEKWVEKDGVKTKQQVKQEGTNWAIRKPMHKDTVSGKVHLPWIKVPKGKILTATRKSLDTSFDLKTINSVTDTGIQKILKNYLAEKGSPELAFSPEGIEDMNKNITKYNDGKQHQPINKVRIFELGSKFPLGQSGNKKDKYVEAAKGTNLFFAVYEDENGKRGYNSVPLNEVIERQKQGLSVVELRSHRDFYLCPNDLVYVPTEDELENPTAIDFSQLSNEKRKNIYKVVSFSGNQIFFVRQDIATSIVNKAEFSTLNKMERAIDGSMIKENCIKLKVDRLGNISKA

SEQ ID NO: 5460 - protein, 1501 aa, synthetic construct
  REGION 1..1501: note = Synthetic
MKKILGLDLGTNSIGWAIINQETINDKDIVNGIECTGSRIIPMDAATMGNYDKGNPQSQTAERTKFRSTRKLIERSHIRRERLNRVLMTMGWLPEHYSDSLDRYGKLSKGTEPKIAWKKNGNGDYEFIFKDSFNEMLADIKTAHPDMAKKGMKVPYDWTIYYLRKKALTQPVTNQELAWILHSFNQKRGYYQRGEEEEQQPNKKTEYLSLKVKEIRETREVKGSDKWFELILENGLVYKRTFKEKPDWTGKTLELIVTTDLDKNGNPVIKEDGEPKRSIRAPKEDDWTLVKERTQSDILKSGKTVGCYIYDTLIYKPDIKIRGKLVRTIEREFYRDELEKILTRQKEFNPDLRNKELYNECIGVLYPNNDTHRREIANRDFTYLFINDIIFYQRPLKSKKSLISDCPYEERIYINKTTREKLSSPIKCIPKSHPAYQEFRLWQFLSYLKIYEKERTEFGKTQTDIDITDILLPDNESYAALFKKLNDEAEIKQDKILKYFPQLKKNIKNFRWNYPEDKTYPGNTTRAEMLKRLKKANLDSDFLTTEQETALWHILYSVNDKVELGKALHTFANKHGIEEEPFLKEFVKFPPFKSDYGAYSFKATNKLLSLMRRGCYWDEENIDCNTKERIEKIISGEYDPEINDCVREKTINLNGISDFQGLPTWLACYVIYGRHSEIKDITKWEKPSDIDNYLKHFKQHSLRNPIVEQVVLETLRTVRDIWEQVGRIDEIHIELGREMKNSASERKRISEQISKNEITNLRIKAMLTEFLNPEFEIDNVRPYSPTQQEILKIYEDGVLNSGIELDEEVKKFLKSFDKAENRPTRAEFLKYKLWLDQKYISPYTGQPIPLSKLFTSEYEIEHIIPQSRFFDDSLSNKVICEAKVNSEKGARLGHEFIKGCHEQIIDLGFGKTVKILSIEAYEEHVRKNYGHNKAKQKKLMLDEIPDTFIERQLNDSRYISKLVKTLLSNIVRENDEAEAISKNVITCTGQVTDRLKHDWGVNDVWNGIILPRFQRMEELPLGKKFTATNTNGKLIPYMPLEYQKGFSSKRIDHRHHAMDAIVIACANRNIVNYLNNESARSDAKISRYDLRNLLCDKKKQDSTGNYAWIIKIPWNTFIPDMRKALEGIIVSFKQNLRVINKSSNHITKYVDGQKKRVPQSKGDNWSIRKSLHKDTVFGLVNLREKKTVSLSEALKKPDRIVDKALKHKIKEFKTAGKTDKDIKNFLKNGPDKVEIYYFSEEKNFGKENSRHYYATRNTILSLGMDKLSCEKAKDTINSITDSGIRKILTNHLEANGNDPSKAFSADGIDEMNKNIILLNGGKNHKPIYSVRKYEEANKFAVGEIGCKSQKFVEADKGGNLYFAVYKKDDNSRSFRTIPLNEVIDRLKNKMSPVPGTDEMGNRLIFWLSPNDLVYLPTADEVENGRVTLPLDKDRIYKMVSSSGTQCCFILHSVAKTIVEKQEFTRHNKSERAITGEMIKETCIPLKTDRLGNIIDFDGRIL

SEQ ID NO: 5461 - protein, 1500 aa, synthetic construct
  REGION 1..1500: note = Synthetic
MEMKHILGLDLGTNSIGWAVIRAHQDADGHTTLQDILAAGSRIIPMDAATLTDFDKGNAKSGTAERTSFRSMRRRRERQLLRRERLHRVLMLLGFLPQHYANALTRYGEFADNRECKLPWVKDESDGKYHFLFQDAFHEMCEDFRQSAPQWVADGKKVPYDWTLYYLRCKALSRKISKEELAWILLSFNQKRGYYQARDEEDEVTTNKLEEYYAGKVVRVDDTGERKGKNVYYDITLENGWVYRYAARIYPDWVGQVKEFIVTTTLNPDGTPKTDKAGEVKRSFRMPKDDDWTLIKKKTERDIDRSQETIGQYIYHALLKDPSQKIRGKLIGTVERKYYKDELRRILDRQIQFHPELRDRELYYACLQELYPSNVAFRNTLVNRDFTYLFLDDILFYQRPLKSKKSQISDCPYEEHFYTDKETGERISVPVKCIAVSHPLYQEYRLWQFIQNLRIYCREARIDGNLMIDWEVTDELLQTEEDKTALFDWLNDKESVKQPELVAFLLGGKANKKQIKAYRWNYMDDDTKGYPCNETRASLLKYLREAQTDSSFLTREREEALWHILYSISDKGELKSALGKFAVKHGLDERFVTVFSKFPPFKKDYGSYSAKALKKLLPLMRMGHHWQEASFIPSTRERMEKFINGEYDDSIDKRTYEKLESLTEVSQYRGLPGWLACYVVYDRHSEGRDIEIWTSPSDIDSYLAQFKQHSLHNPIVERVVLETLRTVRDIWKQVDHIDEIHIELGRNMKLPADKRRQMTEQAWKNEQTNLRIKALLLEFARPGYDIENVRPYSPYQQDQLRIYEEAVLGANECPDDISAILKKFNGLNPPTSAEVLRYKCWLEQKYRSPYTGRTIPLSKLFTPAYEIEHIIPKQRYFDDSFSNKVICESEVNKKKGAMLGYEFIKSYHGASITLNMGGTASIFSVEAYENFVKEHYAHNRGKMKKLLMDDVPDSFISRQLNDSRYISKLMKSILSNLVREEGEKEAISKNLIVCTGGITDRLKKDWGIHDVWNDIIFPRFKRLDEMDSSHTYITLNTHRHPIPSMPLEFQRGFSKKRIDHRHHAMDAIVIACATRNIVNYLNNESARHDAKTSRMDLQRLLCTANRKLIDKPWKTFTQDTCKVLEDMIVSFQRTLRIINKTKNYYLRFEDGKKRRVLQTKGENWAIRKPLHKETFYGEINLRRIETLSLNKALERIPDIVERDLRKKLSELLSLGYNAKRIKGYFEEHKEEWSDVNLSKIKAYYFTKQKNKRYFAARTELDTSFNKDKIENKIADTAIQKILLQHLEAYGNDAEQAFSPEGIDTMNRNIRQLNGGRSHQPIYKVRVYEEATKFAVGRRGNKSTKFVEAAKGTNLFFAIYEISQVDGNGNRQTSRTFSSIPLNVAVERLKQGLPPVPEDEEGNAPKYVLSPNDLVYLPTERELKRREIAMPIDKSRIYKMVSCTGKDCFFIPANTAVPIVDRYEYSSMNKIGRALTGEMIKEICLPLKIDRLGQIIEISTF

SEQ ID NO: 5462 - protein, 1499 aa, synthetic construct
  REGION 1..1499: note = Synthetic
MKKILGLDLGTNSIGWALIKQDFENKQGKILGLGSRIIPMSQDILGEFERGNSISQTAERTRLRGTRRLRERHLLRRERLHRILNTLEFLPQHYANKIDFNARLGKFLPETETKLVYDDNGNFIFKESFEEMLTDFLKHQPELMNRKNKKGEDAKIPYDWTIYYLRKKALTKKIEKEELAWLLLHFNQKRGYYQLRGEETDNKPNKLEDFYSLKIVDVTADEPQKGKNEIWYNIILENGWIYRRASKLPLFDWKDKIRDFIVTTDLNEDGSIKKDKEGKEKRSFRLPKEDDWQLLKKKTENDIEKSDKSVGEYVYDALLQKPNQKIKGKLIRTIERKFYKSELEQILKKQIELHNSLQDRNLYQQCVEELYPHNLHHQSTLLNKDFLHLIVEDILYYQRPLRSQKSSISNCPLESRTFILEGVKKTEPIKCISKSHPLYQEFRLWQWISNLRIINRGNDANETENHLQTIDDFTALFDFLNERKEIDQQSLLKYFKLKGSNYRWNYVEDKKYPCNETHSMIVSRLEKVNDVPQGFLTKKTEEELWHIIYSVTDKIEYEKALKSFAHKNGLDLVSFYDAFKKFPPFPSNYGSYSAKAIKKLLPLMRMGKYWNEENIYEKTKDRITKIINAEVDETIQNRVRDKAINLTDTNHFQGLPEWLAKYVVYDHHSEKSDLGQWKTVSDLEEYLKSFRQHSLKNPIVEQVITESLRTVKDIWQYYGDGVEGFFDEIHIELGRDMKNPAVERKRITEQVTKNENTNLRIKALLAEMLNDNSVENVRPYSPTQQDILKIYEDFVLNAAIEIPEDIEKISTQAQPTSSELQRYKLWLEQKYRSPYTGEIIPLNKLFTPAYEIEHIIPQSRYFDDSFSNKVICEAAVNTLKGGQTALQFIQNHYGQIVEVGMGKTVMVFTEDAYTSFVKQYYDKSRTKKNKLLALDIPEKMIERQMNDTRYISKFIMQVLSNIVRTDKDDDGANSKNILASNGQITTKLKQDWGMDAIWNELILPRFERLNQITNTTHFTVYNEKYQKYLPAVPLELQRGFQKKRIDHRHHAMDALVIACATRSHINFLNNQNALDKNKSIEQKQQGRYNLRKTLCDKKYNDGSSENYKWVFKQPWVGFIPEAKSKLEQVVVSFKQNLRIINKTVNQHDIIIKGGKKDKLKQQKGESWAIRKPLHKDTVSGSVSLRKTKPVSLSTTFESPENIIDKPLRKYIKKLIAEGLDKKKLVKHFKENNNQLYGQDISKVGIYYWENDNVASRVSLDITFNKARIESITDTGIQKILLKHLENSKDNPEIAFSPEGIEEMNKNIVVLNNGKFHQPILKVRTYETKGNKFAVGQSGNKKTKFVEAAKGTNLFFAIYQDENGKRSFETIPLNIVIERQKQKLLSVPESNVDEQKLLMFLSPNDLVYVPTKEEREHISNINFSNLDKEHVKRVYKMASSTSYQCFFIRNDIATSIVNKVEFSALNKTEKSVDDIMIKEFCIKLSIDRLGNIKPVFNTQI

SEQ ID NO: 5463 - protein, 1499 aa, synthetic construct
  REGION 1..1499: note = Synthetic
MKHILGLDLGTNSIGWAVINSNFDEATQKEQLKGIEAAGSRIIPMDAAQLGDFNKGNTVSQTANRTQYRSTRRLYERKKLRRERLHRVLQLLGFLPSHYAGQLDRYGKFIANSEPKLAWEKGANNLPYFIFQKSFQEMLKDFSQEDRCTKKVPYDWTLFYLRKKALTQKIEKEELAWILLNFNQKRGYYQLREEEAEKSTSKTRQYFDSQIVIDIVNTEETYKGLKIFTLTLANGEKGKWYGKNIPDWKGQKKEIIVSIDLDKNGNDKCDENGEPVRHFKIPTEKEWEEQWGLVKAKTEKDLNTSKKTVGTYIYDTLLQTPDQKIRGKLIRTIERKYYKDELYQILTTQEKFHPELRDENLLQSCIEELYHNNEAHRNTISKYSMSKLLVEDVIFYQRPLKSKKSLISNCPYEEHTYVNKETGEIHTASVKCIAKSHPLFQEFRLWQFLSNLRIYQKEGILNGKFTTDIDVTNEFLKNADDYTNLFDWLNQKKEIKQEAFLRYPPFGLKKNVANYRWNYVEDKTYPCNETHSRILLYWEKAGIDQSILTTDIEEKLWHILYSISDKNELQKALQHFADKNKLEDKFADIFQQIPPFKKDYGSYSAKAIKKLLPLMRMGKYWHLESIDNATLTRIHQILNGEMDESTASRIKEKYIHLDNFSSFQGLPTWLACYIVYNRHSEIKDNTKWKQPSDIDAYIQSFKQHSLHNPIVEQIIMETLRTVRDIWKQIGHIDEIHVELGREMKNPADKRKKLTQQIQENENTNLRIKALLTEFANPEFEIENVRPHSPSQQDLLHIYEEEVLNESAKNMPEDIATILKKFNETDAKKRPSTSDVLRYKCWLEQKYRSPYTGAMIPLGKLFTPAYEIEHVIPKSRYFDDSFTNKVICETAVNKLKDNMLGYEFIKNHSGQIIELGFGQKIQIQTVEAYEQFVKEHYSYNPVKMKKLLMEDIPEQFIQRQLNDSRYISKFIKSLLSNIVREEGESEATSKNIIVCNGSITDRLKKDWGVNDVWNKIILPRFLRLNEITNSDHFTTTNTNNKIIPTMPLALQKGFNKKRIDHRHHTMDAIVIACANRNIVNYLNNESASKNAKISRMDLRQILCKKTEPDALGNYQWIINKPWETFTQDVYAVLANIIISFKQNLRIINKTTNHYFRYQNGKKVQCVQEKGDNWAIRKPMHRETFYGEINLRKVNTVSLKVALENPQRIVEKDLKKKIKELLQQGLSEKQIKKYFEENNDIWQDVNLKKIQFYSFTKERKERFFASRESIDTSFNQKKIEKQVSDTGIQQILLRHLRQNNNDPNLAFSPEGIEWMNKNIISLNNGKWHQPIYKVRIYKQATKFAIGQTGNKTTQFVEAAQNTNLFFAMYETDHNRSFASVPLNVVIERLKKGLPPTPEDSKGNLPKYVLSPNDLVYVPTKEEMENGHINQPIQKNRIYKMVSCTEGECHFIPYFVAKPIIQTIELGSNNKAQKSWQDEMIKETCIPIKTDRLGNIITSISL

SEQ ID NO: 5464 - protein, 1499 aa, synthetic construct
  REGION 1..1499: note = Synthetic
MKHILGLDLGTNSIGWAVINAIKEENTQKEQLIGINTAGSRIIPMDAAQLGDFNKGNTVSQTANRTQFRGVRRLYERKKLRRERLHRILQLLGFLPKHYASQLDRYGKFIANSEPKLAWTTNTHEPSYFIFQSSFQEMLNDFLQNNNQVKKVPYDWTLFYLRKKALTQKIEKEELAWILLNFNQKRGYYQLREEETEKASSKTRQYFDSQIVTDITDTGQIYKGLKIFTITLENGEKGKFFSKNMPDWKGQKKDIIAIIDLDKNGNDKYDENGELSRRFKIPTEQEWEEQWELIKTKTQKDLDTSHKTVGAYIYDTLLQTPSQKIRGKLIRTIERKYYKDELNQILKKQEEFHPELRDSNLLEACIEELYPNNEAHRNAIAKYSISQLLIEDILFYQRPLKSKKSLISNCPYEEYTYTNKETGEICTSSLKCIAKSHPLFQEFRLWQFISNLRIYQKEGTINGKFTTDIDVTNQFLKTEDDYANLFDWLNQKKEIRQDTFLKKPAFGLKKNIANYRWNYVEDKTYPCNETHYKILSYWEKAGIEQSALTSEIEEKLWHILYSISDKNELRKALQHFADKNYLSDKFADTFQQIPPFEKDYGSYSAKAIKKLLPLMRMGKYWHLESIDNATLTRIHQILNGEMDESTASRIKEKYIHLDNFSSFQGLPTWLACYIVYNRHSEIKDNTKWKQPSDIDAYIQSFKQHSLHNPIVEQIIMETLRTVRDIWKQIGHIDEIHVELGREMKNPADKRKKLTLQIQENENTNLRIKALLTEFANPEFEIENVRPHSPSQQDLLHIYEEEVLNESAKNMPEDIATILKKFNETDAKKRPSTSDVLRYKCWLEQKYRSPYTGAMIPLGKLFTPAYEIEHVIPKSRYFDDSFTNKVICETAVNKLKDNMLGYEFIKNHSGQIIELGFGQKIQIQTVEAYEQFVKEHYSYNPVKMKKLLMEDIPEQFIQRQLNDSRYISKFIKSLLSNIVREEGESEATSKNIIVCNGSITDRLKKDWGVNDVWNKIILPRFLRLNEITNSDHFTTTNTNNKIIPTMPLDLQKGFNKKRIDHRHHAMDAIVIACANRNIVNYLNNESASKNAKISRQDLRQILCKKTKTDNLGNYQWLIDKPWDTFTQDMYSILSNIIVSFKQNLRIINKTTNHYIHYENGKKVNCSQKQSDSWAIRKPMHKETVYGEINLRRTTTATLKAALENPQRIIEKDLKKKIKELLTQGLNEKQIKKYFEDNKDIWQEINLKKIPVYYFTKETANRFFACRESINTTFNKKKIEEKVADTGIQQILLRHLEQNGNNPEQAFSPEGIEQMNKNIMSLNNGKFHQPIYKVRTYEQADKFAVGQTGNKSTKFVEAAKGTNLFFAIYETAHKRSFASIPLNVVIERLKKGLSPAPENEKGNLPKFILSPNDLVYVPTKEEIENGHINQPIQKDRIYKMVSCTGNQCFFIKSNVANTIIDKYEFSPLNKMERAITGEMIKETCIPIQTDRLGNIITPISL

SEQ ID NO: 5465 - protein, 1499 aa, synthetic construct
  REGION 1..1499: note = Synthetic
MASKNILGLDLGTNSIGWAVVNENAGAKSIVAAGSRIVPMDAALMGDFESGNSISQTHDRTMARGVRRLYERRALRRERLNRVLSILGFLPPHYAAQLNRYGQLNKGAEPLLAWSTQNEKNTFLFQSSFEEMVQDFASSQPALIANGKKIPYDWTIYYLRKKALARPITPQELAWILLQFNQKRGYNQARGEEEETKPNEKKELLTLRVVDVQDTGEVFKGRTWYNVILENGWIYKRQSAYPLDWVGKKKDFIVTTKLNDDGSEATDKESNVKRSFSAPKEDDWGLRKIKTEHDIAQSGKTVGEFIYDALLQNPNQKILGQLVRVVDRKFYKDELYRILEVQKQFIPALQDKALYQSCIEALYPQNEAYRNSIAGKDFTYLFVQDIIFYQRPLKSKKSLINECPYEYHTYQDENGELHRRYLKCISKSHPLYEEFRLWQFVENLHIYREDANGIGKTECTTEYIADKAKLIEWLLQQKELTEASLLKQLVNENTAGLSWNYVSDKKYPAAPVTALIKSVFVEAGGELKDGEMCRKELEHIWHILYSVSDKTQLTQALTHYAHAHQLSEVFVNKLSKQKPFEDDYGAYSEKAIKRLLNLMRCGKYWKECSIDEDTHTKDRIERILTGEVNENISDQVREKLKDMNGIADFQGLPLWLAEYVVYDIRKNDTKWESPDDIDKYLQSFRLHSLNNPIVEKVVMETLRTVRDIWRQEGHIDEIHIEMGRELKQNAEQRKKTLNRQIDNEKANQRAKWLLQEFMNPDMNIEGVRAYSPNQLELFRIYEDGALSHHPADDEIQRLINDLSGIKQPSASDVKRYRLWIDQNYISPYTGQPIPLSKLFTHAYQIEHIIPQSRYFDDSMSNKVICEAEVNARKDRMLAHEFITKCGGEQITLSGGKVVSVLSLKAYEELVATTYKNNRTKQEKLMLDDIPEKFIARQMNDSRYISRLILGLLSNIVREKNAKGEYEPEMTSKNVVVCNGATTTRLKKDWGINDVWNRIVLPRFERLNTLQNTTIFTTQTASGHTIPNMPLELRKGFEMKRIDHRHHAMDAIVIAFTTRNHVNLLSNEAALDKNERARYDLQKLLRKQEIWTDSKGQHIKFTDFIVPYPGFQKDVQTTLENIIVSFKQNLRVINKSNNRTMRFVDGKKRLEHQTKGDNWAIRKSMHKDTVFGEINLRRKKVANLSYALQHIDDVVEKDLRLKLRELVAEGKDEKQIKKYFAAEPDTWADIDLKHIEVYYFTRDTKERYFAVRTAIDDSFTADFIRNKVTDEGIQKILLAHLERCGGNPQVAFSPDGLEQMNADIQMLNNGVPHKPIYKVRKYEKADKFAIGEEGAKAKKFVEADKGTNLFFAVYSTIDEAGKEVRSFATIPLKVVIDCQKQGKKDWKTLLDQWVHENNVVPASATLKFILSPGDLVYLPKEGETSIDYNAIDRTRIYKMVSGSGFQCFFIPYNWASTIVDKIELGALNKAERALTGEMIKNFCFPISIDRLGNIIIPQQP

SEQ ID NO: 5466 - protein, 1498 aa, synthetic construct
  REGION 1..1498: note = Synthetic
MKKVLGLDLGTNSIGWALVKQDFNKKEGSIDGLGVRIIPMSADILGKFDAGLSHSQTAERTGYRGVRRLYQRKNLRRERLHRVLNILDFLPPHYARGIDFEKRLGQFKSGKEIKLNYKLNSANKYEFIFKESYKEMLEEFKKEHPNLFYEKKNGIETKIPYDWALYYLRKKALSQPISKQELAWVILNFNQKRGYYQLRGEETDEDKDKQFVQLKVKEIIDSGENIKGKTLFDVFFENGWKYDKQIIKTEEWINRTKEFIVTTKALKSGEIKRTYKAIDSEKDWIAIKAKTEQDIEESNKTVGTYIYETLLKNPTQKIRGKLVKTIERKFYKEEFRKILSKQIELQPDFFTSELYKSCIEELYPRNEAHQNIIKNKGFEYLFTEDIIFYQRPLRSQKSNISDCQFEYRSYKKENEKGIIQVIKKPVKAIPKSHPLFQEFRIWQWLQNLRIYNEEQIENGKMQDVTSHFLKTEKDWEALFNFLNTKQTIEQKHIIDYFIKQKSIDKKDKTKYRWNYETDKPYPLAETKVQFINRLKRVEDINSPELFLTEKTLVGKNQTGKLISREEQLWHIIYSVSDLNEYKSALKKFANKHDVDEESFLANFIKFPPFKSDYGSYSKKALSKLLPLMRRGKYWNENDISENIKQRVTDIMARVNALNLKEDYKDRELALTLANVSDDDVNKQLIKSFVPLKNKNPLSGLNTYQATYLVYGKHSEVSDIQHWRTPKDIDTYIKKFKQHSLRNPIVEQVVTETLRVVIDIWKHYGDGEPDFFNEIHVELGREMKNPADKRKKIADRNIENENTNHRIREVLKDLMNDSSIKGEIRDYSPSHQDLLKIYEDGIYQNPKADYTKVSEDEVAKIRRSNSPTQKEVQRYRLWLEQGYISPYTGKPIPLSKLFTHEYQIEHIIPQSRYFDNSLSNKIICESAINEDKDNKTAYEYLKEKRGSVIHGHKLLSLEEYEAHVNQYFKTNKAKLINLLSEDIPEGFINRQLNDSRYISKLIKGLLSNIVRKEGEQEATSKNLIPVTGSITTKLKNDWGLNDKWNELILPRFERLNQLTQTNDFTTTNTNGKIIPTVPNELIKGFNKKRIDHRHHALDALVVACCTRSHIQYLSALNAENKNYALRDKLLIKNDQNHYTKIFQMPWENLPTEAKVQLETIVVSFKQNLRVINKANNKFWSYKDEKGNLNIGKDGKPKKKLRKQTAGDNWAIRKSLHKETISGLYNLKTPKGKIATAVRSSLSGIKNEKHLAKITDKQIRDVILSNHLKNYKDEKGKINFEAAFNEEGIEDLNKAIIYLNNCKKHQPIRKVKFFEIGSKFQVGEIGNKNTKYVEAAKGTNLFFAIYWDEKKQKRNYETIPLNEVIAHQKQVAHLPKNQRTAIQPNPEKGEFLFTLSPNDLVYIPTEEELNNPTLIDFKNLTLDQANRIYKMVSSTGTECHFTKMNIASLIKNYDSKSKIGELGSLNKLEITTEITNPIRIKEVCYKLKIDRLGNISKVQK

SEQ ID NO: 5467 - protein, 1498 aa, synthetic construct
  REGION 1..1498: note = Synthetic
MKRILGLDLGTNSIGWSLIQHNFEKKEGQINDLGVRIIPMSADILGKFDAGQSHSQTAERTAYRGIRRLYQRDNLRRERLHRVLNILDFLPQHYAEHIDFEKRLGQFKEGKEIKLNYKPKAHGKYEFIFQSSFNEMVAEFKKDQPELFYVKPNGKETKIPYDWTLYYLRKKALSQPLTKHELAWIILNFNQKRGYYQLRGEELDDEKDKQFVELKVKEVIDSGEAVKGKPLFDVIFENGWKYDKQIVKTEDWIDRTKEFIVTTKTLKNGDIKRTYKAVDSEKDWAAIKAKTEQDIERSDKTVGEFIYETLLENPTQKIRGKLVKTIERKFYKEELKKILAKQIELQSDLFSAELYKACIEELYPRNEAHKNAIINRDFLYLLMDDIIFYQRPLKSQKSNISGCQLEQRIYFKTNKDTGNKEEVKQAVKAIPKSHPLFQEFRNWQWLQNLKIYNKVATDKGELTDETKKLLPNEEDWVKLFDFLQSKKELEQSQFIKYFIDKKLINKTEKDHYRWNYVEDKKYPFAETRAQFISRLTKVEGIDDVNTFLDSKTKLGNKDNSPFVTIIEQLWHIIYSVSDIKEYKSALEKFASKHHIDKLSFVDNFIKFPPFKSDYGSYSKKALNKLLPLMRRGKYWNENDISEQVKKRVSEIMERVNALNLKEDYNTKELSEAIANVSDDDVKKQLIKSFVPFKDKNPLTGLNTYQATYLVYGRHSEIGDIQNWKTPEDIDTYLKNFKQHSLRNPIVEQVVTETLRVVRDIWKHHGESQPEFFNEIHVELGREMKNPADKRKRISDRNTENENTNHRIREVLKDLMNDVSIQGDVRDYSPSQQDLLKIYEEGVYQNPKVDYSRVSEDEITKIRRNNSPTQKEIQRYRLWLEQGYISPYTGKPIPLSKLFTHEYQIEHIIPQSRYFDNSMSNKVICESAVNEDKDNKTAFEYLKEKSGSVINGHKLLVLSEYEAHVNQYFKNNRQKLKNLLSEDIPEGFINRQMNDSRYISKLVKGLLSNIVREEGEQEATSKNLIPVTGSVTSKLKNDWGLNDKWNELILPRFERLNQLTQTNDFTTTNTNGNTIPCVPDELLKGFSKKRIDHRHHALDALVVACCTRIHGHYLSALNAENKNYGLRDKLLVKNKKGDYTKAFQMPWQGFTTEAKEQLEKTVISFKQNLRVINKANNKFWSYKDENGNLNLDKNGNPVKKLRKQTKGDNWAIRKAMHKETVSGKYHIETPKGKIATAVRGALADIKNEKHLAKITDPQIREVILPHHLKNYIDEKGKIKFDAAFSDEGIEDLNKNIVVLNNGKNHQPIHKVKFFEIGSKFSISENENSAKNMKYVEAAKGTNLFFAVYWDDKKQKRSYETVPLNEVIEHQKQMAHLPKRERLPIQPNSNKGTFLFTLSPNDLVYVPTDEELTNPSAIDFNNFNQEKANRVYKMVSCTGSECHFIFHTLASLVKNYDSKSKNGELGSLNKQETTMYSNAIRIKERCIKLNIDRLGNISKA

SEQ ID NO: 5468 - protein, 1498 aa, synthetic construct
  REGION 1..1498: note = Synthetic
MKKVLGLDLGTNSIGWSLIQHNFERKEGVINGLGVRIIPMSADVLGKFDAGQSHSQTAERTGYRGTRRLYQRANLRRERLHRVLRILDFLPQHYADHIDFEKRLGQFKQGKEVKLNYKPSNSGKHEFIFKESFNEMLNEFKNVQPELFYFKTDGVETKIPFDWTLYYLRKKALTKPLTKYELAWIILNFNQKRGYYQSRGEVVDHENDKEFVILKVKEVINSGENVKGKVLYDVVFENGWKYDKQVVKIEDWVARTKEFIVTTKTLKNGDVKRSYKTVDSENDWIAIKAKTEQDIESSNKTVGEFIYETLLENPTQKIRGKLVKTIERKFYKNELKKILTKQIELQPELFSEKIYNTSIEALYPNNEAHRDALKNRDFIYLLMEDIIFYQRPLKSQKSNISGCQLESRVFKQKNKETGKEEFIKKAIPVISKSHPLFQEFRIWQWLQNLKIYNRVTTLKGELIDITEKLLANEKDWVALFDFLQSTKELDQKQFIKYFIDKKLIDKSEKDHYRWNYVEDKKYPFAETRAQFISRLKKVDGVNDPNSFLDEKTKVGKKETSPLISRVEQLWHIIYSVSDINEYKSALKKFAEKHKLEQDAFVDNFIKFPPFKSDYGSYSKKAITKLLPLMRKGRYWNENKIADLVKQRVKTIMNRVNSLGLNENYSKKDLAEALAKVSDDDVKKQLIKSFIPFEDKNPIKGLNTYQATYLVYGRHSEIGEIQNWRTPEDIDTYLKNFKQHSLRNPIVEQVVTETLRVVRDIWKYHGDSKPYFFNEIHVELGREMKNPADKRKRISDRNIENENTNHRIKEILKDLMNDSSINADIRDYSPSQQDLLKIYEEGIYQNPKADFTKVGEDEISKIRSSNNPTQKEIQRYRLWLEQGYISPYTGNPIPLSKLFTHEYQIEHIIPQSRYFDNSLSNKIICESEVNEDKDNKTAFEYLKEKGSNIINGHKLLSLSEYEAHVNQYFKNNRQKLKNLLSEDIPEGFINRQLNDSRYVSKLIKGLLSNIVREEGEEEATSKNLIPVTGAVTSKLKNDWGLNDKWNELILSRFERLNLLTQTSDFTTLNTNGKIIPTVPDELSKGFSKKRIDHRHHALDALVVACCTRNHSQYLSALNAEKKNFGLRDKLLIKNKQGQYTKTFQKPWQTFTTEAKNQLEKTVISFKQNLRVINKANNKFWSYRDENGNLNVDKNGNPLKKLRKQTKGDNWAIRKPMHKESIYGIYNIKTPKGKIATAIRCFLGDIKNEKHLAKITDKTIREVILPNHLKKYLDEKGKIKYDLAFNDAGIEDLNKNITAFNNSKKHQPIYKVKMFEVGNKFAVSENETSEKSKKYVEAAKGTNLFFAVYWDEKKQKRNYETVPLNEVITHQKQVANLPKTERLPIQPNPKKGNFLFTLSPNDLVYVPNNEELENLDRIDFKNLTPTQLNRVYKMVSCTGGECHFVSQVIASLIKNYDSKSKLGELGSLNKQETTMSDDIVRIKERCIKLKVDRLGNIIKA

SEQ ID NO: 5469 - protein, 1497 aa, synthetic construct
  REGION 1..1497: note = Synthetic
MKTILGLDLGTNSIGWALIQQDFENKQGKILGLGSRIIPMSQDILGDFDKGVSVSQTKERTRLRSVRRLRERHLLRRERLHRVINVLGLLPQHYAAKIDFSKRLGKFLPETETKFVYDDNGAFIFKKSFEEMLADFKSHQPELLNRKNRKGDDAKIPYDWTVYYLRKKALTEKIENEELAWLLLHFNQKRGYYQLRGEEAEEKPNKLEEFYSLRIAEVTADEPQRGSDKIWYNLILENGWIYRRESKQPLFDWKGKVRDFIVTSDLNDDGSVRKDKEGNEKRSFRSPKEDDWKLLKKKTESEIEKSDKTVGEFIYDALLQKPDQKIRGKLVRTIERKFYKEELIRLLAKQIELNTSLQDNNMYEKCVEELYPHNLQHQATLLGKGFLHLFVDDILYYQRPLRSQKGTISNCPLESRSFMVNGIKKTEPLKCISKSHPLYQEFRLWQWISNLRIINKEKDIDETVKNLQLTEGVEALFDFLSQRKEIDQKALLKHFKLKESTYRWNYVEDKSYPCNETHVQIAGRLAKVTDISQGFLTKEKEEKLWHIIYSVTDKIEYEKALRSFAAKNNLNIESFYDAFKKFPPFPANYGSYSEKAIKKLLPLMRIGKYWDWDSIDAKTKDRIGKFINAEFDEEIKEKVREKIGKQAFTNENDYQGLPEWLAKYVVYDRHSERSETGKWNTVADLEGYLQSFRQHSLKNPIVEQVMTETLRTVKDIWQCYGNGAENFFDEIHIELGREMKNPADKRKSLTEQITKNENTNLRIKAMLMELLNNGVENVRPHSPMQQDILKIYEDAVLNGSIEIPEDIEKISKLALPTNSQLQRYKMWLDQKYRSPYTGAVIPLNKLFTPAYEIEHIIPQSRYYDDSFNNKVICEAAVNKLKDNQTGLEFIRNHYGQIVELGMGMTARIFTEVEYTDFVKQHYAKSYSKRNNLMALDVPEKMIERQLNDTRYISKFIMQALSNIVRAEKDDDGANSKNVLASNGKITSDLKQDWGMDAIWNELVLPRFERLNQITNSTNFTAYNERYQKHLPVVPLELQKGYQKKRIDHRHHAMDALIIACATRSHINYMNNRHALDKNKSADEKKKERFDLKAKLCDKKYNDGSSEHYEWIFKQPWATFVPDAKEKLQRVVVSFKQNLRVINKTVNQHSIFRDGKKVLFKQEKGESWAIRKSLHTPMPYGKKDYEFEVLKLSESLGKAHLIIDDNIKEVVKKILNQFNNKISDAQKFIKSNPIKDRHGNDVLDTAFKINIEKFRRRQPITKLSNRGQGGLKTIDDVTKFINKVADYKLQQDLFTHLKDNQNDIDKAFSAEAIETFNQKREMPVYKLPIAESGTGRFVVGQKHTTKHKWVEADTGTNLFFAVYADPKGKRSYETIPLNIVIERQKQGVVPVPEINGAGHDLLMYLSPNDLVFIPAFEDDGNIEGAISFTNRGEKIYKMVSCTTNRCFFIRQDIATPIVNKVEFSALNKMERSIDGKMIKDCCIKLKVDRLGNVSLATL

SEQ ID NO: 5470 - protein, 1496 aa, synthetic construct
  REGION 1..1496: note = Synthetic
MNKNILGLDLGTNSIGWALVQQDFENKKGEILGMGSRIIPMSQDVLGEFDKGISVSQTAERTRYRSTRRLRERHLLRRERLHRILNVLEFLPEHYAKEIDFEKRLGKFFAEKEPKIAYHNTDFIFKNSFEGMLNDFKKHQPELVNRKNKKGADAKIPYDWTIYYLRKKALTEKIEKKELAWLLLNFNQKRGYYQLRGEEDENSADKIEYVVLLKVMQIEKGEQDKKNDKKNWYNITLGNGWVYSATFSTEPQWLNTEKEFLVTEELDADGNIKIVKDKKTDKEGKEKRKITPLPTFEEIDLMSKKDQDKIYRKIKAKTEITISNSGKTVGTYIYDTLLQKPNQKIRGKLVRTIERKFYKDELNQILEKQKEFHAELKNENLFNDCVRELYRSNKAHQTVLSKKDFVHLFLNDIIFYQRSLKSKKSSISNCTFEFRKYKDENGKEQITPLKAVSKSHPLYQEYRVWQWLYNLSIYKKEDETNVTKDFLYSTEDYEKLFAFLMLQKEVDHKDIIGYFLKQKDDKLKGKALNTEIAKYRWNYVYNAEKDESKPYPCNETGYEIRRRLEKIENVSTDFLTSEILQALWHIIYSVKDKIEFEKALSSFAKKHKIDENSFVESFKKIKPFDNDYGSYSLKAIKKLLPLVRLGKYWKWEAIDDKTKNRISKIITGEFDENIKNHVREKAIQLTSENSFQGLQLWLASYVVYDRHSEAALAGKWDTVADLEKYLEEFKQHSLRNPIVEQVVTETLRVVKDIWKKYGNCAKDFFDEIHIELGREMKNTAEDREQITNQINDNENTNIRIKLLLVELLNDQNAENVRPHSPSQQEILKIYEDGVLNSGVEIPNEVSDILKKFKETDLKKQPTSSEVNRYKLWLEQKYRSPYTGEIIPLNKLFTSKYEIEHIIPQSRFFDNGLSNKVICEAAVNKLKDNQLGLEFIKNHHGEKVQDGAVTFEIFSVEAFKKFVQDNYAKNRSKRIKLLLEDIPEKMVERQLNDTRYISKFISSVLSSIVRKGENDDGINSKNIIPGNGKITTILKQNWGLNDVWNELILPRFERMNQLTKTESFTSKNTNNKIIPTVPLELSKGFQKKRIDHRHHALDALIIACATHDHVNLLNNQHAKSETKRYDLQRKLRKFEKVEYNDRNGNRVKREVPKDFLKPWDNFTVDAKNKLEAIVISFKQNLRVINKATNKYEKFIAGKKEKVEQKGMNWAIRKSMHKETVSGKVELPRIKVPKGKILTATRKKIDPSFDLKTIESITDTGIQKILKNYWESKDKNSELAFSPEGIEDMNKNIAQYNNGKPHQPIYKARIFELGSKFNLGQTGNKKAKYVEADKGTNLFFAVYEDEKGKRNYKTIPLNIVIERQKQGLGSVPETNENGNKLSFYLSPNDLVYVPTIEEKENLKMPDFGNFNKEQRERIYKFTDCSGVMANFIHSNIANALFNINKDKQKKSGMDFPIQNEIGVGSQGSKNERAFTGETIKNICIKLKIDRLGNISKTI

SEQ ID NO: 5471 - protein, 1495 aa, synthetic construct
  REGION 1..1495: note = Synthetic
MKQILGLDLGPNSIGWAVVQTESGETAETLFNNGRILMAGSRIIPMSQDILNNYEKGVSTSQTHDRTQYRQVRRQYDRFHQRRERLNRVLKVLGYLPEHYAQKLDRYGKLLKGQEPKLAWRPAEDGKLDFLFQDAFDEMVAEIKQRHPGLCKIPYDWTLYFLRKKALTEKLAPEELAWVLHSFNQKRGFFAVRGQVDEETDSPDKKQEYRKAVLQKVEDTGEKTRGNIVYRLKFEDGACFEVPLRRMALTIGDEVEYIITTKLDEDGMPKLNKQGKPDITYKIPNADDAWTLNKLRAEYTIDQSHTTVGQYIYDAILSNPQQKIRGELVRTVDRRFYREELSRILEKQIPFHHALQDKNKLQECIQSLYPSNEARRNALSAGNFKKLLIDDIILYQRPLKSKKSLIDECKYEYHTYTDKTGESKKVGLKCASRSNPLFQEFRIWQFMENLRILKRKATIDGHFHADVDVTPQYLSDEDARQELFDWLYNRAKVDQKALLKYFKLDEEYFRWNYVEERDYPMADTRAEIMKRLKKAEVPNDFLTPDTEMALWEILYSVSGQLDLEKALKTFARKHKLDEQKFYQSFRTIKPYVADYCAYSTKALRRLLPLMRCGKYWSVEAIDAQTRQRIQKLIDGEWEDNIDARVREKTIHLRREEDFRGLPAWLASYVVYNRYSEAGEVAKWENPDEMDADIRKFRQHSLRNPIVEQVCLEALRTVRDIWKEVGQIDEIHVEMGREMRATAKERERRHNEQLENEQTNLRIKALLQEFMNPEFKIEDVRPYSPYQQDILRIYERTVLENEAGHIDEPIREIIRKFSQTDAAKRPTSSEVMRYKLWLEQKYQSPYTGEIIPLGKLFTTAYQIEHVIPKAVYYDDSFNNKIICEAEVNQLKGDMLGMPFIQKFGGQKVPCVGGRTVEVYKAEAYRKFVEEHYKGRKMENLLSEEVPARFTARQMNDTRYISRFIIGELSKLVREKSADGTLEQEATSKNVVVLNGKVTDKLKSDWGLVEIWNEIIAPRFRRLNKMDQSNRFGHEAEKDGKRYFQIEMPLELQRGFKRKRIDHRHHAMDAITIACATRTVINYLNNDYSHEGQGREDLKRAVCRKRKDEWLVMKPWNTFTQDAREQLQNIVVSFKQNLRIINNTGNRYQRYNHETGKKELFHQQKGDRWAIRKPLHKESVYARVNLRSVKLVNFKTAFMSVGRIVDKKLKRAVLEAMAKYNGRCTDKQVLKYLQGMSEWRDYDFKKVKIYVFSNEDEKNQISAIRKRLDDSFDKKRIETITDTGIQQILLRHLEANGGNPKDAFSPEGIERLNDNITELNNGKPHLPIYSVRVTEPLGNKFAIGIIGNKSRKFVEAAKGTNLFFAIYQQEDGKRVFCSLPLNEVVERQKQGLPSAPEEDEAGNKLLFVLSPGDLVYIPTIDERANKVDNATIDKERIYKMVSCTGNRASFIPYFVASPIVDKYEFDKLNKIENVDGTSIKNVCIPIEVDRLGRYKIK

SEQ ID NO: 5472 - protein, 1495 aa, synthetic construct
  REGION 1..1495: note = Synthetic
MKTILGLDLGTNSIGWALIKQDFENKEGSILGLGSRIIPMSQDILGDFDKGNSISQTAERTRLRSMRRLRERHLLRRERLHRVLNVLGFLPQHYAAKIDFDKRLGKFLPETETKFVYDSNGEFLFKRSFEEMLAEFKQHQPELLNRKNKKGESAKIQYDWTVYYLRKKALTKEIEKEELAWLLLHFNQKRGYYQLRGEETEEKPNKLEEFYSLRIAQVTADEPQRGSNKIWYNIILENGWVYRRESNQALFDWKDKVRDFIVTTDLNEDGSIKKDKEGNEKRSFRSPKEDDWKLLKKKTESEIDRSKKTVGEFIYDTLLQKPDQKIKGKLIRTIERKFYKEELIRILKKQIELNSNLKDTYLYKQCVEELYPHNLQHQSTLLSKDFLHLFIEDILYYQRPLRSQKSTISNCPLERRTFILDGIKKIEPLKCISKSHPLYQEFRLWQWISNLRIINKDNDWDETAKNLELTGGVETLFDFLTQRKEIDQKALLKYFKLKETTYRWNYVEDKSYPCNETHTMIAGRLAKVKGIPQEFLTKEKEEELWHVIYSVTDKLEYEKALKSFAVKKGLDIESFFDAFRKFPPFPANYGSYSAKAIKKLLPLMRMGEYWDWDKIDKQTKERIGKFIDGEFDEQIKEKVREKIGKQALVSESDYQGLPEWLAKYVVYDRHSEHSEAGKWNTVTNLEEYLRLFRQHSLKNPIVEQVMMETLRTVKDIWNYYGNGVENFFDEIHIELGREMKNTKSDRERISKQNVINENTNLRVKALLIELLNDNDIENVRPYSPMQQDILKIYEDAVLNDSIEIPEDIEKISKLAQPTSSQLQRYKLWLEQKYRSPYTGAIIPLNKLFTPAYEIEHIIPQSRYYDDSFNNKVICEAAVNKLKDNQTGLEFIQNHHGQIVELGMRETTKIFTEDEYTDFIKQHYAKSRAKKNNLMALDIPEKMIERQLNDTRYISKFIMQTLSNIVRTEKDDDGGNSKNVLASNGKITSDLKRDWGMDAIWNDLILPRFERLNNISNSTNFTTYNDRYQKYLPVVPFELQKGFQKKRIDHRHHAMDALIIACATRSHINFMNNKNALDKKKSSAQKQNERFDLKKILCDKKYNSSSSENYEWVFKQPWGTFVPDAKEKLEQVIISFKQNLRVINKTVNQHDILKDGKKESFKQHKGQNWAVRKPLHKDTVSGLISLRKKKMASISIALDTPENIVDKLLKHRIQKFIAEGNDKKMIIKHFKENDHQFNGQDINKIEVYHWENDNVASRTSLDISFNKAKIESITDTGIQKILFKHLNHYNDSPEIAFTPEGIEQMNKNIVDLNNGKLHQPILKVRTYEARGNKFAVGQTGNKKSKYVEAAKGTNLFFAIYVDVNGKRSYETVPLNIVIERQKEGLSSVPETNEAGQKLLMHLCPNDLVYLPTEEEGEFGIPLNFDKLDKEAVNRVYKTVSFSTYQCFFIKHDVATSIVNKIEFSALNKMEKSVEGKMIKDCCVKLKIDRLGNISPA

SEQ ID NO: 5473 - protein, 1494 aa, synthetic construct
  REGION 1..1494: note = Synthetic
MKKILGFDIGTNSTGWAIVYGDTNEDGKLQLKEIANAGSRIIPMDASILGDFDKGNSVSQTKARTEYRGMRRMRERYLLRRERLYRILNIMGFLPEHFSECLTRYGKFTNNSEPKLAWLKDNEGKMQFLFKQSFNEMLNEFYEHNPQLTEEAKKIPYDWTLYYLRKKALTAPIQKEELAWILLNFNQKRGYYQLRGEDEEDTQNKIEEYLSLKIIRVEATDEKKGDGTWHNVYLENGMVYRRTSKTFLDWEGKTKDFIITTLLDNNGQPKVDKDGQIRRSLRQPKEDEWGLLKKKTEASIDKSGKTVGCYIYDSLLSDPTQKIKGRLVRTIERKYYKNELKAILEKQKQFIPELNDKELYDRCVEELYPSNDAHRNNITHRDFTYLLAEDILFYQRPLKSKKSLIADCQYETRAYKNPETGETKHIGIKCVSKSHPRFQEFRLWQFISNLRIYERSKIVDGKTKLDVDVTDSFLKDETVYERLFEFLNNKKAIKQDTLLSSFFKLKKQNGKHLYRWNYVEDKEYPCNETRELILSRLKKAGISASFLTTETEEALWHILYSVSDKQELRTALTTFARKNTLDETTFTEHFIKIPPFKNDYGAYSLKALNKLLPLIRMGKYWSEESIDAKTRERIDRIIDGEADENIKNTVREKAINLNDISHFKGLPLWLACYVVYNRHSEASDTERWKRPEDIDEYLRHFRQHSLNNPIVEQVVMETLRTVRDIWKKEGHIDEIHIELGREMKSPAAKRAQMAQNMTENENTNIRIKYLLREFASPDMDIEGVHPHSPSQQELLRIYEEGVLASERDITPDIKELIGRLNEKSKQPSHSDVQRYKLWLDQKYRSPYTGLAIPLSRLFTPDYEIEHVIPQSRYFDNSFTNKVICESEVNKLKDNQLGYEFIMRHHGEKVPLSRGITATILEPKEYEQLVKNTYSANPQKLKKLMMDDIPDGFIDRQLNDSRYISKLVKSLMSKIVREKGEEEATSKNVIVCTGSVTDRLKKDWGVNDVWNRIILPRFERLDKMCGQQLYTTKNTSGHVIPDMPIEQQRGFNKKRIDHRHHAMDAIVIACATRSIVNYLNNESAKHDAQTTRHDLQHALCHKQRTDANGNYQWTLNMPWDTFPADVNNALNRIIVSFKQNLRVISRTKNKIQKLKNNKRVLEQQTKGDNWAIRKPLHKETVYGEVNLRLQKEVKLKEAITRPDDIIDRDLKKKIKAMLELGYDLKKIKAYFEDNAEIWSDINLNKIPIYYFTAETSDRYFATRKPIDQSFNRKKIINEITDTGIQKIMLRHLENKSDNPDIAFSPEGIEEMNRNIRTLNNGKWHQPILKVRVYEKANKFAIGKSGNKSKKFVEAAKGTNLFFAVYEGEDGKRRYSSIPLNIVIDRMKAGQPVAGEDGIIPTFVLSPGDLVYLPKEGETLSVETIDKSRIYKMVSCNGKQCFFIGNTIAKAIINNNDLHEFNVLNKIEIALTGENIKEKCIPIKVDRLGQIVKLGY

SEQ ID NO: 5474 - protein, 1494 aa, synthetic construct
  REGION 1..1494: note = Synthetic
MKTILGLDLGTNSVGWALVEQDLENKQGKILGMGSRIIPMSQDVLGDFGKGNSISQTAERTKYRSTRRLRERHLLRRERLHRILNVLGFLPEHYASQIDFGKRLGKFFEETEPKIAWKKNERDRFEFLFKDSFSEMVADFKVNGKEVKIPYDWTLYYLRKKALFYKLEKEELAWIILNFNQKRGYYQLRGEEEEENPNKSVEFYSLKIVDVTADEEPNKKGETWYSLVLENGWIYRRSSKTDLSDWKGKSRDFIVTTDLNDDGSVRTNKDGEEKRSFRAPKEDDWTLVKKKTESDLDKHIGRHKINTGIKGTIGTYVYDNLLQNPDQKIKGKLIRTIERKFYKDELKQILQKQIELQPELFSKDLYNDCVRELYRSNEAHRLQLSNRDFVHLFIDDIIFYQRPLKSQKSSIGNCALEFRIYRDKDGNEQTRYLKAIPKSNPFYQEFRVWQWLYNLKIYSREDDVDVTTQFIKGTKDKEEVFEFLMGQKEVDHIDVLTYFIEPLIKEKFPNAKGRSLKNEVSKKIEKYRWNYVYDPDKGESKKYPMNETGYEIRRRLNKVENISENFLTKEIEQHLWHLIYSVTDKIEFEKGLKSFAGKYGLTEASFVENFKKFKPFDSDYGRYSEKAIKKLLPLLRIGKYWNWDAIDKETKKRIDRIITGEYDEAIKDSVREKAIDLTEEIHFQGLQLWLAQYIVYDRHSEADIAGKWNSVDDLEDYLKDFKQHTLRNPIVEQVVTETLRVVKDIWIQFGKGTKDYFDEIHIELGRDLKNPADKRKRLSGIVSENENTNLRIKAILLELINDHSVENVRPYSPMQHEALKIYEDGVLNSGIEIPDEIEKISKKSEPTKAEIQRYKLWLEQKYKSPYTGRPIPMSKLFTSAYEIEHVIPQSRYFDDSFSNKVICEAEVNSMKDKQLGLEFIKNHHGQRIMTSSGEVEILSEVAYKSFVKEHYDKNHGKKNKLLLEEIPEKMIERQLNDTRYISKFVSGLLSNIVRAEKGDEGVNSKNIIPGNGKITGRLKQDWGLNDVWNDLILPRFERMNELTKSGDFTSWNGKHQKFLPTVPIELSKGFQKKRIDHRHHALDALVIACATRDHVNLLNNKHARSKERFDLQHKLRNTEKWKDNNGRERDKFTEFKKPWKSFTIDARNELEKIVVSFKQNLRVINKATNYYEKIVDGKKIKVEQKGVNLAIRKPIHKETVSGQVHLSRIKVPKGKILTATRKTLDTSFDSKSIDSITDTGIQKILINHLQKYDEPAAGIPLNNLSQRISKRRELIKSKKLIEHPELAFSPEGIEDMNKNIVQCNEGKPHHPILKVRVFETGSKFPVGFKGNKKDKYVEAAKGTNLFFAVYWDEKKQKRSYETIPLNIVIERQKQGLNSVPEMDEKGNKLVFHLSPNDLVYVPLEVRPDIVHTINTDDISQIQVSSIYKMVSSTGSECHFIHSNISTLIKSYDAKTKIGELGSLNKLEIMMNDSVRIKERCIKLKVDRLGNISKA

SEQ ID NO: 5475 - protein, 1494 aa, synthetic construct
  REGION 1..1494: note = Synthetic
MKRILGLDLGTNSIGWALIQHDFENKDGVIQDIGSRIIPMGQDLLGKFDAGQSISQTAERTGYRGIRRLYQRDHLRRDRLHRVLNILGFLPQHYADAIDFERKLGQFKPGNEEKLNYRKNTNGVYEFIFKDSFGEMLQEFKTKQPQLFQPNKKGKSPQIPYDWTIYYLRQKALAKAISKEELAWVILNFNQKRGYYQLRGEELDGGKDKQFVQLRVKEVVDSGEMVKGKPLYDVYFENGWKYDRQITKTEDWIGRTKEFIVTISTLNSGETKYSYKAVDSEKDWAAIKAKTEKDIENSQKTVGEFIYETLLDHPSQKIRGELIKTIERKFYKEEFKKIISTQVSLQPDLFSPELYQACIEELYPRNEAHQSQLKGQGFEHLFTEDIIFYQRPLKSKKSDISECPYEFRVFKRVNSETGKTEITRQGIKAIPKSHPLFQEFRLWQWLHNLRVYQKKRTSGDKIEIDVDITSELLKTEEDWTDLFDYMTTKKEVEQKHIVKYFIDKGLLDSKSKDNYRWNYVEDKKYPACDTQTQFVSRLKKIKGLEPYSLLAEKTHLGKSESGHTLSREVQLWHIIYSVTDKKEYKSALEKFAQKHRIDVDVFVESFIKFPPFESDYGSYSKKAIKKLLPLMRRGKYWDESAILDSAKERIDEIMERVNSMKLADGYSKKELTEELEKVSADDIPKQVVKSFIPYLNLPYTGLNTYQACYAVYGRHSEVGDIQQWKTPEDIDQYLKRFKQHSLRNPVVEQVVCETLRVVRDIWKKYRINDPHYQFDEIHVELGREMKNSADKRKQLSSTINENENTNFRIKEVLKELMEDPLVEGNVRSYSPGQQEILKLYEEGVYKNPDARYDTVSENEIQKIRRNSNPSKSDILRYKLWLEQGYISPYTGKPIQLSKLFTTAYQIEHIIPQSRYFDNSFGNKIICESTINEDKDNKTAYEYLKAKGGSIINGHLLLKLDEYEAHVSRYFKNNKTKLKNLLSEDIPEGFINRQLNDSRYISKLVKGLLSNIVRENNEKEATSKNLIPVNGAITSKLKKDWGLNDKWNELIAPRFQRLNELTKSENYGFWDNTINAYRIQVPDDISKGFDKKRIDHRHHALDALVTACTTRNHTHYLSALNAEKENHSLRSKLLIKNEHGHYTKTFQMPWQSFPIEAKNKLETIIISFKQNLRVINKANNKFWSYKDEIGNLNIGKNGKPQKKLRKQTKGDHWAIRKSLHKETVSGVVNGIETPKDKMATSVRTSLTEIKTQKHIDKIVDPQIRNVIIPNHLKNYTDDKGKINFADAFNHEGIEDLNKNINTLNGGTFHHPITKVKLYEIGSKFQIGETGNNSKKYVEAAKGTNLFFAIYWDEKKQKRTFETVPLNEVIEHQKQVAHLPKPERSPIQPNPKKGKLLFTLSPNDLVYVPTEEEIENPSLIDFSNLNKDQARSIYKMVSSSGNQCFFIQGTVSSSIKNKFEFSALNKMERDLNGAMIKENCIKLKVDRLGNIQKSIL

SEQ ID NO: 5476 - protein, 1494 aa, synthetic construct
  REGION 1..1494: note = Synthetic
MKNILGLDLGTNSIGWALIDNESHRIIKSGSRIIPMDAATMGDYEKGNLKSADWKRTSFRGMRRLYERAKLRRERLLRVLNILGFLPEEFRRQIDFEHHPGQFIDGKEPLIAYHHDENGQRVFSYMSAFEEMLTDFRATQSELVRDGRRVPYDWTIYYLRHKALTQPVTKEELAWIILNFNTKRGYYQLRSESEEVTTNKNEEYAELKVVSVEKTGEDKKRAGYYWYTITYDNEAEQKITSTIPPRQIGDKVELIVTTARDKAGEIKKSVRSPKEDDWTLMKKRTEHNIEEEECTVGSYIYQHILADPTVKVRGKLVHTIERKFYKKELKQILNKQKEFIPELQDASLYEACIKELYRNNEAHIQSIANKDFTDLFVNDIIFYQRPLKSKKSTISNCPYESYYYKNKETGELIRKPIKCIAKSNPLYQEFRLWQFVHNLRIYKKSEEVSGRLQTDVDVTDRFLTTPDDYAKLFSWLNDRKEIKQKELLRYEAFGLSKSYGDYRWNFVEDKPYPCNETLHEINRRMKSILSDKKLSSEAYQQLWHILYSIDDPIEIRKALTSFAQNQEINSDDFVNAFYQYVPEKTKSYGAYSEKAIKKLLPLMRRGSYWAIGNIDEKTHRRLDNIINGVADDSISTCTREKLNNLTDITMCQGMPLWQACYAVYDRHSEAADTTKWEQPDDIDTYLSTELKQHSLRNPIVETVISETLRVVRDIWKAYGRPEEIHVELGRNLKQDAKSRKQDAIRMAENEQTNLRIRALLQELSNPECGVENVRPHSPSQMELLKIYENEVLQSTDDIPEEISNIIKDLGKTDSKKRPSLSDITKYRLWLEQKYQSPYTGHIIPLSKLFTPAYQIEHVIPQSRYFDDSISNKVICEAEVNKEKDRMLGYEFIINKGGSIVKGSFGQQFKIFDKVQYEDFVKQRYAHNKTKMKKLLMDDIPDGFIQRQLNDSRYMSKKIISILSNIVREDGEKEATSKHIIVTSGAITDRLKKEWGIKDVWNDIIAPRFKRLNKLTDSNNYGMETEKEGRQYFQINVPTELSTGLIKKRIDHRHHAMDAIIIACTTRNHVNFLNNSTAASDQKDIRRDLQHTLCTKTKTDSNGNYVWRFNKPWDTFTQDTRQELEGIIVSFKQNLRIINKMSNYYQHYVDGRKTISRQNKGDGWAIRKSLHKATVSGKVNLKRSKTVGFKEALNDWSAIKDKTSKAILQKIIAQYKNYDPKTIFKYFKDRNFKVEGKDFSKLEVYYNTSDKEPMSAHRVNIDTTFDEKEIRSITDTGIQKIMLKHLHTYDDAQGKTHPEAAFSPEGIEKMNQNIRMLNGGKDHKPIFKVRKAEILGMKFAVGERGHKDKKWVEADKGTNLFFAIYESEENKRSYSSIPLNEAIDRLKRGENIADERDQNGNKLLFVLSPMDLVYVPDPDDAHIDEVKGNNNIFKMVSCTGTECYFVPETYANVICKGKELESKNKVESYDGINIKKSCYKITVDRLGKVRKIFKG

SEQ ID NO: 5477 - protein, 1493 aa, synthetic construct
  REGION 1..1493: note = Synthetic
MRKILGLDLGTNSIGWSVILQDLEKQKGEIIGIGSRIIPMSQDILGKFDSGVSISQTAERTSYRGIRRLYQRDNLRRERLHRVLNILGFLPPHYADNIDFEKRLGQFKEGTEPKLVYRKDETGKYHFIFQDSFYEMVDEFKSYGKDVKIPYDWTLYYLRKKGLSKPLTKEELAWIILNFNQKRGYYQLRGEEIDEEKNKQFVQLKVKDVIDSGENVKGKTLYNVVFENGWEYSKQIVKTEDWIGRTKEFIVTTSTLKNGDIKRTFKAVDSEKDWPAIKAKTEQEIAKSGKTVGEYIYESLLKDPTQKIRGKLVKTIEREFYRKEFEKILSKQIELQPILFTSTLYKSCVEELYSRNEAHQNSIKDKGFQYLFTEDIIFYQRPLKSQKSNISGCQLEYRSYKKENKETGKIEEIKEAVKAISKSHPLFQEFRIWQWLQNVKIYNKEKIVNGKLEDVTSTLLKTEEDWVNLFDFLHGKKELEQKQFVDYFVKKKLIDKKEKDHYRWNYVEDKKYPFAETRAQFISRLSKIKGVADVENFLSEKTQVGTRKDSPFMPRIEQLWHIIYSVSDINEYKSAIEKFAVKHNLDQESFVSNFAKFPPFKSDYGSYSKKAITKLLPVMRMGKYWNESDVLDEIKERANSIMERVKVLRLKGNYTDREFSEVLTQISDDDIQKQLIKSFVSFKDKNPLKGLNTYQATYLVYGRHSEVGDIQHWNSPDDIDNYLENFKQHSLRNPIVEQVITETLRVVRDIWKYYGNSEKDFFNEIHVELGREMKNPAGKREEISKRNTENENTNHRIKEVLKELMNDASIDGDVRDYSPSQQDLLKIYEEGVYQNPKADFSKVSEDEIQKIRRSNNPTSKEIQRYRLWLEQGYISPYTGNPIRLSELFTHKYQIEHIIPQSRYFDNSLSNKVICESEVNEDKSNKTAYEYLAEKKGSVVDGHKLLSIEEYESHVNKYFKSNKQKLKNLLSEDIPEGFINRQLNDSRYISKLVKGLLSNIVREDNEQEATSKNLIPVTGVVTSKLKRDWGLNDKWNEIIKPRFERLNKLTNSNNFGFWDNKINAFRIQVPDEISKGFNKKRIDHRHHALDALVVACTTREHTHYLNALNNEKKNYGLRDKLLIKNKQGDYTKHFLMPWDNFATETKNQLEKIVISFKQNLRVINKANNKFWSYKDENGNLNLDKRGKPVKKLRKQTKGDNWAIRKAMHKETVSGIYNIDTPKGKIATAVRVALTEIKNEKHLAKITDERIREVILPNHLKNYLDKDGKPKYDEAFNQEGIEDLNKNIVELNLGKNHQPIYKIKIFEVGSKFSISEDYNSAKNKKYVEAAKGTNLFFAVYWDEKKQKRNFETVPLNEVITHQKQVAYLPKTERLPIQPNFKKGTFLFTLSPNDLVYVPTNEELDNKDAIDFNNLSKEQINRIYKMVSCTGVECHFVPNKTAKEIKKNENGTNSKNERIQDFYNGECIYDIKEKPVMIKERCIKLKIDRLGNISKV

SEQ ID NO: 5478 - protein, 1493 aa, synthetic construct
  REGION 1..1493: note = Synthetic
MKRVLGLDLGTNSIGWSVVSKDENDQLKKIEGIGSRIIPMSQDILGNFSVGNSVSQTAERTAFRSVRRLRERHLLRRERLLRILHLMGFLPDHYDSSIGWDKADHRTFAKFKSSIEPKVGWKNDAPGNWTFIFEDAFQEMLSDFVREQPELVAGGKKIPYDWTIYYLRKKALEKPISKEELAWIILNFNQKRGYYQLRGEDEEQESNKMVDYCELKVVEVQAEEPQKGKEDIWYNIILENGWVYRRSSKVPLLDWTGKMKEFIVTTELNPDGTPKKDKEGNEKRSFRAPAEGDWMLLKKRTENNIEKSRKTVGCYIYDTLLQSPEQKIKGKLIRTIERKFYKKELFKILQKQAGFHPEFQDKNIYKACIEELYPQNENRRLNLANGTLAQLILKDILFFQRPLKSKKSLVSNCRFEYRTFVKDGQKQIVPLKCIAKSNPLFQEYRLWQFIQDLRIYQREKEVDGKLRTDVDVTSEFLSTEDAFVELFDWLYTRKEISQKVLLKYLVKKKPELYRWNYVEDKNYPCNETRALILERLGKCNILVDFLTKENEMSLWHILYSVHDLGELTQALKSFGSKHGLNEAFVDIFRKFPPFKNEYGSYSEKAIKKLLPLMRMGKYWSREVIDPQTLQRIEKLLTGEYDENIRDRVREKAIHLTDISSFKGLPVWLASYIVYDRHAETGEIKHWKTPQDIEHYLNTEFKQYSLRNPIVEQVLTEALRTVKDIWQQYGDFAEIHVELGREVKNSAEKRARMTRQIIANEDTNLRLKALLMELQNDPAIENVRPYSPSQLDILKIYEEGALISETELPDDIAKISKKNQPTPSELVRYKLWLEQKYRSPYTGEIIPLSKLFTPAYEIEHVIPQSRYFDNSLSNKVICESEINKLKDNALGYEFIREHEGEIVQSNFGKKLRVFTVSEYEQFVKKNYSQSREKMKKLLLDDIPDSFIRRQLNDTRYISREVRTLLSNIVREEKEQESISKNVISCSGKVTDQLKKDWGLNDVWNKIIMPRFVRLNQMTESSKFGEWKNGHFQVQMPLELQKGFNKKRIDHRHHAMDALVIACATRNHINYLSNESALKDARVSRYDLKHLLCEKSKPDANGNYSWLFRKPWETFTQDTYEALKGVIVSFKKNVRIINKTTNYYQAYDQGKKVMKKQEQGDSWAIRKSLHKASVFGKVALRRQKEVRLGVALENWKMLVDKELKEKVKQLITQYGKEDAKLFSKYFKDRENKFNGKDISKVSIYYWDTENAAIRKPLDASFTEKEIKTITDTGIQQILLNHLQAKGGQSDIAFSPEGLEEMNKNLALLNKGKGHKPIYKVRIFEPIGNKFQVGETGNKSRKFVEADKGTNLFFALYRAENGKRTYLTVPLNEVAERQKQGLLPVPEMDVKNSTPLLFCLSPNDLVYVPTIEERENFQEFNWKNLTEEQTGRIYKMVSCTGNSAFFVQAAVANPIVNKYEFSPLNKMERAIEGEMIKEVCWKLKVDRLGHIVECVQ

SEQ ID NO: 5479 - protein, 1492 aa, synthetic construct
  REGION 1..1492: note = Synthetic
MKKKILGLDLGTNSIGWAVVNDENGMKSISHAGSRIIPMDAKLMGDFESGNSISQTATRTAARGARRLYERHALRRERLNRVLTILGFLPDHYTKELNRYGQLNKGAEPKLAWNIVDGKYSFLFKDSFLEMVKDFGNAHPELLVNGRNIAYDWTIYYLRKKALTQPISKQELAWVLQQFNQKRGYNQARGEEEEQKENKRQEFITQKVISVRDTGEKSKGKSVYEVCLENGWIFTKESKYSLDWEGKTKNFIVSTTLNSDGTDAIDKDGKIRRTFRAPADDDWGLLKLKTQHDIDASHKTVGEFIYDALLQNPDQKIIGQLVRVVDRKYYKEELKRILDTQKQFIPELQNGDLYNECIHALYPQNEAYRNSIAGKDFTYLLLNDIIFYQRPLKSKKSQINECPYEYHVFKEKDGKWQKQYLKCISKSHPIYEEFRLWQFVENLHIYREAANGIGKEDCTTELIANKADLISWLLTQKEVSEKSLLTQLVGKNKIKGLSWNFVSENDKKYPAAPVSSTIMGTIKEAGGEVSASEVEHIWHILYSVSDKSQLLAALKHYAETNHLSDVFVEKLGKMKPFSDYGAYSEKATRKLLNLMRSGEYWSEDAIDAQTKSRIDHILTGEVDDSVSERVREKLDTMNDVQDFQGLPLWLAEYVVYDVRKNDTKWEKPEDIDKYLQSFRLHSLNNPIVEQVVMESLRTVRDIWKQEGQIDEIHIELGRDLKQNAEQRKKTMLRQQENEKANLRAKLLLQEFMNPEMDVEGVHAYSPSQQELFRIYEDGVLSANKPDDDTQRIINELSSLKQPSLQDIKKYRLWLDQKYVSPYTGEIIPLAKLFTPAYQIEHVIPQSRFFDDSMSNKVICEAEVNARKDRMLGHEFIAQCGGEKITLSGGKVVQILSLQAYEDTIKKNFAGDPRKQEKLMLDEIPEKFVARQMNDSRYISRLMMQLLSNIVREKISNTEYEQEAVSKNLIVCNGATTTRLKKDWGINDVWNKIILPRFERLNQLQNTTVFTAKTANGHIIPNMPLELKQGFEKKRIDHRHHAMDAIVIAFTTRNHVALLSNESALDKDEKARYDLQTLLRKREVWRSADGKDHYKFTDFIAPYDGFQKDVQETLENIVVSFKQNLRVINKSNNRSTRIVDGKKQMVRQEKGENWSIRKSLHKATVFGEVNLRKQKYVNLTYALQHVEDVVEKDLRAKLKELLQEGKNEKQIKQYFASEPDVWADVNLKRIEIYYYTKDTNDHYYAVRTALDDSFTEDYIRNKVTSETIQKILLAHLERCNNDPKLAFSPDGIEKMNADIQALNNGVHHKPIYKVRTCEKAEKFAVGQIGSKSKKFVEADKGTNLFFAVYSIITEGGAEKRAFATIPFKVAVDCQKRGKKEWRTLLDEWVHSENIVSENAKLQFILSPGDLVYVPTAEEIHSGNIRLDKSRIYKFVSSSDVDAYFIPVAVASPIVNKVEYSQLNKISRVSQDEPLIKEICKPINVDRLGNLIEK

SEQ ID NO: 5480 - protein, 1491 aa, synthetic construct
  REGION 1..1491: note = Synthetic
MAKILGLDLGTNSIGWAVIDNEKKCIEAAGSRIIPMDAGRLGDFEKGNSVSFTAERTQYRGARRLHERYILRRERILRILRIMGFLPEHYVAQMDRYGKFPSDKEPKLAWREGKDGKAEFLFKESFEEMVAEFRLSGNDGKIPYDWTIYYLRKKALVKPLTKEELSWILMQFNQKRGYYQLRGKPDELDTDTNDKKEEKEYHELTVLKVDDTGEKDKKGNTWYNINLENGWIYRRACSIAPDWEGKKRGFIATFKLDKEGKRTDDQPKISSPSEDDWNLRKLKTEDDIRKSGKTIGEYIYNLLLNNPKQKIIGDSVQTINREYYHDELILILKKQSEFLPELKDDELYRQCIEELYPNNEAHRNSISRRDFCYLIADDILFYQRPLKTKTSLIADCPYEERNGKPLKCIAKSHPLFQEFRLWQFLSNLHIFRQDNDITSTLLPNNESYAELYDFLSTQKEVDQTLILRYFKIGKKEMSQYRWNYVPDKKYPAGETKSILLGGLRKAGIDIDFLDSEKELHLWHILYSVDDTTQYRKALRTFARRQDWDNERIEAFAKAFDRLTVYKEKDYGAYSAKAIGHLLPLMRRGRYWNIDAIDPLTRQRIERLITGEVDDNLSLTLRERFKHINDIKDCEGLNTWQACYIVYGRHSEATDTQKWTRPEDIDTYLKTFRHNSLNNPVVEQVVTESLRVVRDIWKQTGHIDEIHIELGRELKKTKAERESMSKAIAEGEATNQRIRLLLAELKNPDFEIENVRPQSPSQQELLKIYEDGVMRSGVEIPDDIIDIQKRFTSVKNQPTHTEVIRYKLWLDQKYISPYTGRTIPLAKLFTPAYQIEHVIPQSRWFDDSISNKVICEAEVNALKNRELGHEFIVHHHGETVPLSMGGSVNILSVEEYETLVKNIFANNHAKRKKMMLDDIPEDFTSRQMNDSRYISRLMMHLLSNIVRSVDEDGNLEDSVTSRNVIPCSGTVTDRLKRDWGIGDVWNRIILPRFERLNQITGTTDYTAVTAEGHTIPAVPIHLRQGFNKKRIDHRHHAMDAIVIACCSRDHVNILNNEAAKSNTRYDLQNKLRAKSTYLDKQGNKHDIFTEFLKPWPTFTEDVYRTLQGIIVSFKQNLRVINKTTNRYSILHDGKRTTAVQTQGDSWAIRKPLHKETVFGEVNLQLKKRIAIKKALKDINSIVNRELKEKIKEKKTSGYTDKQIIEYLEKNKDIWSETADGKIEVYYYTKDTGDRYFATRKDLLSLMSGCTTVNAAYAAIDSITDSGIRAILRAHLVVEGNNPIEAFSADGLERLNRNIQQLNGGKSHQPIKKVRVFEQANKFSIGATGQKATKFVEAAKGTNLFFVIYTNTKGERGYATVPLNIIIDLQKQYENNWKEKLPERLSQNDLALMPKDAKLLYVLSPGDLVYVPMLTSNSKHSENVESSRIYKCVSMSGSVLDCVQYCISKMIADPFEYTRHNKMQRAITGEMIKEVCIPIQVDRLGNITEIGQQ

SEQ ID NO: 5481 - protein, 1488 aa, synthetic construct
  REGION 1..1488: note = Synthetic
MKKILGLDLGTNSIGWALVENDFSKKEGLIKGLGSRIIPMSQDVLGKFDSGVSISQTAERTGYRGVRRLIQRNLLRRERLHRVLNILDFLPRHYANSIDFEKRLGQFKGDSEVKLNYRKNKKGKHEFVFMDSFNEMVEEFKLSQPYIFYNKKNGEETKIPYDWTIYYLRKKALSQKIQKEELAWIIINFNQKRGYYQLRGEEEELSSDKTKEYFSLNVEKVIDSGETIKKGGEKLYDVFFSNGWKYDKQVVKTEKWIGKSKEFIVTTSTMKDGSIKRTYKAVNSEEDWIAIKKKTEQDIDNSNKTVGQYIYGALLQSPKQKIRGKLVKTIERKFYKEEFKKIIKEQIKHHPELQNEVLYDLCVQELYPRNEAHQQNIKNKDFEYLFTDDIIFYQRPLKSKKSTISGCQYETRSFKKKIIDKVTNEEKEIWHKEPLKGISKSHPLFQEFRLWQFLKNLKIYQKEDENGNLIDQEITTDLLQTQEDWVELFDFLNTKKEVEQKQIIQFFVDKKLIDKKQKDNYRWNYVEDKKYPCNETKAQFISRLKKVKNIDVDTFLTIESELKLWHIIYSVKDKNEYEQAIRNFSIKNSIDVESFVENFKRFPPFKNDYAAYSEKAIKKILPLMRMGKYWNEFAIKQEVKNRIFDIIERLKTIDFDINKIDKSVADDDIPKQLLKSFIDFKDKNPLQGLNTYQACYLVYNRHSEANNITRWKTLEDINKYLNAFKQHSLRNPIVEQVVTETLRTVRDIWQHYGKGEENFFDEIHVELGREMKNPAKARESLTKRVTENENTNHRIKEILKELQNEGVAEVKPYSPSQQEILKIYEEGIYQSLETVDDTIEKIRKNNSPTKRDITKYKLWLEQGYISPYTGKTIPMSRLFTTDYQIEHVIPQSRYFDDSLSNKIICESEVNQLKDNQTAYEFIRNHGTEKVDLGAGKTVEVFTLEQYENHCNQYFKKNKPKLKKLLSEDIPEGFIQRQLNDSRYISKLIKGLLGNLVREENEQEATSKHIVPVTGAITSKLRQDWGLNDKWNELVAPRFQRLNAITNSDGFGYWDEKINAFRTQVPDEISKGFSKKRIDHRHHALDALVIACCTKKHTNYLNALNAENKNYGLRDSLLIKNENGHYTKYFQLPWNNFPTEAKSVLEKTIISFKQNTRVINKTNNKTWQWIEKDGQLKKILVKQTKGNNWAIRKPMHEETVSGIVNLAWVGTKKGNITTATRKTVDKTFTLSKIEKITDTGIQKILSNYLKQEKFKELNSKGEMSYNSDLAFSPEGIEYLNKNIKKFNEGKSHQPIFKVRIYENGSGRFKLGEGGDKKGKYVQGAPNLFFAIYWDENNKKRIYETIPLNEIIEHQKQIANLPKNERTSVPINHTKGQFLFSLSPNDLVYVPSDEEIDNPTLVDFNNLTNEQVESLYNVNDFSSTTCYFTPNPLAKAIREKEVDMSFNEKKRKITGSFDTKTASLNGVQIKDICIKLEVDRLGNIINIKND

SEQ ID NO: 5482 - protein, 1488 aa, synthetic construct
  REGION 1..1488: note = Synthetic
MAKIVGLDLGSNSIGWAVIDNEKHCIEAAGSRIIPMDAGRLGDFEKGNSVSFTEERTRYRGMRRLRERYLLRRERLLRVLRIMGFLPEHFASQLSRYGQLPVDKEPKLAWKEDNDGNHVFLFQSSFEEMVSDFRKAGIAEKIPYDWTIYYLRQKALSKPISKEELAWILMQFNQKRGYYQLRGKVDQSIVPDEEKQEEKSYLELKIIKVEDSGEKDKKGKSWFNITLENGWVYKRPLLSKPDWEGKTRGFIATFKLDKDGTHKDDTPKLSSPSEDDWGLRKIKTENDIRQSGKTIGSFIYNSLIYHPDRKIIGDLVQTIDRELYKEELRKILDTQSQYMHELKDMNLYKKCIEEIYPSNEAYRNSISSRGFTYLLVEDILFYQRPLKSKRSLIANCPFEQRHGKAIKCIAKSHPIYQEFRLWQFLSNLKIYKDEEDITATLLPDGDSYANLYDYLSSIKEADQQILLRYFRIGKKDMPHYRWNYAQERKYPMGETLTVLLGGLRKAGIETSFLTSENELLLWHLLYSVDDQIQYSKALKKIAHKQGWNNQRSDAFCQAFDKLTVYKEKDYGAYSAKAFKRLLPLMRRGRYWKESAIDVQTLSRIEHIITGEEDSTLTPKVREVFKGLSSIQQFQGLQTWQACYLVYNRHSESIDAQKWTKPEDIDLYLAKFRHNSLNNPVVEQVVTESLRVVRDIWKQIGHIDEIHIELGRELKKTKAEREYLSQSILKGETTNQRIRLLLTELMNPELEVENVRPQSPSQMEILKLYEEGAMQSGAEIPDDIMDIQKRFTAAKNQPTTAEVKRYRLWLDQKYISPYTGRPIPLAKLFTQAYEIEHVIPQSRWFDDSMSNKVICEAEVNKLKNRELGHEFIAHHQGERVSLNLGGTVEILSLEAYEKLVKTTFPNPKKREKLMLDDIPEDFTSRQMNDSRYISRLLLHLLSNIVRTEDEEGHHEESVTSKNVIPCNGTITDRLKREWGINDVWNRIILPRFERMNSITNSNEYTATTENGHIVPQVPLNMRQGFNKKRIDHRHHAMDAIIIACATRNHINLLNNENAKGATRYDLQRTLRTTDYYVDEHGNKHTCPGNFIKPWPTFTEDVYRALETIIVSFKQNQRIINKTSNYYTIIENGKPTIQKQKKGDSWAIRKPLHKETVFGEVNLQLKKRIKIKDALANPKSIVDRELKEKIEKFLSLHHSNKQIIDYFDRHKDIWPEASDGRIEVYYYTKDTEDRYFATRKDLISIFKDITTMSAAQKAIDSITDSGIRAILQAHLSLEGNNPAEAFSPDGLERMNRNIYNLNREHCHMPIKKVRVYEQANKFSVGSHGQKATKYVEAAKGTNLFFVIYNDKNGSRGYATVPLNVVIELQKQYEKCWKEHLTDRLQQKDLELMPVGAHLLYILSPGDLVYVPTNEERKNGITSPNPNRIYKVVSMTGIQFMCISHRVAAPIVNKMEFTTSNKMEKALTGEMIKENCIPLKVDHLGNIIKIG

SEQ ID NO: 5483 - protein, 1487 aa, synthetic construct
  REGION 1..1487: note = Synthetic
MAKILGLDLGTNSIGWAIVDNEKKCIEGAGSRIIPMDAGLMGDFEKGNSISFTAERTKYRGTRRLHERFLLRRERLLRALNIMGFLPTHYAEQLDRYGKLPANKEPKLAWREGKDGKQVFLFKSSFEEMLNDFHNAGISQNIPYDWTIYYLRKKALTQPLSKEELAWVLMQFNQKRGYNQLRGKDDDDTQDSSNAMEYHELQVINVEDSGEKDKKGGSWFNITLENGWIYRRAFRIAPDWKGKTRPFIATYKLDKDGNRKDGQPSLRSPEEKDWGLRKIRTQHSIDQSGHTVGEYIYNILISNPNQKIIGEAVRTIDRNYYLDELHRILNKQREFIPELNDRNLYAKCIEDLYPSNDAYRNSIAKRDFTYLLADDILFYQRPLKSKLSLIDDCPYEQRNGKPIKCIAKSHPLYQEFRLWQFISNLRIYREDIDITYTLLPNDEAYSSLYTSLAAMKDIDESGILRYFKIGKKEATQYRWNYVRDKKYPMGETRTVLLEGLHKAGIPDSFLVADKELHLWHILYSVDDTREYEKALYTFAIKQGWDKEQCESFVQAFKRLTVYKEKEYGAYSAKAISRLLPLMRRGQYWNAESIDDATLIRIEHLITGEDDATLSNSIRERFRGLLNIQQCQGFNTWQACYLVYGRHSEAAEAKKWNNPSDIDQYLNEFRHNSLNNPIVEQVVTESLRVVRDIWKQYGKPDEIHIELGRELKKTKEERERMSQSISEGEATNQRIRLLLAELMNPDCNVENVRPQSPSQHELLKLYEEGIMQSGIEIPDDIRDIQKRFNNAKNQPTHSEILRYKLWLDQKYISPYTGRPIPLAKLFTSAYQIEHVIPQSRWFDDSLSNKVICEAEVNQLKSRELGHEFIVNHQGEKVPLNMGGNVEILSVEAYEKLVKELFANNRRKREKLMLDDIPEEFTSRQMNDSRYISRLMLHLMSNIVRTEDEDGKCEEAATSKNVIPCNGNITDRLKRDWGVGDVWNRIILPRFERLNAITDTTLYTATTAEGHTIPQVPLDMRQGFNKKRIDHRHHAMDAVVIACCTRDHVNLLNNEAAKSDKKRFDLQHKLRNKGFYLDEKGHKHERFTEFIKPWPTFNEDLFNCLQNIIVSFKQNLRVINKTTNHYTMLRDGKRVSVKQSKGDSCAIRKPLHKETVFGEVNLQLKKKVSIKKALADINSIVNRELKEKIKEKKSLGYSDMQIEEFLDKNKDVWSEAANGKIEVYYYTKETNDRYFATRKDLLSFMSDCTTIAAAEKAIDSITDSGIRSILRAHLSAEGNNPVEAFSADGLERMNFNLKNLNGGHNHMPIKKVRVYEQANKFSVGTSGQKATKFVEAAKGTNLFFVIYTNSNGSRGYATVPLNIVIALQKQYEKHWKDHLVERLCHDDLSLIPKNASLLYVLSPGDLVYVPIEEVVPTSNTMIDSDRLYKVVSMTGVQFMCIHHKVAAPIVNKLEYTTSNKMERALTGEMIKEVCIPIQVDRLGNITKIG

SEQ ID NO: 5484 - protein, 1487 aa, synthetic construct
  REGION 1..1487: note = Synthetic
MKINLGLDIGTNSIGWAIVETTDAGKPIRNIAAGSRIIPMSQDILGNFDSGQSHSQTAERTNFRSIRKVRERSLLRRERLHRVLNILGFLPEHYSNQIDFEKKLGQFIPGSEPKLSYHTQFIFANSYAEMLLDFSRHQPALLAEGRIVPHAWTIYYLRKKALTEKIEKEELAWLLLNFNQKRGYYQLRGEEEDETPNKLVEFHTFNIVDVQAAERKKNEEDTWYNIQLENGWVYRRTSRAPLDWIGKRKEFIVTTELNSDGTIKLDKDGKEKRSFRAPDENDWTLLKKKAEYDLSHSSKTVGAYIYDTLLQNPNQKIKGKLIRTIEREFYKTELQQILHTQKKFHPALNGRKAYSLCIEELYRQNELHKHNIRQKDFSYLFVDDIIFYQRPLKSKKSLISNCNHESKLSPKGEVIPVKCIPKSHPLFQEFRLWQFIQNLRIYEKDTDVNITDELLKSEQDWERIFEWLNDRKDIEQKILLKQFFKLKKPDEYRWNYVEDKAYPCNETRSQILARLSKVESVPVAFLTKENEEALWHILYSVEDRVEIQKALKTFAQKKELGDDFAETFKKFPPYVKDYGAFSAKAIGKLLSLMRIGKYWQPGNIHPHTLQRIDKITTGEYDESIKDRVRDKAISLKSASDFKGLPLWLASYIVYDRHSEDKEALQWRRPSDISLLPQHSLRNPIVEKVINETLLVVKDIWNGYGHGKEGFFHEIHVELGREMKNPAKKREQMTKQVIGNENTNLRIKALLAELMNDPNVENVRPYSPMQQEILKIYEEGVLHAENDIPEDISKIARQSQLTTAELSRYKIWLQQKYRSPYTGKIIPLNKLFTRAYDIEHIIPQSRYFDDSFSNKVICEVEVNKDKDKNTAYEYIKNNGGKIMEASYGEKINILTVEQYEHLVKNSFSKNRSKLKKLLSEDIPEVFIERQLNDTRYISKVVKNLLSNIVREDNEQETVSKNVISSNGNITAALKQDWGLNDVWNDIITPRFERLNEMTQSSRFGKWVNKEGKLVFQTELPLEHQKGFNRKRIDHRHHALDAIVVACTSRNHINYLNNESAIGKGRSKAEKEKKRYDLKHTLCFKKYNDDTNYKWAFHKPWESFTQDTGSLINDIIVSFKQNVRVINKTNNRYQGWIKNENGELKKGFVRQTKGDNWAIRKPLHKDTIQGLIQLQLKKIVSTSAALKNWEMIVDKDLKSKIKEWKALGQNPSVLLKEQGISRIEIYYWDKEIVATRVKIDESFDSNYIDCITDTGIRKILRAHLAVFNEIQNGKIIEHPELAFSPDGLDALNKEILALNDGKPHQPILKVRTFEPKGNKFNVGQTGNKKDKYVEAAKGTNLFFGVYQDEKGKRVTETIPLHVVIERQKHGLKSVPEINESGDRLLFHLSPNDLVYFPTEEELANWNGIGEISVDRVYKVVSFSGSRLSCLPNAVAKSIIDKFEFTKRNKIEGVDKVMIKNVCFKLVADRLGKVKLCSAFSGEGQLLEGS

SEQ ID NO: 5485 - protein, 1486 aa, synthetic construct
  REGION 1..1486: note = Synthetic
MKRVLGLDLGTNSIGWALIKHNFGTKEGEINDMGVRIIPMSADILGKFDAGQSHSKTAERTGYRGVRRLYQRDNLRRERLHRVLNILGFLPEHYAEHIDFKKRLGQFKDGKEINLNYKPNANGKYEFIFKSSYHEMLVEFKNSQPDLFYIKSNGKETKIPYDWTLYYLRKKALSQPLTKQELAWIILNFNQKRGYYQLRGEEIDDDKTKQFVQLKVREVIDSGEFVKGKPLFDVIFENGWKYDKQVVKTEDWIDRTKEFIVTTKTLKNGDIKRTYKAVDSEKDWAAIKAKTEQDIERSNKTVGEFIYEALIDNPTQKIRGKLVKTIERKFYKEELEKILTKQIELQPQLFTTNLYEACIKELYPRNEAHQNAIKNRDFLYLLMDDIIFYQRPLKSQKSNISGCQFEHQIYLKTNKETGKKEKVNQAVKAIPKSHPLFQEFRTWQWLQNLKVYNKVDTDKGELTDATKQLLPNEESWVDLYDFLQHKKELDQSQFIKYFIEKKLINKTEKDYYRWNYVEDKKYPFAETKAQFISRLTKVEGIDDINTFLDKKTQLGNKDNSPFVSRIEQLWHIIYSVSDINEYKSALEKFALKHNINKESFVDNFIKFPPFKSEYGSYSKKALNKLLPLMRRGKYWNENDISDIVKKRVSEIMERVNAINLKEGYSAKELAEALVDVSDDDVKKQLIKSFIPFKYKNPLKGLNTYQATYLVYGRHSEVGDIQNWKSPEDIDTYLKNFKQHSLRNPIVEQVVTETLRVVRDIWKHHGKSKPNFFNEIHVELGREMKNPAGKREQISKRNTENENTNHRIREVLKELMNDASIQGDVRDYSPSQQDLLKIYEEGVYQNPKVDYSKVSEDEIAKIRRSNSPTQKEIQRYRLWLEQGYISPYTGKPIPLSKLFTHEYQIEHIIPQSRYFDNSLSNKIICESAVNEDKDNKTAFEYLKDKSGSVINGHKLLSLAEYEAHVAQYFKNNRQKLKNLLSEDIPEGFINRQLNDSRYISKLIKGLLSNIVRDEGEQEATSKNLIPVTGSVSSKLKNDWGLNDKWNELILPRFERLNQLTQTNDFTTTNTNGNTIPTVPDDLLKGFSKKRIDHRHHVLDALVVACCTRNHGHYLSALNAEKENYSLRNKLLIVNEQGDYTKAFQMPWQGFTTEAKNQLEKTVVSFKQNLRVINKANNKFWSYKDENGKLNLDKSGKPVKKLRKQTKGDNWAIRKAMHKETVSGKYNIETPKGKIATAVRGSLADIKNEKHLAKITDPQIREVILPNHLKKYVDEKGKINFDIAFSDEGIEDLNKNIVALNYGKNHQPIRKIKFFEVGSKFSISENENSAKNKKYVEAAKGTNLFFAVYWDGKKQKRNYETIPLNEVIAHQKQVAHLPKSERLPIQPNNKKGEFLFTLTPNDLVYVPTDEELTNINAIDFNNLNQEQVNRIYKVVSFTNTRLYVVPFYSAKPIYNKVEFTQLNKVEFTDEKIFMFKLQVDRLGNISKA

SEQ ID NO: 5486 - protein, 1486 aa, synthetic construct
  REGION 1..1486: note = Synthetic
MKKILGLDLGTNSIGWALIKNNFNKKEGEIEDLGVRIIPMSADVLGKFDAGQSISQTAERTGYRGVRRLYQRDNLRRERLHRVLNILGFLPEHYAQQIDFEKRLGQFKEGKEVKLNYRPNADGKYEFIFKPSFNEMLEQFKVAQPDLFYVKSNGNETKVPYDWTLYYLRKKALSQPLTKQELAWVILNFNQKRGYYQLRGEEIDDEKDKQFVQLKVKEVIDSGEAVKGKPLFDVIFENGWKYDKQIVKTEDWISRTKEFIVTTKMLKNGDIKRTYKAVDSEKDWAAIKAKTEQDIERSNKTVGEFIYETLLEKPTQKIRGKLVKTIERKYYKDELKKILSKQIELQPELFSNKLYNACIKELYPRNEAHQNAIKNRDFLYLLIDDIIFYQRPLKSQKSNISGCQLEQRVYNKTNKETGKKEIVRQAIKGIPKSHPLFQEFRIWQWLQNLKIYDKVDTNKGELIDVTKQLLKNDGDWVALFDFLQSKRELEQKQLIKYFIDKKRIEKSKKDHYRWNYVEDKKYPFAETRAQFISRLTKVEGIDDVDTFLDEKTQLGTKSNSSFVTRIEQLWHIIYSVSDINEYKSALVKFALKHHLDEGSFVNSFIKFPPFKSDYGGYSKKALNKLLPLMRKGKYWNENDISDKVKQRVSEIMERVNALHLKDDYNAKQLAEALANVSDDDVKKQVIKSFVPFKDKNPLIGLNTYQATYLVYGRHSEIGDIQNWKTPEDIDTYLDNFKQHSLRNPIVEQAVTETLRVVRDIWKHYGKSQPGFFNEIHVELGREMKNPASKREQISKRNTENENTNLRIREVLKDLMNDDSIEADVRDYSPSQQDLLKIYEEGIYQNPKADYSKVSEDEIAKIRRSNSPTLKEIQRYRLWLEQGYISPYTGKPIPLSKLFSHEYQIEHIIPQSRYFDNSLSNKIICESAVNEDKDNKTAFEYLSAKGGNVINGHKLLGLAEYEAHVNQYFKNNRQKLKNLLSEDIPEGFINRQMNDSRYISKLVKALLSNIVREEGEQEATSKNLIPVTGSVTSKLKNDWGLNDKWNELILPRFERLNQLTQTNDFTAINTSGNIIPTVPDELLKGFSKKRIDHRHHALDALVVACCTRNHSHYLSALNTEKKNYGLRDKLLIKNEQGDYTKAFQMPWQGFTGEAKNQLEKTVISYKQNLRVINKANNKFWSYKDENGNLNLDKSGKPIKKLRKQTKGDNWAIRKAMHKETVSGKYNIETPKGKIATAVRGSLADIKNEKHLAKITDPQIREVILPNHLKNYVDEKGKIKYDVAFSDEGIEGLNRNIVALNNGKKHQPIYKVKFFEVGSKFSISENENSAKNKKYVEAAKGTNLFFAVYWDEKKQKRNYETVPLNEVIEHQKQVAHLPKNERLPIQPKPKKGKFLFVLSPNDLVYVPTDEELENLDAIDFKYLTTEQNNRIYKVVSFTKTRLYVIPFSVAKAIYNKVEYTQLNKIEFTEEKNVVVKLKVNRLGNITIA

SEQ ID NO: 5487 - protein, 1480 aa, synthetic construct
  REGION 1..1480: note = Synthetic
MAKILGLDLGTNSIGWAVVDNEKKKIEAAGSRIIPMDAGLMGDFEKGNTISFTADRTKSRGARRLHERFLLRRERLLRALNIMGFLPEHFAAQLDRYGKMPIGREPKLAWREGKDGKPEFLFKDAFAEMVDNFRKVGITQNIPYDWTIYYLRAKALTKPLSKEELAWVLMQFNQKRGYNQLRGKTDEDAPEAPNSMEYHELRVVKIEDTGEKDKKGGSWYNIKLENGWVYRRALRIAPDWEGKIRPFIATFKLDKDGNRNEEQPSLRSPEEKDWGLRKIRTQHNIDQSGLTVGEHIYNILLTNPSQKIIGETVRTIDRCYYQDELHRILDKQHEFISELNDRELYHQCIDALYPNNDTYRNSIAKRDFTYLLADDILFYQRPLKSKLSLIDDCPYEQRNGKPIKCIAKSHPLYQEFRLWQFLANLRIYHDDTDITPSLLPTGEAFANLYDYLAAIKEIDEAGLLRYFKIGKKDQPNYRWNYVREKKYPMGETRAVLLGGLRKAGVNETFLTFEKEESLWHLLYSVDDPKQYEKALHTFGHKQGWDNIQIASFTNAFRKLTVYKAKDYGSYSAKAISRLLPLMRRGKYWKVDAIDASTRERIEHLITGEVDENLSSILRERFNGLNDISQCQGLNTWQACYLVYGRHSESADTKIWTKPDDIDLYLQEFHHNTLNNPIVEQVVTESLRVVRDIWRQYGHPDEIHIELGRELKKTREERERMSQSIADGEATNQRIRLLLSELMNPDCQVENVRPQSPSQHELLKIYEEGVMQSNIEIPDDIRDIQKRFTAAKNQPSHSEVLRYKLWLDQKYRSPYTGHTIPLAKLFTPAYQIEHVIPQSRWFDDSLSNKVICEAEVNQLKGRELGHEFIVNHHGEKVPLNMGGAVDILSVEAYEKLVKELFANNRRKREKLMLDDIPEDFTSRQMNDSRYISRMMMHLLSNIVRTENEDGNREETVTSKNVIPCNGAVTDRLKHDWGVGDVWNRIILPRFERLNAITGTNLYTTTTIEGHTIPQVPLDMRQGFNKKRIDHRHHAMDAIVIACCTRDHVNLLNNEATKSNKQRYDLQHKLRVLSYYIDEKGQKHERFSEFIKPWTTFNEDLYNCLQGIIVSFKQNLRVINKTTNRYSVLRDGKHTIEIQSSGDSWAVRKPLHKETVYGEVNLQMKKIVSIKKALKDINSIVNRELKDKIKKMKAMGDTDKQVVEYLDKNKDVWSEAADGKVEVYYYTKDTNDRYFATRKDLLSHMSKCTTMADAEKTIDSITDSGIRSILRAHLAAENNNPAEAFSADGLERMNHNIKSLNGDHNHMPIKKIRVYEKSAKKRQISNFGQKSTKYVEAADGTNLFFVIYLDTTRKRNYKTLPLVDVINLQKRYDNLWKEHIAEILPQGSSMLYILSPGDLVYVPEDGVQPTVATLNHNRIYKVVSCDDIYISCVPFSSAQPVLNKVEYESPNKMKTTIDKKYMIREVCIPIQVDRLGNITKIG

SEQ ID NO: 5488 - protein, 1480 aa, synthetic construct
  REGION 1..1480: note = Synthetic
MKRILGLDLGTNSIGWALVNEDERKIEGLGSRIIPMTQDILDTFSGGKPLETQTAARTHYRGMRRIRERYLLRRERLHRVLNVLGFLPLHYAQEIDFQKHYGQFVGESEPKLNYNNRNFIFADSFEEMLNEFKQLQPQLFYTRADGKETKIPYDWTIYYLRKKALTDKIGKEELAWIILNFNQKRGYYQLRGEDDADATRTVQTRMYFDTQVIESIIDTGSVYKGLKVIQIILANGDSGKYFSKEVPNWVGLQKSIIATVDLDKEGNDRFEDDGTLKRRFSIPTEEDWEKKWKLIKIKTEKEIIGANKTVGAYIYDSLLQNPSQKIRGKLVRTIERKFYKDELIAILENQIELQPELFTEDLYSDCVRELYRNNEAQQLTLGKKDFVHLFVEDIIFYQRPLRSQKSSIGNCSLEYRIYKDTESNQVKEYLKAVPQSHPLYQEFRVWQWLSNLKIYRKEDDADITTEFLKSTDDYASLFEFLMTQKEVGHTDILKQLLTPTLRVKFQGAKAVTFNKEVDKEIAKYRWNYVFDDSKDKEEDKSKKYPCNSTGYEIRRRLAKVVNVPDGFLEITDTKEVEVKKGQNNGQKITVSLGTREHQLWQIIYSVTDKKEYISALEKFAKKYFLDKESFVGNFEKFSPFPSEYGAFSEKAIKKFIPLLRLGKFWHWEAIDSKTQDRIGKIISGEYDENIKTRVREKVINLTDNIHFQGLPIWLASYIIYDRHSEAEIAGKWDSIAELEQYLEDFKQHSLRNPIVEQVVTETLRVVRDIWKKYGKGAKDFFSEIHVELGREMKNTADDRKWLASQVTNNEATNLRIKALLAELKENSDGKLPVENVRPYSPMQLYALRIYEDGVISSKVDLPEDIIKISKTAQPSKSELQRYKLWLEQKYRSPYTGQAIPLGRLFTEDYQIEHVIPKSRYFDDSFNNKVICESAVNQLKDKQLGLEFIKNHHGSKVECGMGKVVEVFTEEAYQTFVKEHYSKNKTKRQNLLLEDIPERMIARQMNDTRYISKFISALLSNIVRADKEDDGVNSKNLIPGNGKITTVLKKDWGMDAVWNDLILPRFERMNQLTNSTTFTYWNEQYQKFLPVDYSPADSKRIEKKRIDHRHHAMDALVIACMTRDHVNLLNNQSAKSETSRYDLQYKLRNRSKETWIDKKTNEQVERAVFKEFKKPWDDFTVDAKNALETVVVSFKQNLRVINKATNNYQKWVDENGVKVKEYVKQEGTNWAIRKPMHKETVSGKVILNRIKVPKEKILTATRKSVDTSFDVKTINSVTDTGIQKILSNYLTYKDNNTELAFSAEGLEEMNANIKQFNAGKSHKPIRKVRIFELGSKFPLGESGNKKDKYVEAAKGTNLFFAIYSDEDGNRSYETIPLNVVIERLKHGLSEVPKKNEKGRTLLFNLSPNDLVMVSDERGSKIEIYKMVSCTGTQCFFIPNNIATPIVQTTELGSNNKSEKTWNGVMIKQVCMKLKVDRLGNI

SEQ ID NO: 5489 - protein, 1479 aa, synthetic construct
  REGION 1..1479: note = Synthetic
MKKILGLDLGTNSIGWALIEQDFENKQGEILGLGSRIIPMSQDVLGDFGKGNSISQTAERTGYRGVRRLRERHLLRRERLHRVLNILNFLPSHYASQIDFEKRLGKFKENTEPKIAWNNIKSDDEEKETYEFLFQSSFEKMVQDFKSKGYDISIPYDWTIYYLRKKALSYKIDKQELAWIILNFNQKRGYYQLRGEEEEENPNKCIEFYSLKVIDVKADEEPNRKGEVWYSLTLENGWVYRRSSKTDLADWKDKVKDFIVTTDVNDDGSVKTNKEGEEKRSFRAPKEDDWTLIKKKTEQEITQSKVTVGTYIYDNLLKNPNQKIKGQLVRTIERKYYKEELQQILQKQIALQPELFTDELYIDCVRELYKSNEAHQTQLGKRDFLHLFLNDIIFYQRPLKSQKSSIGKCTLEYRVFKDKDGVEQTQYLTTIPKSNPLYQEFRVWQWLHNLKIYLIEGDKDVTEQFINSNVDVEQLFEFLMEQREVDHLDILSYFLLPIVKNKFPNAKGRALKTELAIEVAKYRWNYVYDSDKNESKKYPMNETRYEIHRRLKKVINITDDFLSPDKEQHLWHIIYSVTDKREYERALKSFSKRYNLDESSFVDNFIKFKPFDSEYGRYSLKAIKKLLPLFRVGKYWSWDAIDENTKARIEKIITGEYDDTIKDRVREKSQKLTNEDHFQGLQLWLAQYIVYDRHSEANSAGKWNSVNDLEEFLNDFKQHSLRNPIVEQVVTETLRVVKDIWKQYGKGIKDYFDEIHVELGRDMKNTADKRKKLSSVIAENENTNLRIKKILIELMSDSSIQNVRPYSPMQQEALKIYEDGVLKSNIVIPDDIDKISKKAEPSKAEIQRYKLWLEQKYCSPYTGKPIPLSKLFTAAYEIEHVIPQSRYFDDSFSNKIICEAEVNSLKDKQLGLEFIKNHHGQKVTTSSGEVEILSETAYEAFVNEHYTKNRGKKDKLLLDEIPEKMILRQLNDTRYISKYIANVLSNIVRTEDADDGVNSKNIIPGNGKITTKLKQDWGLNDVWNQLILSRFERMNQLTKSEEYTSKNSSGKTIPTVPFEYSKGFQKKRIDHRHHALDALVIACATRDHVNLLNNKHAQSKERYDLQHKLRNTEQWMTKNGETRNKFTTFKKPWDNFTAEAKIELEHTVVSFKQNLRVINKATNYYEKIVNGKKTKVAQKGVNWAIRKSMHKETVSGLVDLPRVKVPKGKILTATRKSLDASFNSKSIESITDTGIQMILINHLEQYDETKVTIAEKGVAEKIQRRKQLIKDKVLLEHPELAFSPEGIEDMNKNIVQLNGGKFHQPILKVRVFELGSKFKVGYQGNKKAKYVEAAKGTNLFFAIYWDETKNKRVYETIPLNIVIERQKQGLSSVPEANEKGNKLLFHLSPNDLVYVPSEDESTSLIDLNNLSSEQIKRIYKVVSFTGTQMFCVIQNMATSIVNKMEFSSLNKMERSLDNTMMKDVCVKLKVDRLGNIQKA

SEQ ID NO: 5490 - protein, 1478 aa, synthetic construct
  REGION 1..1478: note = Synthetic
MKTIMVKNILGLDLGTNSVGWALIKQDFENKQGDILGMGSRIIPMSQDVLGDFGKGNSISQTAERTKYRSVRRLRERFLLRRERLHRILNVLDFLPEHYASQIDFTKKFGKFKEETEPKLAYNNDGFIFKKSFEEMISDFKTHQPEPLENNKKVPYDWTIYYLRNKALSHKIEKEELAWILLNFNQKRGYYQLRGEDFEEEKDKVFVRLKVDRVVDSGENVKGRILYDVYFENGWKYEKQIVKTEDWIGRTKEFIVTESILKNGDTKRTFKTVDSEKDWIAIKAKTEQEIDKSLKTVGAYIYETLLQNPKQKIKGKLVRTIERKFYKAELKQILEKQKEFHPELRQDDLYSDCVRELYKNNEAHQLTLSKKDFVHLFMEDIIFYQRPLRSQKSSISNCTLEFRKYKDENGTEHTQYLKAIPKSNPYYQEFRIWQWMYNLNIYKKEDDTNVTKHFLNTKADFESLFEFLNNRKEVDQKALLKHFKLNDKTHRWKYVEDKKYPCNETKTMISERLKKVENVSDDFLTREIEQKIWHIIYSVNDKVEYEKALKSFAEKNNLDENSFFEAFKKFPPFKSEYGAFSEKAIKKLLPLMRLGKYWDDDEILKYSDIYFKNIEYLLGVLKQKDENISDDDRQNWNKSINNKLREELEIFQNAEIESFQGLRLHIAQYILYGRHSEAAMLGKWNSADDLEEFLKEFKQHSLRNPIVEQVITETLRVVKDIWVKYGNGAKDFFNEIHIELGREMKLPAEDRKKITNQISENENTNLRIKALLAEMMADSSVENVRPFSPMQQEILKIYEDGVLNSDIEIEDDILKISKTAQPSSSDLKRYKLWLEQKYKSPYTGQIIPLNKLFTPEYEIEHIIPQSRYFDDSFNNKVICEAAVNKLKDNYIGLGFIKQFGGTIVECGNGKSVTVLKEDQYEDFVKKHYANNRSKRNKLLLEDIPEKMIERQMNDTRYISKYISGVLSNIVRTEDGTDDGVNSKNIVPGNGKITNTLKQDWGLNDVWNDLILPRFERMNQLTNSTDFTAWNENHQKFLPTVPVEFSKGFSKKRIDHRHHALDALVIACATKDHVNLLNNQSAKSDTKRYDLKKKLMKFEKVVYKNPHTGEKIEREVPKQFLKPWETFTVDAKSRLEIIIVSFKQNLRVINKATNYFEKYIEKDGAKVKGRVEQTGTNWAIRKPMHKEFVYAKVNLPWVKVGGKEILTAIRKPLDISFDEKKIRSSITDRGIQKILLAHLEKYKGILDETGKIIPSEILAFTPEAIEEMNRNIIELNDGVFHQPIFKVRVFEKGTGRFPVGQSGNKKDKYVEAAKGTNLFFSIYEDKEGKRSYETIPLNEVIERQKQGLNPVPLENKKGHKLLFHLSPNDLVYMPEEGEFTEGIFNFNDLNKEQVKRIYKVEKTSGSECYFVRQDIAYLIKQYDAKTKIGELESQNKLQVTMSEDRGKIVNTCIKINCDRLGYINILTKEKIKKLFDEYR

SEQ ID NO: 5491 - protein, 1478 aa, synthetic construct
  REGION 1..1478: note = Synthetic
MKKNVLGLDLGPNSIGWALVEYIKNLETEGFSPSGIVGLGSRIIPMDAAMLSDFDNGNLKTQTAERTRYRGVRRLHERYLLRRERLHRVLNIIGFLPEHYAKYIDFGKKPGKFLLDSEPKMAYSLNEETGKYDFCFKESFAEMIQDFLEKQPDLVKDGKKVPYDWTIYYLRKKALTEKIAKEELAWLILHFNQKRGYYQQRGEEEDININETKEYQKLQVVSVEDSGDRKGDAIWYNVLLENGDVYKRQSKIPLDWVGKTKEFIVTTKLDKDNNEKRSYSIPTADDWTLVKKRTEKEIDESHKSVGTFIYDRLLSDPNQKIKGKLIQTIERKFYRKELNQILKKQREFHPELNNPELYTLCIKDLYRSNEAYRNSIQNKDFVYLFIDDIIFYQRPLKSKKSLIEDCQYEYRTYKHPATGIVEKVYLKCISRSHPLFEEFRLWQFLKNVKIIAKGDTSDVTALYLPDEEAYVALFDRLKEKKEVTRKSFLSSIKGAKLKEDAYEWNYGDRSLPMCPTHAEFVSRLKQVGLDDSFLTAEVEEHLWHILYSVSDKGELVQALKSFAVRYEIANVEDFVAEFKKVKPFDKAYASYSSKAMKKLLPLMRMGKYWDKNAFDAKTKERIDRLIDGEDCEAISEGVREKVAKELGQDLNISLFSGLPLWLACYVVYNRHSEASETARWQSPKDIDDFLKDFRQHSLRNPVVEQIVTETLRVVRDVWEKYGDLSEIHLELAREMKSPANKRQEITRKNQENENTNMRIRALLTEMRNEGKDVRPDSLSQQERLKIYEEGVLGSAIEIPEDIIKITRQKQPTQSEIIRYKCWLEQGYCSPYTGKPIPLGRLFTSEYDIEHVIPQARYYDDSFTNKIICESAVNRDKGNLLACEYIRQKGGTWVDLGNGDKREVLRYEAYEDFVKRNFKNSPLKKKKLLMDEIPDSFIDRQMNDTRYISRYVKGLLSNIVREENEQEATSKNLIPVTGAITAKLKEDWGLNDVWNKIITPRFERLNELTKSNSYGYWVDRQTFKIQVPEENQRGFSKKRIDHRHHAMDALVIACTTRSHVNYLNNQSAKEGDSQKREREKKELFIEKNRGKKLLRKPWDTFTEDTQKAMGDIIISFKQNLRVINKSTNKYQKYEGGTKKLVHQVGGDNWAIRKPLHKETVYGRVNLQLKRTVTLSVALDNWQMIVDREVRDKIKQLVSEKFDKKQILAYFKKLDNRYARKDISKLEVYYYSDEKEPLVATRKALDSTFTLKNINSVTDTGIRQILLRHLEKYGGDTENAFSPEGLEDMNKHIRTLNNGKYHKPIYKVRVSEALGSKFNVGERGNKKAKYVVAAKGTNLFFAIYQSKDSSKRSFETIPLEIVIDNLKRGESAVPTTNNDGDKLLFTLSPNDLVYVPTEDQLERGNIDIKDVAGNKSRIYKVVSCTGNEVHFIPYSIAWPIIQVTELGANNKAQRAWSGEMIKETCLKIEIDRLGEIKQIK

SEQ ID NO: 5492 - protein, 1478 aa, synthetic construct
  REGION 1..1478: note = Synthetic
MMIKNILGLDLGTNSIGWALIRQNFENKYGEILGMGSRIIPMDQKVLGEFGAGNSVSQTAARTDYRGVRRLRERFLLRRERLHRVLNVLNFLPEHYALQIDFEKRFGKFKEESEPKLAYNNDGFIFKNSFDEMLTDFKNHQPQLLENDKKIPYDWTIYYLRKKALAHKIQKEELAWILLNFNQKRGYYQLRGEEEEENPNKLIEFYSLKIIDVLEDEPQKGKSDIWYSLILENGWIYRRSSKTSLLDWKDKTRDFIVSTDLNDDGSVKTDKDGNEKRSFRAPSENDWTLIKKKTEQEIDKSHKTVGTYIYETLLKNPKQKIKGKLVRTIERKFYKKELKQILEKQKEFYQELKSDDLYNDCVRELYRNNEAHQLTLSKKEFVHLFMNDIIFYQRPLRSQKSSISNCTLEFRKYKDANGVEHTQFLKVIPKSNPFYQEFRIWQWIFNLNIYKKDDDVNVTKEFLSTTKDFENLFEFLNNRKEIEQKPLLKFLLEQKEFKGKLLNAETEKFRWNYVEDKKYPCNETKTMISLRLDKVENISDDFLTRDIEQKIWHIIYSVNDKIEYEKALKTFAGKYKLDENSFFEAFKKFPPFKSEYGSFSEKAIKKLLPLMRLGKYWNYENINEHSKDRIQKIITGEFDENIKDKVREKAIHLTVENDFRGLQLWLAQYVVYGRHSEGSMIDKWNSADDLEEFLKGFKQHSLRNPIVEQVITETLRVVKDIWLKYGNGAKDFFNEIHIELGREMKQTKDERVEATKRITENENTNLRIKALLAEMMSDNSVEDVRPYSPMQQEILKIYEDGILNSDIEIDDDILKISKTAQPSSSDLKRYKLWLEQKYKSPYTGQIIPLNKLFTLEYEIEHIIPQSKYFDDSFSNKIICESAVNKLKDNYIGLGFIKQFGGTIVECSFGKSVKVFEAEEYEDFVKKHYANNRGKRNKLLLEEIPEKMIERQLNDTRHISKYISGVLSNIVRQEDGTDEGVNSKNIVPGNGKITTQLKQDWGLNDVWNELILPRFERMNQLTNSTDFTSWNENHQKFLPTVPVEFSKGFSKKRIDHRHHALDALVIACATKDHVNLLNNQSAKSDTKRYDLKKKLMKFEKIIYKHPQTGNRVEREASKQFLKPWDNFTVDAKNKLETVIVSFKQNLRVINKATNYYEKYVEKDGVKTKERVEQTGTNWAIRKPMHKEFVYAKVNLPWVKVGEKEILTAIRKPLDISFDEKKIRSSITDTGIQKILLSHLENYKGAFDEKGKEIPPEILAFTPESIEEMNKNIIELNNGVFHQPIFKVRVFEKGTGRFSIGQSGNKKNKYVEAAKGTNLFFAIYEDKSGKRSYETIPLNEVIERQKQRLNSVPLENKKRDKLLFYLSPNDLVYVPEEDEFMDRGVSLNNLNREQIKRIYKVEKTSGTECYFVRQDIAYLIKQYDSKTKIGELESQNKLQVTMSEDRIKIAEVCFKIDCDRLGDINILTKEKVKKMFDGYR

SEQ ID NO: 5493 - protein, 1476 aa, synthetic construct
  REGION 1..1476: note = Synthetic
MTKKILGLDLGTNSIGWAIVNEEDGQRKLSKAGSRIIPMDATLMGDFEKGNSISQTATRTQARGVRRLYERRALRRERLNRVLTILGFLPDHYLSELNRYGQLNKGAEPKLAWVKQDGESTFLFQQSFNEMTREFAQVHPELLSKGKKIAYDWTIYYLRKKALTQPISKQELAWILLQFNQKRGYNQARGEEEETEKENKRQEYICQKVVSVRDTGEKSKGKPLYEIILENGWSFFKPSSSPVDWEGKVKDFIVTTTLNEGGSEALDKEGKVKRTFRAPAEDDWGLRKIKTQHDIDVSDKTVGEFIYATLLHNPDQKIIGQLVRVVDRKYYEDELHRILETQKQFIPELQDADLYQASIEALYPQNEAYRNSIAKKDFTYLFQKDIIFYQRDLKKKKSLISECPYEYHVYKDENSEWQRKYLKCIPKSHPLYEEFRLWQFVENMVLYRQTANGMGKEDCTNELIPNKAELVQWLLTQKEVSEKSLLTHLIGKKYVGYSWKYVQDKSYPAAPVTTLITNILTEAGGSVTTEKIEHIWHMLYSISDKAQLTAALKHYAEENNLSEIFVEKLGKQKPFASDYGAYSEKAIRKLLSLMRCGEYWSEDNIDEKTKKRIEHILTSEVNETISDRVREKLAEKNEVCDFQGLPLWLAEYVVYDVRRNDTKWEKPEDIDAYLQAFRLHSLNNPIVEQVVMETLRTVRDIWKQEGRIDEIHIELARDLKKNSDQRKKAMLTNQTNEKANLRAKLLLQEFMNPEYGIDGVRPYSPSQLELFRIYEDGVLRANNTEEDIQRIINELSELKQPSPADVRKYRLWLDQKYVSPYTGQIIPLAKLFTPAYQIEHIIPQSRFFDDSMSNKVICEAEVNARKDRMLAHEFISACGGEKITLSGGKVVPILTLGEYEDLVKRNFANDEFKQEKLMLDDIPQKFIDRQKNDTRYISRLVMFLLSNIVREKNEKGEYEPEATSKNVIPCNGNVTARLKEDWGIKDIWDQIILPRFERLNQLTGKDIFTYNKDGHIAPKIPIELTKVNKKRIDHRHHAMDAIIIAFATRNHVALLNNEHALDGKDKLRYDLMMKLRMKGKFIAPYEGFQKDVRQVLENIIVSFKQNLRVINKSNNHYTHFKNGEKCVEKQTKGDNWSIRKSLHKATIFGEINLRRKKYVNLAYALQHVDDIVEKDLRAKLRELVAEGKDEKQIKKYFVSEPDVWADVNLKKIEVYYFTKDTKDHFYAVRTDVNEDFTADYIRNKVTDEGIQKILLAHIERCNNDPKLAFSPDGIEQMNADIVQLNNGVPHKPIRKVRIFEKAEKFAIGQIGAKSKKFVEGDKGTNLFLVVYAAIASDGKEERSVVSVPFRSAVECQKSGLTDWKIVIDNWVRDNNLVDNKASLKYILSPGDLVYVPSPEEIECGEYRLSRDRIYKLVSFADQAVYFVPASVASPILDKVEYTQLNKVSRTPNEELIRDICIPIQIDRLGNILKVLV

SEQ ID NO: 5494 - protein, 1474 aa, synthetic construct
  REGION 1..1474: note = Synthetic
MSKKVLGLDLGTNSIGWALVNYIESIQENKFQPSDIIDIGSRIIPMDAATLSDFDNGNLKTQAAERTRYRSARRLLERYLLRRERLHRVLHILGFLPEHYAKCIDFQKKQGQFLPNTEPKIAYFLNDETGKYEFYFKESFAEMIQDFIKCQPELVKDGKKVPYDWTIYYLRKKALSEQISKEELAWLILHFNQKRGYYQQRGEEEDINEAKEYQKLRVVNVEDSGDKKGDAIWYNVLLENGDTYKRLSRMPLDWIGKTKEFIVTSKIDKNNNERRTYSIPTEGDWTLVKKRTEKEIDESYKTVGSYIYDTLLIDPDQKIKGKLIQTIERTFYRKELNQILNKQKEFHSELNNPQLYSLCIEDLYKSNKAYCNSIRNKNFEYLFIDDIIFYQRPLKSKKSLIENCQYEYRTYKNPKTEEVEKECLKCISKSHPLFEEFRLWQFLKNVRIIRKEDRVDVTALYLPDDDSYVALFDRLKEKKEVAEKSLLSLVKSAKLKDTEYAWNYGDRSLPMCPTHAEIVTRLKHVKLDENFLTPQIEEHLWHILYSVSDKQELEQALESFAIKYEIGHLDEFVAEFKKVKPFDKDYASYSSKAIKKLLPLMRIGKYWNENAIDKKTKERIDKIIDGEHCETINEITREKVKKELGEELNITYFKGLPLWLACYVVYNRHSEASETTRWKSPEDIDKFLKAFKQHSLRNPVVEQIITETLRVVRDIWVKHGSLSEIHIELGREMKNPANKRQEITRRNLENENTNLRIKALLSELKNEGNDVRPESLSQQERLKIYEEGVLGSDIEIPEDIIKITRQKQPSQSEIVRYKCWLEQGYCSPYTGKPIPLGRLFTNEYDIEHIIPQARYYDDSFSNKIICESAVNKDKGSMLACEYIRLQGGKNIELGNGKQVLVLSSNEYEDFVKRNFRNSPLKKKKLLMDEIPDDFIERQMNDTRYISRYIKGLLSNVVREENEQEATSKNIISITGAVTSKLKEDWGLNDVWNKIVTPRFERLNKLTNSDSYGYWVDKQIFRVQVPEENQRGFSKKRIDHRHHAMDALVVACATRSHVNYLNNQSAKSSFKETRYDLKMKLCSKNKQGKWLFDKPWNTFTQDTQSALNNIIISFKQNQRIINKSTNKYQKFEDGIKKLDPQASGDNWAIRKPLHKETVYGRVNLQLKKMVSLSVALDNWKMIVDKDIRDKIKLLFDEKFDKKQILVYFKKVGNRYNQRDISKLEVYYFSDEKEPLVATRKALDSSFTVKNINAVTDTGIRQILLRHLEQYQGKAEDAFSPEGIDEMNKNIRILNNGKAHKPIYKVRVSETLGNKFNVGNRGNRKVKYVEAAQGTNLFFAVYQTDEGKRSFETIPLNVVIENLKRGENAASPTNEKGERLLFTLSPNDLVYVPSEDQLENKVSIEDVEKNKDRIYKFVSCTGNEGHFIPYYIASAIVPTTELGANNKAQRSWTGEMIKEMCLKIEIDRLGKITERI

SEQ ID NO: 5495 - protein, 1474 aa, synthetic construct
  REGION 1..1474: note = Synthetic
MKKILGLDLGTNSIGWALIESDFEKKQGKINGLGSRIIPMSQDILGKFDSGVSISQTAERTSYRGVRRLNQRNLLRRERLHRVLNILDFLPKHYSNAIDFEKKLGQFKENVEEKLNYAKNQIGRHEFIFMDSFKEMVKEFKQTQPQLFYKRENGIETKIPYDWTLYYLRKKALSQKIKKEELAWIILNFNQKRGYYQLRGEDVLDESKIEDFYSLKVVEVQETEDKNARGTWYNVILENDWVYKRQSKESLDNWIGKNKEFIVTTNKEKDGSLKLDKAGNVKRNFRAVDSEKDWIAIKKKTEQDVEISKHTVGQYIYETLLQNAKQKIKGKLVKTIERKFYKEEFIKIIKEQLKHHPELQSKTLYETCIQELYPRNEAHQNNIKSKGFEYLFTDDIIFYQRPLKSKKSTISGCQYETRLFKKTVLNKVTNKENEIWQKEPLKAISKSHPLFQEFRLWQFLKNLKIYQKEDVKGNLIDHDITSDLLKTEADWVELFDFLNIKKEIEQKQIIQFFINNKQIEKGKKNNYRWNYVEDKKYPCNETKSQLISRLKKVKNLDLNLFFTSETELKLWHIIYSVKDKIQYEKAIKNFAIKNNIDIDSFVENFKRFPPFKNEYAAYSEKAIKRLLPLMRMGEYWNESEIKQEVKDRAYSIIERLKGIDFNKDKIDEKITDDDIKKQLLKSFIDFKDKNPLKGLNTYQACYLVYNRHSEVNSIAYWKSPDDINKYLEGFKQHSLRNPIVEQVVTETLRTVRDIWQYYGKGKASFFNEIHVELGREMKNPAYKRKASTNRVTENENTNHRIKEILKELQNEGVQEVKSYSRNQQEILKIYEEGIYQSIDVVDDAIEKIRKNSSPTKAEIIKYKLWLEQGYTSPYTGKTIPMSKLFTTDYQIEHIIPQSLYFDNSLSNKIICESEVNQLKDNQTAYEFIKKHGTEKVSLGKNKTVEIFTLEQYEKHCNQYFKKNKNKLKKLLSEEIPEGFINRQLNDSRYISKFIKGLLGNLVREEDEQEVTTKHIVPVTGAITSKLKQDWGLNDKWNELVASRFQRLNTMTNSNNFGYWDTKINAFRVQVPDEISKGFSKKRIDHRHHALDALVIACCTRNHINYLNALNAEKKNYGLRDLLLIKNDKNHYTKFFKHPWDGFPVEAKSVLEKTIISFKQNTRVINKTNNKTWQWAEKEGQLKKVLVKQTKGDNWAIRKPMHKETVSGKLNIPTPKGKIATASRVSLSEIKTRKQLDKITDISIQKILERHLNNYLDDKGKEKFDLAFNADGVEELNKNIKVLNKGKNHQPIYKVRLYEIGSRFKVGNSGNKKDKYVEAAKGTNLFFAIYLNEKDKKRVYETIPLNEVIEHQKQVSNLPKNERTPVPVNHTKGKFLFSLSPNDLVYVPTDEEIDNPSLVNFNNLNKKQVEKIYKTVSCSTYQCFFVHNTISKPIQNKVEFSALNKMEKSIDGIMIKDRCWKLKMDRLGNIISVIR

SEQ ID NO: 5496 - protein, 1474 aa, synthetic construct
  REGION 1..1474: note = Synthetic
MKHILGLDLGTNSIGWALIERNIEEKYGKIIGMGSRIIPMAQDILGKFDAGQSISQTAERTRFRSTRKLYQRDNLRRERLHRVLNILGFLPTHYANVIDFEKRLGQFKENQEPKLPYAKNEEDKFEFIFKSSFEEMVADFRKQQPQLFYTKPNGKESQIPYDWTIYYLRKKALSEKISKEELAWLLLNFNQKRGYYQLRGEDEQADESKSIKFYALKVVKVEEDGKDKKGDTWYNVHLENGWIYRRTSKNFLDWEGKIREFIVTEKLNEDGTIKVDKEGKEDRSFKAVNSEEDWIAIKKSTEDKINYSEKTVGAYIYDTLLQEPNQKIRGKLIRTIERKFYKDELIKILKKQIELQPEIFTKDLYKACIEELYPHNEAHKKNISDRGFVYLFVEDIIFYQRPLKSKKSLIAKCTLEERSFVVEENGKRKEKTEGIKCIAKTNPIYQEFRLLQWFHNLKIYKKDDKTDIDITDELLPTIEAKEQFLEWLNDKASISQKELLKYPPFQLEEAVRKILVQKLEEKPKKKDIEMGLEEYFRWNYVQDKVYPLNETRGEFLKVLKKNKLSPNFLNKETEYRLWHLLYSVEDKVAIESGLTKFAQKYNLPKEFVLAFSKFPRMEKNYGAFSEKAIKRLLTLMRFGKFWDFENIDDKTKERIDKIQTGEYDEKLKNRVREKAIHLTRDEHFQGLPLWLTSYIIYNRHSEVSEIKYWKTADQIELLKQHSLRNPIVEQIINETLQTVREIWEYYGEGKENFFDEIHIELGREMKNPADKRKKMTERITENENTNIRIKLLLSELLNDGVEEVRPYSPMQQELLKIYEEGVYENEQDEKVLEEITKIRKKNQPTTKEINRYKLWLEQGYKSPYTGEMIPLSKLFTSAYQIEHIIPQSRYFDDSLSNKIICEAEVNELKDNQLAYEFIQNFGGQKVPIGRNETVTILKKEHYEDFVQKYFSKNSLKRKKLLMDEIPEDFIQRQLNDSRYISKVVNLLLSNIVREDGEEEARAKKVIVSSGGVTTRLKQDWGLNDIWNKLITPRFERLNQMAGYEKYGSWENKEGKKVFQINTTEQELMKLNKKRIDHRHHALDALIVACSTADHINYLNNESASENKKSERFDLRKKLRRIEKYIKDGKEREAAKEFYKPWETFTQDAKEALEQIIVSFKQNNRVINKSVNYYQKWEKQADGLMKKVFVKQKKGDNWAIRKPLHKDTISGKVNLNRIKVPKGKILTATRKALDATFDEKKIASITDTGIQKILLNYLKYKGSSELAFSPEGIEEMNKNISQFNDGVAHKPIYKVRVFEMGSKFNLGNSGNKNTKFVEAAKGTNLFFGIYVNDKGERSYETIPLNVVIERQKQGLPSCPDRNEKGNRLLFSLSPNDLVYIPTEEEQEHPHLVDFSKLSKEQVKQIYKIVSFTGNRLYAVPNTVAKSIVDKVEFTQLNKIEFIKEKQMCIKIDVDRLGNIITLTSKTIREKFDKYK

SEQ ID NO: 5497 - protein, 1473 aa, synthetic construct
  REGION 1..1473: note = Synthetic
MKNILGLDLGTNSIGWALIEKDTDQKNGNILGTGSRIIPMSQDIKDEFGKGNSISQTADRTKFRSVRRLRERHLLRRERLHRVLNVLGFLPKHYADQIDFKKRLGKLVNETEPKLVYDNKNFIFKKSFEAMLSDFNQHQPLLLADGKKVPFDWTIYYLRKKALTEKIEKEELAWLILNFNQKRGYYQLRGEEEEENPNKMVAFHSLKIVEVIADESQKGKAETWYSLILENGWIYRRSSKTPLYDWKGKQRDFIVTTDLNDDGSIKTDKEGLEKRSFRAPVEDDWTLVKKKTEQEINRSHKTVGTYIYENLLQDPKQKIKGKLVRTIEREFYKDELKMILKNQQKFHPELNDEHLYINCVRELYRNNQAHQTILSKKDFVHLFIDDIIFYQRPLRSQKSSISNCTLEFRKYKNENGTDQTDYLKAIPKSHPLFQEFRLWQWIYNLGIYQKEDDTNVTDELIKNIDGYQDLFDFLNNKKEIRQDILIKFLVEQTGLKGKPLSSVVAKYRWNFVEDKIYPCNETGTQIRTRLAKVENTPEDFLTAETEIKLWHIIYSVNDKADYEKALKTFAEKHNLDTHSFVENFKKFPPFKSEYGSFSEKAIKKLLPLIRLGKYWSWENIDKKTQERIEKILTGEFDEAIKSRVRDKAIHLTEEDHFQGLQLWLASYVVYGRHSEADNLDKWHTVADLEDYLAEFRQHSLRNPIVEQVITETLRVVKDIWLQYGQGAKDFFSEIHIELAREMKNTGDERKRLTSLVTDNENTNLRIKVLLSELLNDGNVENVRPYSPMQQEALKIFEDGVLNSDIEIEDDILKISKMAQPTNTELKRYKLWLEQKYRSPYTGQIIPLNRLFTADYEIEHIIPQSRFFDDSFSNKIICESAVNQLKDKQLGLEFIKNHSGTIVKLGMGKTAKILDVESYNEFVKGNYTKNISKRNKLMLEEIPDKMIERQLNDTRYISKFIISALSNIVRSESNDDGFNSKNVLPGNGKITSRLKQDWGMNDIWNELILPRFERMNKITDSAVFTAWNENNQKFLPIVPLEFSKGFQKKRIDHRHHALDALVIAASTREHINLLNNEHAKSDKRFDLNRKLRKFEKVAYNDPKTGKRIEKEVPTIFLKPWETFTVDAKNSLESIIVSFKQNLRVINRATNYSESYNDENGALRLGKDGNPLKEKIKQSKGDSWAIRKPMHKDFVYGKVHLQNVKLPKDKFITAIRKSLDVTFDLKRIETITDTGIQKILKNYLHSKENKVELAFSPEGIEDMNQHIERYNDGKKHQPIHKVRVFEIGSRFSLGESGNKKTKFVEAAKGTNLFFAVYQDDNKGKRNYETIPLNIVIERQKLGLHSVPTEDAKGGKLLFHLSPNDMVYVPTSEELEDNLASVNIKRLNTAQRKRIYKVEKASGVECYFIRQDIAYLIKNYDAKTKIGELESQNKLQTTMTDDRLKITDVCVKLNIDRLGSIAETFLGNQYGASKKT

SEQ ID NO: 5498 - protein, 1473 aa, synthetic construct
  REGION 1..1473: note = Synthetic
MKRILGLDLGTNSIGWSLIKNDFKNKTGEIEGVGVRIIPMSQDVLGKFDAGQSISQTAERTNYRGVRRLYQRDNLRRERLHRVLNVLGFLPKHYSESIDFNIRLGQFKYQTEEKINYRKNELDKYEFIFFNSFQEMVKEFQEKQPHLFYLKKNGEITKIPYDWTLYYLRKKALNHRITKEELAWLILNFNQKRGYYQLRGEEIDDDKNKQFVQLKVKEVINSGESVKGKPLYNVVFENGWPYDKQITKTEDWIDRTKEFIVSISTLKNGNTKYSYKIVNSEQDWAAIKAKTEQDVERSGKTVGEYIYESLLLNPKQKIRGKLVKTIERKFYKEEFKKILSKQISLQPELFNKELYKACILELYPRNEAHQNNIKDKGFEYLFADDIIFYQRPLKSKKSNISGCQFEVRKFKKKNHETGVLEEVVEPVKAISKSHPLFQEFRLWQWLQNLRIYKKEIKEKDITNSLLKTDVDWTDLYDFLTKKQAVEQKQIIDYFIKKKLISKDEKENYRWNYVEDKKYPCCETKSQFISRLSKTEGITSAHEFLTKDNVEEQLWHIIYSVTDIKEYEKALKKFANKQHIDETSFIEHFIKFPPFKSDYGSFSKKAIEKLLPLMRMGKYWNLDKISNPIKDRSIAIMERVSQLELSENYTSKELAEALIDVSDDDIPKQLIKSFISFKERNPLVGLNTYQACYLVYGRHSEIGNIQQWKSPLDIEKYLLSFKQHSLRNPIVEQVVTETLRVVHDIWKYKGNGSEDFFDEIHVELGREMKNPADKRKQISQKVSENENTNYRIKEVLKDLMTDPLVDGGVRSFSPSHQDLLKIYEEGVYQNPNARYDAVSEDEIQKIRRNNNPSKNEITRYKLWLEQGYISPYTGKPIQLSKLFTTNYQIEHVIPQSRYFDNSLSNKIICESEVNEDKDNKTAYEYLKEKGGSIINGHKLLKIDEYEAHISRYFKNNRTKLRNLLSEDIPEGFINRQLNDSRYISKLIKGLLSNIVREDNEKEATSKHIVPVTGSVTGKLKNDWGLNDKWNEIIAPRFKRLNTLTNSEDFGFWDKKINAFRIQVPDEISKGFNKKRIDHRHHALDALVIACVSKEHINYLSALNAEKKNYGLRDKLLIKNDKGHYTKIFTMPWSNFPVEVKNTIEKTVVSFKQNTRVINKTNNKFWSYKDENGNINIGKDGKPKKILRKQIKGDNWAIRKSLHKETVSGVYEIKIPKGKVATSVRGALTDIKNEKHLAKITDSQIRDVILPNHLNNYLDEKGKPQFTLAFSDEGVEDLNKNITQLNNGKKHQPINKVKFFEIGSKFQIGESGNKSSKYVEAAKGTNLFFAVYWDEKKKKRNFETIPLNEVVAHQKQVAHLPKEDRTPIQTTPEKGKFLFTLSPNDLVYVPTEEERENPHLVDFENLSKEQVNRIYKMVSASNSQCFFLLSNVSTTIKNKFEYSALNKMEKDIDGIMIKDICLKLKVDRLAHISKT

SEQ ID NO: 5499 - protein, 1472 aa, synthetic construct
  REGION 1..1472: note = Synthetic
MNNTENYILGLDLGTNSIGWALILIDKKKQIIRIIALGSRIIPMDSEVLSNFEKGISISKTAKRTEYRGKRRLYERHHLRRERLLRVLHTLGFLPKLFDSQIDFEKKLGKFINHSEPKLPYNEKEFIFKNSFEEMVADFKVKQPQLFYTKSNGTKTIIPYDWTIYYLRKKALTHKIEKEELAWILLNFNKKRGYYQLRGEEENTDKLVEYHTLLVTDITVDKTPNKEGELWYSIHLENGWIYRRSSTISLENWIGTTKEFIVTTEITKKGEIKRTFRAPEEKDWTLIKKKTEDSINKYGKPIGTYIYDNLLQNPNQKIIGKLIRTIERKYYREELTAILKKQIELQPELFNDEIFLDCIKELYKNNTIHQKFLKSKDFVHLFVNDIIFYQRPLKSQKSNIADCSLEFHTYMDKSTGKQQKVHLKVISKSNPHYQEFRVLQWLYNLKIYTKDEDRDVTSQFITSTEDREELYELLMSKKEVDNDTVIAFLLKKVLKKEYPNAKDTAINKELKKRKENYRWNYIYDSEQKESKKYPMNETGYEIRKRLDNIQNIPENFLTKDIVYKLWHILYSVKDKYEYEKAIKKFANKHNINEEAFVENFKNFKPFANDYGNFSEKAIKKLLPLMRFGKYWDINNISTDTQNRITDIINGVDNEDVKLIVREQIEKHQLKNEYDFQGLPLWLAQYVVYNRHSEAGEITKWKSIEDLNTFLKNFKQNSLRNPIVEQVILETLRVVKDIWSQYGKGKENFFNEIHIELGRELKKNNKERKAISDSIEKNENTNLRIKYLLTELKNDGIQDIRPYSPNQQEILKLFEEGALLNEENIDKDIIEISKKAEPTKKEIERYKHWLDQKYISPYTGQPISLSKLFTHEYEIEHILPKKRYYDDSFNNKVICESIINKKKDNSLAMEFINNCGGHTIIGDNGKEYRILSKEEYTNLIKRIYAKNKKKRENLLATEIPEKMISRQLNDTRYISKFVSQTLSNLVRKDEKDEGVNSINIIHTNGVITNILKQDWGLNDIWNQLILPRFERLNKLKNTDGFISYSEKHQKNIPTIPSSEKESKNFQKKRIDHRHHAMDALIIACTTKEHINYINNINSAEKNASKKEKENARFDLRSKLCYKKYNSDNKDNYNWCFKKPWETFTQDAKNILETTIISFKQNLKTIKKSTNYYEKYVEENGKFIKKKVKQDGENPNWTIRKPLHKDTIYGKVELNKKLSEGEIFTANRKSIESLTKKNIEYIKDIDSKKIITDFGIKKILRNYLNHKDIETFTTEDVSELNKNIAQFNNGKDHKPIHKVRIYENSNHKFKLGERGTKNKKFVETAKGTNLYFNVYQNVKGERNYRTIPLTEVIENHKQGNKFITPNIYEKQETYSLLFTLSPGDLVYVPEENEIIEHINFSNLNKEQKNRIYKVVSFSEKDCFFIKQNIAKSIINKQEFSSSNKMEKDLNGIMIKSVCIKLSVDRLGNICKANS

SEQ ID NO: 5500 - protein, 1472 aa, synthetic construct
  REGION 1..1472: note = Synthetic
MTTKKILGLDLGTNSIGWALIEKDFEKNQGKILGMGSRIIPMSADILGEFDKGNSVSQTKTRTSYRSVRRLRERHLLRRQRIHRVLNILGFLPEHYSSQIDFKQRLGQFISEAEPKLAWREMPNNKFDFLFKKSFEEMLSEFKEHQPSLFTNKNKHGESIKIPYDWTIYFLRKKAITHKISKEELAWIILNFNQKRGYYQSRGEEEEDNPNKLVEFHSLKIVEVVADEKPNNKGDLWYSLHLENGWIYRRSSKIDLADWKGKVRDFIVTTDLNDDGTVKTDKEGSEKRSFRAPSDDDWTLLKKKTEQDIDNSTKTVGAYIYDMLLQKPNQKIRGKLVRTIERKFYREELKAILKKQIELQPELFSENLYNNCIRELYRLNDAHQLQLSKKDFVHLFVNDIIFYQRPLKSKKSTIGRCSLEFRTYRNADGNEIKEYLKTIPKSHPLFQEFRVWQWLYNLKIYTKSDDKDVTSEFLKNTEDLESLFEFLMSRKEVDHKDLLKFFFKDLKGKALAAEINKYRWNYVYDSLSDTSKKYPCNETGHEISRRLQKVKNLPSNFATPNIEYHLWHIIYSVSDKTQFEKALKSFSHKYNLDENSFVENFRNFKPFENDYGSYSEKAIRKLLPLMRLGKYWNWSNIEVSTQNRIDKILTGEYDEGIKERVREKAINLSNHLEFQGLQLWLAQYIVYDRHSEAALTGKWKSVKELEEFLNEFKQHSLRNPIVEQVVTETLRVVREIWVKYGASSESFFDEIHIELGREMKNTANDRKRITTQISDNENTNLRIKALLAELKNDSNVENVRPYSPMQQEALKIYEEGVLNSGVEVPDEIVKISRTANPSSSELTRYKLWLEQKYRSPYTGMMIPLSRLFSEDYQIEHIIPQSRYFDDSLTNKVICESAVNQLKSNQLGLEFIKAHHGRIVETGKGNTVKIFTEAEYRDFINQYYDKNRGKRTKLLLDEIPDQMIERQLNDTRYISKYISNLLSNIVRSDKDDDGANSKNIIPGNGKITSKLKQDWGLNDVWNDLILTRFERMNKLTNSTDFTSKNKEGHIIPTIPLELSKGFQKKRIDHRHHALDALVIACATKDHVNLLNNQSAKSDVKRYDLQRKLRNTEKWADTEGKIRDRFTEFKKPWQDFTTDARNELGKIIISFKQNVRVINKTTNKYESYRDENGNLRYDKNGRLKKDFISQVKGDSWAIRKPMHKDTVSGKINLPRIKVPKGKILTATRKNIDTSFNLKTIESITDTGIQKILKSFLAYKNNQPELAFSPEGLEELNKNIAQFNDGKSHQPILKVRLFEVGSKFPLGQTGNKKSKYVESAKGTNLFFAVYRDENEKRNYDTIPLNVVIERQKQGEYSVPETNDKGDKLVFYLSPNDLVYVPTHDEKENLNGIDFKNLSKEQIGRIYKMVSSTGNECHFIPVNVSALIKNYDAKTKIGEFGSLNKQEITLLGDQRIKEVCVKLNVDRIGNITGYAI

SEQ ID NO: 5501 - protein, 1470 aa, synthetic construct
  REGION 1..1470: note = Synthetic
MKKILGLDLGTNSIGWALVKQDFENKQGEILGMGSRIIPMTQDVLDNFGAGKPSKTQTSERTGYRGTRRLRERHLLRRERLHRVLNIMNFLPEHYANQIDFEKRFGQFKSELEPKLVYNNREFIFKKSFEEMLDNFKKHQPQLLTGEKGKDKLVPYDWTIYYLRKKALTQKIDKQELAWILLNFNQKRGYYQLRGEEEEETPNKLVEFYSLKITDVIPDEKPNNKGETWYSLILENGWIYRRSSKTSLGDWKNKTRDFIVTTDLNDDGSIKTDKEGNEKRSFRAPSENDWGLVKKKTEQEIDQSHKTIGTYIYDSLLQNPKQKIKGKLVRTIERKFYKEELKTILQKQIELQPELFNEDLYNDCIRELYRNNQSHQLTLSKKDFLHLFLEDIIFYQRPLRSQKSSIGNCCLEYRKYKIDGIEKKEYLKAIPKSNPYYQEFRVWQWLYNLKIYKKEDDTDITSEFIKTQEDLENLFDFLMSQKEVDHKDILKYFFKNLKGKAQNEEISKYRWNYVYDSDKDESKKFPMNETGYEINRRLNKISNIPSNFLTREIEQQLWHLIYSVTDKKEYEKAIKSFAEKHHLDISSFVENFKKFPPFKSEYGTFSEKAIKKLLPLLRIGKYWNWNIIDEKTKSRIEKLLTGEFDEQIKIIVREKAEKNKLEKETDFQGLPLWLAQYVVYDRHSEADIAGKWNSVNDLEKYLNDFKQHSLRNPIVEQIVTETLRVVKDIWQQYGNGEKDFFDEIHIELAREMKNTADERKRLTNIVTENENTNLRIKALLIEMMNDSEVENVRPYSPIQQEILKIYEDGVLNSNVEVEEEILKISKKAEPTKSELQRYKLWLEQKYRSPYTGQTIPLNKLFTHEYEIEHIIPQSRFFDDSFSNKVICESAVNKLKDNQLGLEFIKNHYGQKVSVELGKEVQIFTEDQYRDFIKENYSKNRNKRNKLLLEEIPEKMIERQLNDTRYISKFISNVLSNIVRNEKDDDGVNSKNVIPLNGKITSELKQDWGLNDVWNNLILPRFERMNQITNSNLYTTYNEKHQKYLPTVPFEYSKGFQKKRIDHRHHALDALIIACATRDHVNLLNNQSAKSEIKRYDLQHKLRHTEKWKDKDGKERDKFTEFKKPWNTFTEDTRNSLETIVISFKQNFRVINKATNKYEKWVEKNEEKKKELVEQKGLNWAIRKPIHKETVSGKVDLPRIKVPKGKILTATRKSIDTSFNLKTIESITDTGIQKILQNYLLSKNGNSELAFSPEGIEDMNKNIEKYNDGKPHQPIYKVRIFEMGSKFPLGQTGNKKDKYVETAKGTNLFFAVYERKETKTRMYDTIPLNEVIEHQKLQVLQNVPNISRTEIPIKKTLEYKGKEVEVSFLFSLSPNDLVYIPNGDENTPSIDFKNLNKEQTERIYKMVSSTGSECHFTQSSISSLIKNYDAKSKIGEFGSLNKQETTLDNLIRIKERCIKLKVDRLGNISKT

SEQ ID NO: 5502 - protein, 1470 aa, synthetic construct
  REGION 1..1470: note = Synthetic
MKYIKYILGLDIGSNSIGWALIQLDLLQKTKRIIAAGSRIIPMDQKVLSDFGKGITISPTAQRTSYRNARHCRERHLLRRERLHRVLHILGFLPTHYDKQIDFSKRYGKFVDNTEPKIAYNEGKFLFMDSFQEMLSDFKSHQPDLFYTKKNGEESKIPYDWTIYYLRKKALSQKISKEELAWIILNFNQKRGYYQLREEEGNKENDFEIISSKIISVIKKDKDKKYNKYWYDIILENGLVYQAAFYNDFVYNWINQDREFIIERTSLKNGAEKVKLSYLPTFDEIDKMDKKEQDKYYKKIKIKTENSIGNKTVGCYIYDHILQNPNEKIKGKLVRTIERKYYKEELKAILEKQIALQPELFTDQLLADCIRELYSKNEAQQRNLAARDFVHLFVEDIIFYQRPLRRQKSTIANCSLESRSYIDKDSHTRKGAPLKVCSKSNPYYQEFRVLQWLQNLKIYEIESDQEVTHEFIKTLEDKQQLFDFLMAQKEIDCEELLKYFLSLTYPNAKEKALKSELKKWKDTYRWNYVYDIGEKSSKKYPMNETRYELKRYLEKVANLPDDFLSSEVEYLLWHLIYSVTDKVAYEKGLKKFAQKHHLDEDSFVESFKKFKPYPSEYGSFSEKAIRKLLPLMRFGSYWNFNHIDKNTQKRIDDLITGVENEEIRTILREKAEKYQLEKETDFQDLPLWLAQYIVYNRHAEASSLEKWTSVNDLETYLNEFKQHSLRNPIVEQVVTETLRVVRDIWQQYGQGQADFFDEIHIELGRELKKTAKEREELSKQNQKNEDTNLRIKALLAELGEDSAIENVRPYSLMQQELLKLYEEGVFSSSMEIEDDIKKIHKKATPSKAELQRYKLWLEQKYKSPYTGQIISLKRLFTEDYEIEHIIPQSRYYDDSLSNKVICESAVNKLKDNQLGLEFIKNHYGEKVHAAGKEVSIFTEEQYKEFVKNHYANNSGKMKKLLLEDIPEKMVARQMNDTRYISKYISEILSKIVRADERDEGVNSKNVILCTGKITTALKQDWGVNDVWNDLILPRFERMNDLTQTSLFTSYNEKYQKYLPTVPMEYSNGFQKKRIDHRHHAMDAIIIACATREHINYINNQHALEKGKDKKEKQEKRDTLRERLCIKKYNNKSEGNYNWVFKKPWDTFTQEVRAALEGIVVSFKQNLRVINKATNYYERWVEENGKYIKKMVKQEGTNWAIRKPLHEETVSGKITLEREKVSKGKILTATRKAIDSTFTEKVIEGITDTGIQKILLNYLKFKKSPEIAFSPEGLEELNKNISLYNDGKPHKPIRKVRIFEQGSKFPLGEVGNKSQKYVEAAKSTNLYFGVYQGKDKRSFATIPLNEVIERQKQGLSSVPEYNEKGDPLLFSLSPNDLVYVSIEGEIIEDIDFRNLSNEQKERIYKAASFTRNECFFIKSSIASLIKNYDAKTKIGELGSQNKLEVTICKGIRIKEVCIKLKVDRLGNISKA

SEQ ID NO: 5503 - protein, 1469 aa, synthetic construct
  REGION 1..1469: note = Synthetic
MAKKILGLDLGTNSIGWALVNLEEQKILGMGSRIIPMDAGDMGKFAEGGSISQTAKRTGYRGVRRLRERHLLRRERLHRVLHILKFLPTHFDAQIDFEKRFGKIKPGIEPKIAFSKDGFLFKDSFNKMLEDFKTRQPDFLKGKNGEDVLVPYDWTIYYLRKKALTQKIEKEELAWIILNFNQKRGYYQLRGESEDEDKKEIKEFCKLLKVVAIEKGDVDKKNNKKSWYKLIFDNGWEYSATFSTEPNWINSEREFLITEEYDENNNIKIVKDKRSDKTGKEKRRITPLPSFDEINLMSKKDQDKIYKKIKARTEFTIRNSNTTVGTYIYDHLLLNPKQKIKGKLVRTIERKFYKEELKQILIKQKDFHPELQDENLLMDCIRELYKNNKQHQQQLSSKDFVHLFLEDIIFYQRPLRSQKSLISNCSLESRTYTDKEGKEHLQPLKVVSKSNPYFQEFRLLQWLQNLAFYKKEDDTNVTSELLPSSRDWEELLDFLNQRKEVDQKQILDFLLKKKLDVKKLPKGETEKYRWNYVEDKTYPCNETRYLIQSKLDKVQEVLSGFLTFEKEMELWHIIYSVNDKIEYEKALRKFAAKNNLDEASFVDSFKKFPPFKSDYGSFSEKALKKLLPLMRFGSSWSWDSISKESQARIEKIITGEVDDKIADKIRDLALKHQLVNEQDFQGLPLWLAQYIVYGRHSEATISGKWNSPTELEAFLKNFKQHSLRNPIVEQVITETLRVVKDIWSYYGSGAKDYFSEIHIELGRDMKNTAEERKRLTNQVTENENTNLRIKALLAEMALDGNVENVRPYSPSQQEILKIYEEGALNSDIEIDEAILKISKTPQPSSSDLKRYKLWLEQKYRSPYTGQIIPLNKLFTSSYEVEHIIPQSRYFDDSFSNKVICEAEVNKLKDKQIGLEFIKNHHGEKVTIGNKTVQILEVSAYEDFVKKNYAKNRSKRNKLLLEDIPEKMIERQMNDTRYISKYISNLLSNIVRDERPGANDDGFNSKNLIPGNGKITTRLKQDWGLEAVWNELILPRFERMNTLTKTNDFTKWNEKYQKFLPTVPLELSKGFSKKRIDHRHHAMDALVIACASRDHINLLNNESALPKKNRSKEEQKKFRIDLQKKLRNQESYLDKDGVKRTSFTEFYKPWENFTVDAKNALENIVVSFKQNTRVINKATNYYEKYVEKNGEMIKTKVPQEGINWAIRKPLHKETVSGKIHLDYVKVAKGKILTATRKSLDTTFNEKTILSITDTGIQKILLNYLKAKGSPELAFSPEGIEELNENIKSYNDGKYHQPIFKVRIFEQGSKFPLGETGNKQAKFVEAAKGTNLFFAVYADENGKRSFDTIPLNIVIERQKQGLSSVPEINEKGDRLLFHLSPNDLVYIPTDDRFDNLNSNNIYKMVSCTGSECHFIPFRIASLIKNYDAKTKVGEFGSLNKQELSESLLNPVRVKEKCIKLKVDRLGNISNA

SEQ ID NO: 5504 - protein, 1467 aa, synthetic construct
  REGION 1..1467: note = Synthetic
MKKILGLDLGTNSIGWAQIELDFKNKKGNIKGVGSRIIPMSQDILGKFDAGQSISQTAERTGYRGVRRLYQRDNLRRERLHRVLNVLGMLPSHYKASIDFEKKLGQFKPKTEVKLPYIRKEDDQYSFIFQNSFQEMVEIFKANGYTENIPYDWTIYYLRKKALTQKIEIEELAWLLLNFNQKRGYYQLRGEEEEFNKNKSEEFYALQVADVQATEDTNAKGTWYNVVLENGWIYRRQSKEPLFEWKGKTKEFIITTSLDDHGNVKTDKEGNEKRSFRAVDSEKDWIAIKKKTENDIEDSEKTVGTYIFESLVKNPSQKIRGKLVKTIERKYYRNELEKILDKQLKEYSSIFNDDTLKSCVEELYPRNEAHQNTLMTKDFKHLFVNDIIFYQRPLKSKKSSISDCPYETRSYYKDGELLKRPLKCIPRSNPIYQEFRLWQFIHNLKIYQKEGEENGKPVIDIDVTIQFLDNPESYATLFKQLNSKKEVNQKQLLSLFKLNETSHRWNFPEDKKYPCNETRSQIASRLSKLDGFDVDAFLTQEKFHALWHLIYSVTDKVEYEKALSTFAKKNNLPVANFIENFKRFPPFESSYGAYSEKAIKKLLPLMRMGKYWNEEAISNEVKNRITDIVERLNSIDYQSDKLDTIADDDVPMRLLKSFVKSKNRTHPLQGLNTYQTCYAEYNRHSEIGNIVQWKQPEDIDNYLGTFKQHSLRNPIVEQVVLETLRVVRDVWKYYGEKEIKKGREIYKPLFDEIHVELVREMKNDKKTRERISKANTERENTNERIKALLEELKADPEVIDDVRPYSPSHQEILKIYEDGLFSSLKEVDEGIEKIRKKNKPTKSEIVKYKLWLEQGYISPYTGKIIPLSKLFSTAYQIEHIIPQSRYFDNSMNNKIICESAVNEEKDNKTAYEFIKERGGALIDLGHGKSVSLFTLNDYEQHCQTYFKKNKSKLERLLSEDIPEGFINRQLNDSRYISKIVKGLLSNIVREDGELEATSKHLVPVNGAITSKLKQDWGLNDKWNEIIVPRFKRLNEKTNSNDFGYWDEKINAFRIQVPKELERNFSKKRIDHRHHALDALVIACTTKDHINYITSINTERRNFALVSKLRNTETIINSNGNKRTVAKEYLKPWKDFTTDAKDVLEKTVISFKSNNRVINKTNNKVWKWVNENGQLKKKLVKQNRGQNWAIRKPMHKETVSGKINMEVPKGKIATATRTELTDIKTRKRLESITDMSIQKILDNHLKNYTDDSGNENFELAFNQDGVDELNKNIQKLNGGKRHHPIKKVRLYEVGVKFSIGETGQKSTKFVEAAKGTNLFFNIYWDEKKQKRTFETVPLNEVIAHQKQVAHVPKNERTEVQIDNSKGKFLFSLSPNDLVFVPNKDELNNPSMVVYEKLNREQLERIYKMVSSSGNQCFFIKSEVANLIWNKKEYSALNKMEKDINGNMIKNICWKLKTDRIGNLNGLKL

SEQ ID NO: 5505 - protein, 1466 aa, synthetic construct
  REGION 1..1466: note = Synthetic
MTKNILGLDLGTNSIGWALIKQDFENKQGEILGMGSRIIPMSQDVLGEFGKGNSVSQTAARTDYRGVRRLRKRFLLRRERLHRVLNVLNFLPVHYASQIDFEKRFGKFKEDTEPKLAYNKEGFIFKNSFEEMVADFRKHQPQLLENDKKIPYDWTIYYLRKKALSKKIEKEELAWILLNFNQKRGYYQLRGEEEEENPNKLVEFYSLKITDVLADEPQKGKSDIWYSLILENGWIYRRSSKTPLFDWKEKTRDFIVTTDLNDDGSIKTDKDGNEKRSFRAPSENDWTLVKKKTEQEIDKSQKTVGTYIYETLLQNPKQKIKGKLVCTIERKFYKEELKQILEKQKEFHQELQNDDLYSDCVHELYRTNEAHQLTLSKKEIVNLFMEDLIFYQRPLRSQKTSISNCTLEFRKYKDENGVEHTQFLKAIPKSNPYYQEFRIWQWIFNLNIYKRDDDSNVTKEFLNTTEDFENLFEFLNNRKEVEQKALLKHFKLNEKLHRWNFVEDKKYPCNETKTMISTRLDKVENISKDFFTREIEQKIWHIIYSVNDKIEYEKALKSFAIKHNLDENSFFEAFKKFPPFKSEYGSFSEKAIKKLLPLMRLGKYWNEDEILKYSDDYFKNIESLLGVLKQRDENISDADRENYNKTINNKLRAELENFQNAEIESFQGLRLHIAQYILYGKHSEGDNKKFNSADDLEKFLKEFKQHSLRNPIVEQVITETLRVVKDIWTKYGNGAKDFFDEIHIELGRDMKKTRDERADATKIITENENTNLRIKALLAEMMNDVEMENVRPYSPMQQEILKIYEDGILKSDIEIEDDILKISKTAQPSSSDLKRYKLWLEQKYKSPYTGQIIPLNKLFTPEYEIEHIIPQSRYFDDSFSNKIICESAVNKLKDNYIGLGFIKQFGGTIVECGFGKNVKVFEAEEYEDFVKKHYANNRGKRNKLLLEEIPEKMIERQMNDTRHISKYISGVLSNIVRVEDGSDEGVNSKNIVPGNGKITTQLKQDWGLNDVWNELILPRFERMNQLTNSTDFTAWNENHQKFLPTVPIEFSKGFSKKRIDHRHHALDALIIACATKDHVNLLNNQSAKSDTKRYDLKKKLMKFEKVVYNHPQTGDRIEREVPKQFLKPWDNFTFEAKNNLDKIIVSFKQNLRVINKATNYYEKFVEKDGVKTKERVEQKGTNWAIRKSLHEETVSGKIDLPWVETNNGEFITATRKSLDASFNLEKIKKITDTGIQKILRNYLKAKDDNAELAFSPEGIEDLNKNIEKYNDGKSHQPIVRVRVYEKGKGRFALGQTGNNIDKYVQGSPNLFFAIYKDENGKKSYESIRLDIVIERMKQGLQAVPETNPNGISLYQNLSPLDLVYIPTEDEIESPHLIDFTILNKTRLERIYNVNDFSGYTIYFSQNSFAKNIYPKEMDMTWNEKKQKPSGSFDSKTASYNKKSIKDIFIKLKIDRLGNISKVSNTL

SEQ ID NO: 5506 - protein, 1466 aa, synthetic construct
  REGION 1..1466: note = Synthetic
MKNILGLDLGTNSIGWALVKEDFENKQGEILGLGSRIIPMSQDILGEFGRGNSISQTADRTGYRGVRRLRERHLLRRERLHRVLNILGFLPNHYAKEIDFTKRLGKFINHAEPKLSFDKEFIFKDSFNEMLKDFQQNQPGFIINKHGEEALVPYDWTIYYLRKKALTQKIDKEELAWILLNFNQKRGYYQLRGEEEEENTNKLVEFYSLKIIDVIADNEVNKKGEVWYSLHLENGWIYRRSSKISLVDWKDKVRDFIVTTDVNDDGSEKLDKDGVVKRSFRAPSADDWTLLKKKTEQDIDNSNKTVGAYIYENLLLNPKQKIKGKLVRTIERKFYKDELKQILEKQKEFHQELQNEQLLQDCVRELYKYNEQHQQMLESKDFVHLFLNDIIFYQRPLRSQKSLISNCTLEKRVSRDGVVFPIKVISKSNPYYQEFRLLQWLQNLAIYRKDDDVNVTQEFLNSIESWENLLQFLNAKKEIKQEQLIKFLLEQKGLKGNSLKTAILTYRWNYVTDKVYPMNETRSLIQDKLKKVENVATDFLSFDNEMALWHIIYSVNDKIEYEKALAKFASKHNLDEISFVESFKKFPPFKSDYGSFSEKAIKKLLPLMRFGSVWNKNNIVPSVLDRIDKILTGEYDEKIKIRVREKAEQFQLNQIEDFQNLPLWLAQYVVYDRHSEAEIAGKWNSVKDLENYLKEFKQHSLRNPIVEQIITETLRVVKDIWQQYGNGVQNFFDEIHIELGREMKNTADERKRITNSVTENENTNLRIKALLVELKEDTNIENVRPHSPMQQEILKIYEEGVLNAVENIDEDILKISKTAQPSKSELIRYKLWLEQKYQSPYTGEMIPLSRLFTSDYEIEHVIPQSRYFDDSLSNKVICEAAVNKRKDNQLGLEFIKNHHSEKIELGNGRTAQVLEVEAYESFVKKNYDKNRGKRNKLLLEDVPEKMIERQLNDTRYISKFVTHLLSNIVRKDEVNSKDDGINSKNIIPGNGKITSQLKQDWGLNDVWNELILPRFERMNNLTNSTDFTSTNTNGKIIPTVPLEYSKGFSKKRIDHRHHALDALVIALATRDHVNLLNNESALPKKDRTKEEQKSFRFDLQVNLRNKEKYFNVKEGREKEKFTTFKKPWNTLTQDTRDALENMVVSFKQNLRVINKATNYYESYTDENGNLRLDKYGNPKKELISQKGTNWAIRKSLHKETVSGQIHLDRVKVTKGKIVTATRKSLDSSFNEKSIESITDTGIQKILRNYLKAKDNKPDVAFSPEGIEELNKSISVYNEGKNHQPIIKVRIFEQGSKFPVGETGNKIAKFVEAAKGTNLFFGIYQDKTGKRSYDTIPLNLVIERLKQGLSPVPETNEKGHQLLFHLSPNDLVYVPTIDDNEQLDSNRVYKFTDSSDTTCNFIPSNISAIIFNINSKEQEKRGINYPIQNELGVGSPQSKNQKSFDGFMIKEVCIKLKVDRLGNISKT

SEQ ID NO: 5507 - protein, 1465 aa, synthetic construct
  REGION 1..1465: note = Synthetic
MKKILGLDLGTNSIGWALTAQNFEQKQGQIIGVGSRIIPMSQDILGNFDAGQSHSQTAERTGYRSTRKLFQRNVLRRERLHRVLNILNFLPEHYVSAIDFEKHFGQFKNHTEVKLNYRKNEHGTHEFVFMDSFHEMIADFESHNKITKIPLDWTIYYLRKKALTQKITKEELSWILLNFNQKRGYYQLRGEEDTEDDKTKEFVSLKVKTVIDSGEEVKGNKLYDVIFENDWAYDRQTTKPSDWENKIKEFIVTTTILKNGEIKRTFKAVDSEKDWIAIKTKTQQDIDASNKTIGTYIYDTLRDNPIQKIRGKLIKTIERKYYKKELLTILQEQVKHHPELNDKKRYTACVEELYPRNEAHQQNIKGKDFSYLFLDDIIFYQRPLKSKKSTISNCAYEVRKYKKKVTLNGIEKEIVVHEPLKSISKSNPLFEEFRLWQFLRNLKIYKKENVDIDVTLQFFASEDDWIELYNFLSQKKEVEQKHIIQFLVSKKLIDKKEKDVFRWNYVEDKKYPAMPTKAQFISRLKKVVNSKDVSTFLSYETQYHLWHIIYSVKDKNEYEQALKKFANTYNLDEASFVENFAKFPPFKNEYGAYSEKAIKKLLPLMQIGKYWNEIKISNDTKKRIASIIERLETIDFDKEKIENIKDDDIPKQVLKSFLNFKNQNPLKGLNTYQACYAVYNRHSEASIITQWKTPNAIDKFLNDFKQHSLRNPIVEQVVTETLRVVKDIWNYYGSGNESFFDEIHVELGREMKNDKKKRERISKQNIENENTNQRIRNLLQELKNNGINDIKPYSPSQQEILKIYEEGVAQNPNVLYTKLSEQDVLKIRRNSSPTKNEISKYKLWLEQGYISPYTGKMIPLSKLFTTDYQIEHIIPQSRYFDNSMSNKVICESEVNQLKDNQTAFEFIKKHGTEKVDIGQGKHVSILSKENFETHCEKYFKSNRTKLKNLLSEEIPEGFINRQLNDSRYISKLIKGLLSNVVREDDEKEATSKHLLPVTGAITSKLKHDWGLYDKWNEIIAPRFQRMNDLTNSQDYGFWDDTINAYRIQVPEEIIKGFNKKRIDHRHHALDALVVACTHRKHIQYLNSLANENKKHELRKGLLIKNEQGNYTKHFISPWTTFTIDTKNTLEQTIVSFKQNVRVINKTNNKTWQWVLKEGNYKKELVKQTKGSNWAIRKPMHKESVYGEVKHIEVPKNKIATAIRTPLSAITKRKHIEAITDESIQKILENHLKNYTEENGKERFDLAFDANGIEELNKNIIVLNNGKNHHPIYKVRLYEIGSRFQISEDAKSPKSKKFVEAAKGTNLFFAMYWNKDKQKRVYETVPLNEVIEHQKQVANLPKEQRTLVPVNTKKGAFLFSLSPNDLVYVPTDEELENSSMINFSLLSKAQVNRIYKMVSSTGSECHFIKNQISSLIKKYDAKSKIGEFGSTNKSEKDIEGQMIKERCWKLQVDRLGNVTHILKNNP

SEQ ID NO: 5508 - protein, 1465 aa, synthetic construct
  REGION 1..1465: note = Synthetic
VSCFQICSKDISNLSYFQTSFSPLFKKILTKFGIDCKDIPMKHILGLDLGSNSIGWALIEQDFDNKQGKILGLGSRIIPMEQKILSKFEEGTTVSQTAERTKFRGIRRLRERHLLRRERLHRVLHLLGFLPPHYDAQIDFTKRFGKFIGDTEPKLAYNNEGFIFLESFNEMVEDFKKHQPQLFYIKSNGEESKIPYDWTIYYLRKKALYEKISKEELAWIILNFNQKRGYYQLREEEEEKENDFEIISSKVLSVVKKEKDKKYNKYWYDIILENGLVYTAAFYNDFVYSWVDQEREFVAKRTLLKNGSEKVELSYLPTFDEIAKMNKQQQDKFYQKIKIKTENSIGNKPVGAYIYDHLLQNPNQKIKGKLVRTIERKFYKEELKAILEKQVALQPELFTEELFVDCVRELYKNNEIHQNSLSSKDFEHLFLNDIIFYQRPLRSQKSNISSCSLEYRFCIDKETKQRRKTYLKVISKSNPYYQEFRVLQWLSNLKIYRKEDDKDVTSEFISSIEDKETLYEFLMSEKEVSNKSILEFLLMKSLREIYPFAKETELKKELKKEITKYRWNYVYEEENDNKKYPMNETGYEIKKRLKEVKNIPDNFLTKDIEYQLWHIIYSVTDKYEYEKALMKFAQKHNLDTESFVENFKKIKPYPSDYGAFSEKAIKKLLPLMRFGKYWNYSDISEPVQARISDIINGVDNESIKTIVREKADKYQLGQEVDFQELPLWLAQYVVYGIHSEAADIQHWTSPSDLEEYLKGFKQHSLRNPIVEQVVTETLRVVKDIWEYYGKVEQNFFKEIHIELGRELKKTAEERNRVTREINENEETNLKVKKKLQELFEDKSVENVRPYSPIQQEKYRLWQEQKERSPYTGQPIPLSKLFTDEYQIEHVIPQSRFFDDSLSNKVICEAAVNAQKGAQLGLEFIKKHGGEIIEIGLNKKVIILNEKEYKELVNKHFANNRAKKAKMLMEEIPEKMVERQLNDTRYISKFISQILSNIVRSPQEDNGVNSKNIIPCTGKITAALKQDWGLNDVWNDLILPRFERMNKLTQTELFTTYSEKYQKKIPTVPLEYAKGFQKKRIDHRHHALDALVVACATRSHINYMNNQNALDKHKTKEEKQNARVDLRTVLCEKKYNDNAEDNYNWIFKKPWNTFTQDVRSALEMVVVSFKQNLRVINKATNYYEKWVEEKGKMVKKKVKQEGINWAIRKPLHKETISGKITLERVKVGKGKILTATRKSIDSSFTEKTIASITDTGIQKILLNYLAHKGSPELAFSPEGLEEMNKNIAKYNDGKDHQPIYKVRIFEEGSKFPLGEIGTKSQKYVETAKGTNLFFGIYQGKEKRSYATIPLDEVIERQKQGLTSVSEHNEKGEKLLFSLSPNDLVYVPMEGEDAESIDYANLSKEQRERIYKIVNFSKKRLYGVPNIVAIPIIDKMEYTQYNKIEFLKEKESCIKLKIDRLGNISKA

SEQ ID NO: 5509 - protein, 1464 aa, synthetic construct
  REGION 1..1464: note = Synthetic
MSKTILGLDLGTNSIGWALIKLDFEKKVGEILGMGTRIIPMSQDILGEFGKGNSISQTAERTGYRGVRRLRERFLLRRERLHRVLNLLGFLPPHYASQIDFTTKLGQFINHSEPQISYNSGFVFAESYDEMLNDFRDSFPEFLKDKNGQERSLPHAWTLYYLRKKAIRYKISKEELAWILLNFNQKRGYYQLRGEEEEDNPNKLVEFHSLRVVDVIADLQKNNKGEVWYSLVLENGWVYRRSSKSPLDEWKDKVKDFIVTRDINDDGSEKLDRDGEVKRSFRAPGPDDWTLLKKKTESEIDKSQCTVGEFIYDNLLRDPKQKIKGKLVRTIERKFYKTELIQILNKQAEFHSEFNDQDILVDCVRELYKHNEQHRKELSSKDLANLLVNDIIFYQRPLRSQKSGIGRCSLEYKVYKAKDKYGELLKDADDNFIEKRAYIQVIAKSNPYYQEFRLLQWIGNLEFYLKDNDEQVTALLIPDIETRQQLFDYLVERKDIKQEILIKFLLGKKGLKGRELTNESAKFRWNYVEDKTYPCYETRALVNSRLDKVTNVPIDFLTAEKEYALWHILYSVNDKIEFEKALTSFAEKNQLNRQEFVEAFKKFPPIKSDYGSFSERAIKKILPLMRFGSYWNWDTIDHDTKIRIAKVITGEYDDTIKERVREKAQHLVVEKDFQMLPLWLAQYIVYDRHAEVKDLTKWTSVDDLAQFLNDFKQHSLRNPIVEQIVTETLRVVKDIWNKYGTGRQDYFSEIHIELGREMKNPADERKRMTNIVTENENTNSRIKSLLAELASDHGVENVRPYSPMQQEILKIYEEGALNSGVDVDDDILKISKTAQPSNSDLKRYKLWLEQKYCSPYTGQPIPLNKLFTPDYEIEHIIPQSLYFDDSMSNKVICEAAVNKLKDNRIGLSFIKTHHGQVVDCGFGRRVKIFEVEDYEKFIQTCYSKNRGKRNKLLLEDIPEKMIERQLNDTRYISKYVTGLLSNIVRDNSITGNDDGINSKNVLPGNGKVTSILKQDWGLNDVWNDLILPRFERMNAITNSTSFTTWNDNHQKFLPTVPIELSKGFSKKRIDHRHHAMDALVIACATRDHINLLNNESARSTTKRHDLSRKLRHYEKVVYTDPKTGQRISREVPKDFIKPWDKFTVEAHVRLLSIIISFKQNNRVINKATNYYESYYDEDGNLRLDKNGKPVKGINAQKGINWAIRKSLHKETVSGKVNLPRVKLAKGKILTATRKTLDPSFDAKSILLITDTGIQKILINYLNAKNNKPEIAFSPEGIEEMNQNISLYNDGKNHQPIKKVRVFEQGSKFALGEIGVKSTKYVEAAKGTNLFFGIYVDDNGKRSYDTIPLNIVIERQKQGLTSVPETNEKGHRLLFSLSPNDSVTIYTSENVRSENICSAEQIYKLVSFSGAQAFFIKQTVSASIVNKGEFSTLNKMERSIEGLMIKDVCEKACLDRLGNILKIER

SEQ ID NO: 5510 - protein, 1464 aa, synthetic construct
  REGION 1..1464: note = Synthetic
MMIKNILGLDLGTNSIGWALIRQDFENKYGEILGMGSRIIPMDQKVLGEFGSGNSVSQTADRTKYRGVRRLRERFLLRRERLHRVLNVLNFLPIHYASQIDFEKRFGKFREETEPKLVYNNDGFIFKNSFGEMLVDFKKHQPQHLENDKKIPYDWTIYYLRNKALTQKIEKEELAWILLNFNQKRGYYQLRGEEEEENPNKLVEFYSLKIVDVLADEPQKGKSDIWYSLVLENGWIYRRSSKTPLFDWKDKTRDFIVTTDLHEDGSIKTDKDGNEKRSFRAPSENDWTLVKKKTEQEIEKSHKTVGTYIYETLLHNPKQKIKGKLVRTIERKFYKDELKQILEKQKEFHTELQNDDLYSDCVRELYRNNEAHQLTLSKKDFVHLFIEDIIFYQRPLRSQKSSISNCTLEYRRYKDKHGVEHTQYLKAIPKSNPYYQEFRIWQWMYNLNIYKRDDDTNVTKEFLNSTEDFENLFDFLNNRKEVEQKALLKHFKLNEKTHRWNFVEDKKYPCNESKTMISSRLDKVENISENFLTSEIEHKIWHIIYSVNDKIEYEKALKSFANKNNLDEVSFFEAFKKFPPFKNEYGSFSEKAIKKLLPLMRVGKYWDEDEIVKNSDTYFKNIGDLLGNIARKEENISDEDRKKYNKTVNLKLREELEIFQDAEIASFQKLRLHIAQYLVYGRHSEASIIGKWNSADDLEEFLKEFKQHSLRNPIVEQIITETLRVVKDIWMKYGNGAKDFFNEIHIELGREMKLPAEDRKKLTSQISENENTNLRIKALLAEMMNDSSVENVRPFSPMQQEILKIYEDGVLNSGIEIEDEYLKISKTAQPSSSDLKRYKLWLEQKYKSPYTGQIIPLNKLFTPEYEIEHIIPKSRYFDDSFSNKIICEAAVNKLKDNYIGLGFIKQFAGTIVELGFGKNVKVFEIEEYEDFIKKHYANNRGKRNKLLLEEIPEKMIERQLNDTRHISKYVSGVLSNIVRVEDGTDEGVNSKNIVPGNGKITTQLKQDWGLNDVWNDLILPRFERMNQLTNSTDFTAWNENHQKYLPTVPIEFSKGFSKKRIDHRHHALDALVIACATKDHVNLLNNQSAKSDTKRYDLKKKLMKFEKVVYNHTQTGEKIERDIPKQFLKPWETFTIDAKNRLETIIVSIKQNLRVINKATNHYEKYVDKDGVKTKEKVEQTGTNWAIRKSLHEETVSGKITLSWVETSKGEFITATRKPLDSSFTFEKINKITDTGIQKILKNYLEAKENNPELAFSAEGIEDLNKNIEKYNDGKSHQPIIKIRLYEKGKGRFVLGQTGNKINKYVQGSPNLFFAIYKDENGKKVFESIRLDIVIERLKQGLQAIPETNQNGVSLYQSLSPLDLVYIPTEYELESPHILDFSKLNKTQITRLYNTNDFSGVTAYFSQNSFAKHIYPKEMDLSWNEKKQKLSGSFDSKTASYNNTSIKDIFIKVKVDRLGNISKA

SEQ ID NO: 5511 - protein, 1463 aa, synthetic construct
  REGION 1..1463: note = Synthetic
MKTILGLDLGTNSIGWALINQDFASKQGKILGMGSRIIPMSQDILGEFGKGNSVSQTAERTGYRGVRRLRERYLLRRERLHRVLNIIKFLPEHFANEIDFEKRFGKFKSDNEPKIAYNTDGFVFKNSFEEMLSDFKMHQPQILKNEKDEDKLVPYDWTIYYLRKKALSQKIEKEELAWILLNFNQKRGYYQLRGEEEEENPNKLVEFYSLRIIEVTADEPQRGKSDIWYSLMLENGWVYRRASKTPLFDWKNKTRDFIVTTDLNDDGSIKKDKDGNEKRSFRAPAETDWTLVKKKTEQEIDNSHKTVGTYIYDTLLQNPKQKIKGKLVRTIERKFYKAELKQILEKQAAFHPELQNVDLYNDCVRELYKNNDAHQLTLSKKDFVHLFLEDIIFYQRPLRSQKSSISNCTLEFKKYVDKDGVEHTQYLKAIPKSNPYYQEFRIWQWMYNLNIYRKDDDENVTKEFLNSYEDLENLFKFLDERKEIEQKALLKFLLEQKDFKGKVLTAEIEKYRWNFVEGKAYPCNETKTMIATRLSKVENISDTFFTREIEQQIWHIIYSVNDKIEYEKALKSFARKHNLDEISFFEAFKKFPPFKSEYGSFSEKAIKKLLPLIRVGKYWSYDNIDEHSKARIDKIITGEYDENIKDKVREKAINLKTESYFQGLQLWLAQYVIYGRHSEASMIGKWNSADDLEIFLKEFKQHSIRNPIVEQVITETLRVVKDIWVQYGKGAKDFFNEIHIELGREMKNTAEDRKKITNQVTENENTNLRIKALLAEMMNDANVENVRPFSPMQQEILKIYEDGVLNSDIPIDDDILKISKTAQPSSSDLKRYKLWLEQGYKSPYTGQIIPLNKLFTPEYEIEHIIPQSRYFDDSFSNKIICEAAVNSIKGNKLAYEFIKDPVLQTVEVGFGKSVPILKPDEYEEFVKKHYAKNRSKKTKLLLEEIPEKMIERQMNNTRYISKYISGVLSNIVRVEDGTDEGVNSKNIVPGNGKITTTLKQDWGLNDVWNDLILPRFERMNQLTNSTDFTAWNESHQKFLPTVPIELSKGFSKKRIDHRHHAMDALVIACATKEHVNLLNNQSAKSDTRRYDLKKKLMKFEKAVYNDAKTGERIERDVPKQFLKPWDTFTVDARNSLENIVVSFKQNLRVINKATNYYESYKDENGNLRIGSDGKPKKDFISQKGTNWAIRKPMHAETVSGLVKLPWVKLGKGEKTTATRERNDLVSIFKDVKSFDVALNKIEKITDTGIQKILKKYLEHNIEKLDFALTAEGLEELNKNISLYNKGKSHQPILKVRSYEKSKGRFSLGEIGNKTKKFVEAAKGTNLFFGLYLDKDGKRSYDTIPLNLVIERQKQGLSPVPETNEKGHQLLFYLSPNDLVYVPDELNEVSEKNIYKMVSSTGNECHFVKASISSLIKNYDAKTRIGELGSLNKLEITLDASSRIKEVCIKLKVDRLGNISKVKI

SEQ ID NO: 5512 - protein, 1460 aa, synthetic construct
  REGION 1..1460: note = Synthetic
MRKFNLGLDIGTNSIGWALVNKDYENKKGKIIAAGSRIIPMPQDILDKFGSGVITETQTALRTDYRSKRKLIQRFLLRRERLHRVLNVLDFLPKHYAQSIDFQKHFGKFLPNTEPKLANNKNQFLFENSFLQMLKEFQEKHPELYTDNKKIPYDWTIYYLRKKALNQKIEKQELAWLLLQFNQKRGYNQLRDEEEQNIPNKKVEYYSLQVIEVIPDEAKEGNDKIWYSINLENGWTYRRESKIPLFNWKGKVKDFIVTTDLNQDGSIKKDREGKEKRSFRAPSEGDWTLLKKKTENEIQASGKTLGVYIYDALLNNPNLKIKGAFIRTIDRSFYKEELQQIITKQKEYHKELNNSKLYKACIEELYPKNEIYKSILKNKDIAHLFINDILYYQRPLKTQKYNIGKCTYESRIFKKEGKKIAEFIPAVSKSHPLFQEFRLWQWIKNLKIYEKLSSDNCTDLFLTNEKDFEDLFEFLWNKKEIDHKGILEYLIRTKFPDLKPKQIKIKIKEYRWNYVYDHEKDESKSYPCGETYFLIKSKLDRINNIESNFLSKEKLYNLWHIIYSVTDKKQYEKALIKFALKNNIDSKLFVNSFKRIPPFKNDYAIYSLKAINKLLPLMRVGKYWNYDTIDTATKQKIQSIINGEEDNTISTLVREKTIHFSKESDFKNLPLWLAGYIVYNTHNESTEIEKWQSPQDIDTFLKNFKQHALRNPIVEQVITETLRVVRDIWLKKGGGEKDFFNEIHIELGKDLKNPIDKRRKLSSTNIKNESTNTRIKALLTELFNQGIENIRPNALKHQEILKIFEESVLNSGIDIDEDILKISNIAQPTKKQLQYYVHWLEEKYKSPYTGQIIPLSKLFTSDYEVEHIIPRSKYYDDSLSNKVICETEINRLKNNQLGYEFINNHEIREITLQEGKTIRLLSPEQYLNFVNTYYAKNKAKRKTLLLEELPIEMVERQLNDTRYISKYVMQLLSKIVRKQDGTDNGLNSINVLSVSGKMIRALKNDWELNDIWNDLLLHRFDRLNSITNTNLFTTYSEQKQKMIPIVPDQYAKGFHKKKLDHRHHALDAIIIACITRNHINYMNNQNIQGGKNKKIKIDKQCYREIFQKSRLEIRAQLCQKKYNDHDQTNYNWVFIKPWKDFTKETKEVLESIIPSFKQNLRIINKTVNYYEKYNENGKKVKIRQTKGDNWAIRKPLHKETISGKVYLSYKIPAKGKILTATRKFLDTTVDLKSIEKITDTGIQKILKNYLEYKGTPELAFSPEGIEELNTTIEQYNDGFAHKPIYKIRIYEEGVKFPLGTKGNKKNKYVEAEKGTNLFFAIYKDQENNRYFETIPFNDVLETLKQGLPAVSEKNQMGNTLVFALSPQDLVFVPTLEEVENPDLVDFKNLTKQQTNRIYKMVSSSGKQCFFIKAEVATSIINKMEFTTSNKMENSIEGIQIKSNCWKLKLDRLGTITRVTK

SEQ ID NO: 5513 - protein, 1460 aa, synthetic construct
  REGION 1..1460: note = Synthetic
MNKFNLGLDIGTNSIGWALVNEDYENKRGKILGAGSRIIPMTQDVLDKFGSGTITETQTALRTDYRSKRKLIQRFLLRRERLHRVLNVLHFLPKHYAENIDFEKHLGKFLPNTEPKLAYKQNQFIFENSFHEMLKEFYEKYPDLFLNNKKIPYDWTIYYLRKKALHQKIEKEELAWLLLQFNQKRGYNQLRDEDEENSPNKLVEFYSLQVIEVVADEVKGGNEKIWYSINLENGWIYRRESKIPLFNWKGKIKDFIVTTDLNQDGSIKEDKDGKEKRSFRSPSEGDWTLLKKKTEKEILESGKTLGTYIYDALLNNPDLKIKGAFVRTIDRSIYKEELLQIITKQKEYHPELNNTKLYKACLEELYPKNEIYKNVLKNKDIAYLFINDILYYQRPLKAPKYNIGKCTYESRTFKKEGKKITEFIPAVVKSHPLFQEFRLWQWIKNLKIYEKLSNDNYTNFFLKDEQDLENLFDFLWNKKEIDHKGLLEYLIKTKFPDLKTKQIKNKIKEYRWNYVYDHEKDESKNYPCGETYFLIKNRLDKINNIQNDFLTQKRLYHLWHIIYSVTDKKQYEKALTKFAIKNKLDVKLFVNTFKRIPPFKNDYAIYSLKAINKLLPLMRLGKYWSYDNIDTITKQKIQSIINGEVDDTISTLVREKTSNFSKEDNFKNLPIGLAGHIIYNSHNESTEIEKWKSPQDIDIFLKKFKRHALRNPIVEQVVTETLRVVRDIWIKKGEGKKDFFNEIHIELGKDLKNPVDKRRKISSTNSKHESTNIRIKALLTELLNEGVEHVKPNSTKHQELLKIFEEGILNSGIEIEEEIIKISQIAQPTQKQLQQYRIWLEQQYKSPYTGQIIPLSKLFTPNYEIEHIIPRSKYYDDSLFNKVICETEINRLKNNQLGYEFISTHEVREITLEDGKTIRLLSPKQYLEFVNTHYAKNKIKRKNLLLEELPIEMVERQLNDTRYVSKYVMQLLSKIVRKEDGTDNGTNSINILSVSGKMTRALKNDWDLNDVWNDLLLYRFERLNTITKTNLFTTYNEQKEKMTPIVPDQYIKGFRKKRLDHRHHALDAIVIACITRHHINYMNNQNVQGEKFKNIKIDKENYREIFQKTRLDLRAQLCEKKYNKQDQTKYNWVFTKPWTDFSQETKDILEFMIPSFKQNLRIINKTVNYYEKYNENGKKVKVRQTKGDNWAIRKPLHKETVSGKVYLSYKTPTKGKILTATRKFLDSSIDFKSIEKITDTGIQKILKKYLEYKGSPELAFSPEGIEELNTNIAQYNDGFDHKPIYKVRIYEEGVKFPLGIKGNKKNKYVEAEKGTNLFFAIYKNEENDRYFETIPFNDVLEMLKQGLPAVPQRNQEGNHLVFALSPQDLVFVPTPDEIENPDIVDFKNLTKEQTSRIYKMVSSSGKQCFFIKAEIASSIVNKMEFTSSNKMENAIEGTQIKSTCWKLKLDRLGTITRVTK

SEQ ID NO: 5514 - protein, 1460 aa, synthetic construct
  REGION 1..1460: note = Synthetic
MKRILGLDLGSNSIGWAFVQQDFENKQGKIIAAGSRIIPMDQKMLSNFEEGTTVSQTAERTTYRSMRRLRERHLLRRERLHRVLHILGFLPPHYDSQIDFSKRYGKFIDDAEPKIAYNNRNFIFMDSFNEMIEDFRKHQPQLFYKKSNGEESKIPYDWTIYYLRKKALSQKITQQELAWLILHFNQKRGYYQLRGEEETEGNDMEIISSKVLSVIKKDKDKKYDKYWYDITLENGLVYKAAFYNDLVYSWIDQKREFVVKRALLKNGDEKIELSYLPTFDEIAKMDKKQQDKFYQKIKVKTESNIGNKTVGAYIYDHLLQNPNQKIKGKLVRTIERKYYKDELKAILAKQIALQPEFFTENLLADCIRELYRKNQTQQQKLLSKDFLHLFLEDIIFYQRPLRSKKSTIANCPLEKRSYIDKETNERKDVPIKVCAKSNPYYQEFRVLQWLQNLRIYEIETDREVTAEFIGTAQYYEALFNFLMSQKEIDNESLLKYFLLTKNPQIKDKAAKSELKKWLTTYRWNYVYDAADNSSKKYPMNETGYELQRYLQKIEGLPVNFLTFDITYRLWHLLYSVKDKVEFEKALKKFAQKYQLEEASFVDSFKDFKPYPNEYGSFSEKAIKKMLPLMRFGKHWNFKNIDVHTQKRIDDLINGVANEDIRTIIREKAEKYQLNSETCFQGLPLWLAQYIVYNRYAEATNIEKWTSVSDLETYLEDFKQHSLRNPIVEQVVTETLRVVRDIWQQYGGGQANFFDEIHIELGRELKNTSKERERLSKQNQENENTNLRIKKLLAELKEDANIQNVRPYSLVQQELLKIYEEGVFSSTDDIEEDIQKIRKKAEPTNLEIQRYKLWLEQKYKSPYTGEVISLTKLFTEEYEIEHIIPQSRYYDDSLSNKVICESAVNKLKTNQLGLEFIQNHHGEKVRIAGNKEVTIFTEEQYKEFVKKYYANNLAKQQKLLLNDIPEKMVARQLNDTRYISKYISEILSKIVRSDEKDEGVNSKNIIPCTGKITTALKQDWGLNDIWNELILPRFERMNQLTQTQLFTSYNDRLQKNLPTVPIKYSQGFQKKRIDHRHHAMDALVIACATREHINYMNNQHALDKSKDKKEKQQSRIVLRTILCEKKNNNWQFKKPWSTFTQEAKEALEHIVVSFKQNLRVINKATNYYEKWEEKDGILVKKKVKQEGTNWAIRKPLHKETVSGKIVLDKKIGKDKILTATRKTVDITFTEKVISSITDTGIQKILLNYLKYKGSPEVAFSAEGLEELNKNIAQYNDGKKHQPIYKVRIFEEGSKFPLGETGAKVTKYVEAAKGTNLFFGVYQGKEKRTYATIPLNEVIERQKQGLPSVPERNEKGEPLLFSLSPNDLVYVPMEGEAPEAIDFSNLSKEQKERIYKTVSFTGKECHFVKSTIASLIKSYDAKSKIGELGSLNKLEVTISGDSRIKEVCIKLKVDRLGNITKA

SEQ ID NO: 5515 - protein, 1460 aa, synthetic construct
  REGION 1..1460: note = Synthetic
MTKFNLGLDIGTNSIGWALVNEDCENKKGKILAAGSRIIPMTQDILDKFGSGAATETQTALRTDYRSKRKLIQRFLLRRERLHRVLNVLDFLPKHYAESIDFEKYLGKFLPNTEPKLVYNQNQFIFQNSFFEMLKEFQEKHPELFLNNQKIPYDWTIYYLRKKALSQKIEKEELAWLLLQFNQKRGYNQLRDEEEENTPDKLVEFYSLKIIKVTADEAKEGINKRWYSINLENGWIYRRESKTPLFNWEGKTKNFIVTTDLNQDGSIKKDKEGKEKRSFRAPSEGDWTLLKKKTEKEIYESGKTLGTYIYDALLNNPDLKIKGALIKTIDRSIYKEELQQIINKQKEYHSELNNSKLYKACLEELYPKNEIYKNELKNKDIAYLFINDILYYQRPLKAPKYNIGKCSYESRTFKKEDKKITEFIPAVAKSHPLFQEFRLWQWIKNLKIYEKLTNDNYTDFFLTNERDIEKLFDFLWNKKEIDHKGILEYLIKTKFPDLKPKQVKSKVKEYRWNYIYDHEKDESKNYPCGETYFLLKNKLDKITSIQDDFLNKKRLENLWHIIYSVTDKKQYEKALAKFALKNQLDTKSFVNTFKRIPAFKNDYAIYSLKAIKKLLPLMRVGKYWNYDDIDPITKQKIQCIITGEENDTISTLVREKTNHFSNENDFKNLSLWLAGYIVYNSHNESSEIEKWKSPQDIDTFLKKFKQHALRNPIVEQVVTETLRVVRDIWLKKGQGKKDFFNEIHIELGKDLKNPVDKRRKISSTNSKNETTNIRIKALLKELLKEGIENIKPNSPKQQEILKIFEEGILNSGIDIEEEIIKISQIAQPTKKQLQYYRNWLEQKYISPYTGQFIPLSKLFTSKYEIEHIIPRSKYYDDSLSNKVICETEINRLKNNQLGYEFINNHEIREITLEEGKTIRLLSPKQYLDFVTTYYGKNKAKRENLLLKEIPIQMIENQLNDTRYVSKYVMQLLSKIVRKEDGTDNGTNSINILSVSGKITRVLKTDWGLNDVWNDLLCYRFERLNKITNTNLFTTYSEQKQKIIPIVPDQYAKGFHKKKLDHRHHALDAILIACITRNHINYMNNQNIQGEKLKNFKIDKHNYHEIFQKSRLDMRAQLCEKKYNDHDSTKYTWVFTKPWADFTENIKDTLEFIIPSFKQNLRIINKTVNYYEKYNENGKKVKVRQTKGDNWAIRKPLHKETISGKVHLLYKTPAKGKILTATRKVLDSSMDFKSIEKITDTGIQKILKNYLKYKESPELAFSPEGIEELNITIAKYNDGFYHKPIYKVRIYEEGVKFPLGNRGNKKNKYVEAEKGTNLFFAIYKDQENNRYFETIPFNDVLETLKKGMSAVPEKNQEKNTLVFALSPQDLVFVPTLDEIENPDIVDFRNLTKDQTNRIYKMVSSSGKQCFFIKAEVATSIVNKMEFTTSNKMENSIEGIQIKSNCWKLKLDRLGTITRVIK

SEQ ID NO: 5516 - protein, 1458 aa, synthetic construct
  REGION 1..1458: note = Synthetic
MAKNILGLDLGTNSIGWALINQDFENKQGKILGMGSRIIPMSQDILGDFGKGNSVSQTAARTGYRGVRRLRERFLLRRERLHRVLNIINFLPEYYASQIDFEKRFGKFKEETEPKLAYNKDGFVFKNSFEEMLADFKNYQPQLLENDKKIPYDWTIYYLRKKSLSQKIEKEELVWILLNFNQKRGYYQLRGEEEEENPNKLVEFYSLKIVDVLADDPQKGKSDIWYSLVLENGWVYRRSSKTPLFDWKDKTRDFIVTTDLNDDGSIKTDKDGNEKRSFRAPAETDWTLVKKKTEQEIDKSHKTVGVYIYEALLQNPKQKIKGKLVRTIERKFYKDELKQILEKQKEFHQELKNDDLYNDCVRELYRNNEAHQLTLSKKEFVHLLMEDIIFYQRPLRSQKSSISNCSLEFRKYKDENGVEHTQFLKAIPKSNPYYQEFRIWQWIFNLNIYKKDDDTNVTKEFLDTIENFESLFEFLSNRKEVEQKALIKFLLEQKDFKGKLLNAEVEKFRWNFVEDKKYPCNETKTMISSRLDKVENIFEDFLTREVEQRIWHIIYSVNDKMEYEKALKSFARKNNLDENSFFEAFKKFPPFKSEYGSFSEKAIKKLLPLMRLGRYWNEDEILKYSDDYFKNIESLLGVLKQRDKNISDADRQNYNKTINNKLREELENFQNAEIESFQGLRLHIAQYIFYGKHSEGDNEKFASAADLEGFLKEFKQHSLRNPIVEQVITETLRVVKDIWLQYGNGAKDFFNEIHIELGREMKQTKDERSDATKRITENENTNLRIKALLAEMMTDNSVENVRPYSPMQQEILKIYEDGILKSDIEIEDDILKISKTAQPSSSDLKRYKLWLEQRYKSPYTGQIIPLNKLFTPEYEIEHIIPQSRYFDDSFSNKIICESAVNKLKDNYIGLGFIKQFGGTIVECGLGKNVKVFGVDEYEDFVKKHYANNRGKRNKLLLEEIPEKMIERQLNDTRHISKYISGVLSNIVRAEDGTDEGVNSKNIVPGNGKITTQLKQDWGLNDVWNDLILPRFERMNQLTNSTDFTAWNENHQKYLPTVPIEFSKGFSKKRIDHRHHALDALVIACATKDHVNLLNNQSAKSDTKRYDLKKKLMKFEKAVYKHPQTDERIERDVPKQFLKPWESFTIDAKNNLDKIIVSFKQNLRVINKATNYYEKYLEKDGVKTKEIIKQTGTNWAIRKPMHKETVSGKVNLPWVKVPKGKILTATRKNLDTSFDLKSINSITDTGIQKILRNYLEFKESPELAFSPEGIEDMNKNIEKYNDGKLHQPINKVRVFELGSKFQVGQTGNKKDKYVEAAKGTNLFFAVYEDKNGKRSYETIPLNIVIERQKQGLSVVDLKGVNDFYLCPNDLVYIPSEDELENVNNIDFKNFTKEKNERIYKVVSFSGSQIFFARQDIAVSIVNKAEFSTLNKMERAIDGSMIKEHCLKLNVDRLGNISKT

SEQ ID NO: 5517 - protein, 1458 aa, synthetic construct
  REGION 1..1458: note = Synthetic
MKKILGLDLGTNSIGWALIEQDFESKAGKISGAGSRIIPMSQDILGTFETGQSYSQTADRTHYRSIRRLYQRTKLRRERLHRSLNVLGFLPEHYKNEIDFEQRKGQFYPNKEPKIAYYPEQVASKVKYQFLFKSSFLEMVEDFKRRGYNGAIPYDWTIYYLRKKALEKKIEKEELAWLLLNFNQKRGYYQLRGEEEDTNSNKKEEFYELKVSSVEQTHDTSPSGTWYNVHLQNGWVYRRKSKDSLKDWEGLNKKFIVTTHLNADGSEKLDKDGNVSRSFRAPKEDDWGLVKKRTESVLEKSGLHVGEFIYESLLENPEQKIRGSLIKTIERKYYKKELEAILDKQTSFHRELRNDALYKEATLELYPKNSAHRSNIKQRGFKYLFIEDIIFYQRPLKSQKHLIAHCQYEKRTYKNNGGETIEVSLQGAPKSHPSFQEFRIWQFISNLRFYDKEEIVEGQEVSITEKLLKSDSDFAELYHWLSHQREVDQNKTLKYFTQKKLIPKQKKDNPTIRWNFPEDKKYEMGEFKAQLLSRLEKVRNCQPDKFLTQKNELDLWHIIYSVTDKTEFEKALVTFAEKRELDSESFVENFKKFPPFKNDYASYSLKAIKKILPLMRRGKYWKAENLGPQTLQRIEKIVNGEADDKISIRARKLALHLNDTKSFQGLPTSLACYVAYNRHSENEENQKWQTPSDIDKYLKDFKQHSLRNPIVEQLITEALRVVRDIWKHYGQGQKDFFDEIHVELGREMKNPAIKRKKLSQKIQENENTNYRIKEVLRNLKENNIDAKPYSPSHQEILKIYEEGVYQSIENVEDEIEKIRKNNTPSSKDINRYRLWLEQGYISPYTGEVIPLSQLFSNQYEIEHIIPRSRFFDDSLANKVICESSVNALKDNKTALEFITNHGNEKVEFAGKTVEILSSDKYTEHCKRYFKRNRTKLKNLLSYDVPEGFINRQLNDSRFISKYVRNLLSNIVREEEEREAISKHILTIPGSITSQLKQDWGLNEKWNEVVTHRFERLNNLTGTTDFGFWDNKINAFRITVPKELSKGFNKKRIDHRHHTLDALVIAACTKDHVNYITSLNTERNNHSLVSKLRNTKKVLINGKERRIAKAYKLPWSSFPLDAKHQLETTVISFKQNLRVINKSSNKTWQWRNVNGEQKKKLIPQTKGDSWAIRKSMHKATVSAKVESVGKGKIKTTNRTPLGEIKGEKHVEKIYDARIREVIIPNHLNKYLDEKGKPNYEAAFSQSGIKQLNENIEVLNEGKPHAPIYKVPLFEVGSKFPVSEDAKSPKNQKYVEADKGTNLFFAVYWNEEKQKRNFETVPLHQVIVHQKQVASLPTEQRTSVPIKPELGLFLFSLSPNDLVYVPTEEEIENPHLVDLKNLSKDQTNRIYKMVSSTGNECHFIPHHISRLIMKYNAKQKVGEFGSLNKAEKAITGETIKEKCLKIQINSLGKLKTERIA

SEQ ID NO: 5518 - protein, 1458 aa, synthetic construct
  REGION 1..1458: note = Synthetic
MTKTILGLDLGTNSIGWALINQDFDNKKGEILGMGSRIIPMTQDIKDEFGKGNSISQTAERTRLRGVRRLIHRTLLRRERLHRVLNIIGFLPEHYANQIDFEKRFGKFKPESEPKISFDGNDVFLFEKSYQEMLVDFKIHQPQLVSNGKKIPHDWTIYYLRKKALSKKIEKEELAWILLNFNQKRGYYQLRGEEEEETPNKLVEFHSLKIVEVNADEPQKGKPEIWYSLVLENGWVYRRASKTPLFDWKDKIREFIVTTEINNDGTVKTDKEGTEKRSFRAPKPEDWTLQKKKTEFELSKSGNEVGAFIYESILQKPNQKIRGKLISTIERKFYKEELKTILKTQLFFHKELKDEKLYNACIEELYKNNEAHRSLLSNKGFEHLFINDILFYQRPLRSKKSQISNCPLEKRTYKKEGIEITEGIKVISKSNPIYQEFRLWQWISNLSLYCIEPTETNVTSTFLNSIEDYENLFEFLNNRKEIEQKHLLKYLLENQGFKGKLLTNELEKFRWNFVADKKYPCNETGSLLHTRLSKVKNISPDFLTKEIEHQLWHIIYSVTDKIEYEQALKTFARKNNLDVDSFFEHFKKIPPFESTYGAYSEKAIKKLLPLIRLGKYWNWEAIDSISKDRISKILSGEYDENIKNRVREKAVHLTSENNFQGLQEWLAKYIVYDRHSEGNDLGKWTSVSDLETYLKEFKQHSLRNPIVEQVITETLRVVKDIWIKHGKGTENFFDEIHVELGREMKNNSEDRKRLTNTITENENTNLRIKALLMEMMNDNDVENVRPYSPSQQEILKIYEDGALNSNIELDDEIVKISKKAEPTKSELQRYKLWLEQKYRSPYTGQVIPLNKLFTSEYEIEHVVPQSRFFDDSFSNKVICESAVNKRKDNQLGLQFIKNHSGEKVELGFGKVVQVFTEEQYLDFVKEHYSKNRSKHNKLLLEEIPEKMIERQLNDTRYISKFVSSILSNIVRSEKDDDGLNSKNILPGNGKITTELKRDWGLNDVWNDLILPRFERMNTITNSDLFTTYNDKYQKHLPTVPFEYSKGFQKKRIDHRHHAMDALVIACATRDHLNLMNNQSAKSELKRYDLQNKLRKKEPYFNQKENKQKEAFKDFIKPWGTFTEDSKNALEKIIISFKQNLRVINKATNSYESYKDEDGNLRIGKDGKPEKGLIKQKGLNWAIRKPLHKDTVSGQINLSRIKLPNGKILTATRKNLDTSFDLKTIENSITDTGIQKILKNYLLSKESPELAFSPEGLEEMNNEIEKYNNGKFHHPINKARIYELGSKFNVGQTGNRRDKFVEAAKGTNLFFAIYQDENKNRSYETIPLNEVIEHQKWRASLPKEEQEKIPLVPVNKLKGTFIFSLSPNDLVYVPSNDELERSASIDFSKLKKEQINRLYKMVSSSGSQCFFVKSEVATSVVNKMEYSSLNKMEKSIDNLMVKEICIKLKIDRLGNISKA

SEQ ID NO: 5519 - protein, 1367 aa, synthetic construct
  REGION 1..1367: note = Synthetic
MKNILGLDLGTNSIGWALVDKENDKIIGMGSRIIPMSQDILGEFGQGNSISQTAERTNFRSIRRLRERYLLRRERLHRVLNIIGFLPQHYSNQIDFETRLGKFKEEAEPKIAYNSIINGTNGKIQFDFLFKKSFTEMLDDFRQYQPDIVANGNKIPYDWTLYFLRKKALTKKIEKEELAWILLNFNQKRGYYQVREDNDENINKKEYVISLKVTQIIKGEKDKKSKNKNWYSIILENGWVYNATFALEPQWLNNEKEFLISEELDENGQIKIVKDKKSDKGGKENRRIIPLPTFDEIDLMSKGEQDKIYKKIKTKTETAIENSGNTVGVYIYENLLKSPFQKIRGKLIRTIDRKFYREELKKILQKQKEFHSELRSENLYNDCVRELYKNNKDHIFLLSKRDFVHLFSDDIIFYQRPLKSQKSSISNCSFEFKKYSVDNEERIEYLKAIPKSHPLYQEFRLWQWIYNLRIYSRNDDCDVTINYLNDNERYADLFEFLSKRKEIEQKALLKYFKLKDSTHRWNFVENKKYPCYETRSLISTRLEKVENVPMNFLNDKTEQYLWHIIYSVKDKNEYEKALITFAKKNRLDIESFVENFKKFPTFKNEYGSYSAKALKKLIPLMRIGRYWNLDKIDEQTKSRIDKIVTGEFDEEIKNKVREKSISLTNNNHFQGLQLWLASYIVYDRHSEAATINKWETIQQLGEYIDNFKQHSLRNPIVEQIIIETLRVVKDIWHHFGKDKNNFFEEIHIELGREMKNNADERKRITNQMIDNENTNIRIKSLLSELKNDSSIQNVRPNSAVQQELLKIYEEGVLNSDIEIPEDIFKISKTAQPSNPDLQRYKLWLEQKYRSPYTGQIIPLSRLFTTEYEIEHIIPPKSLLRRLQSYLIVSEQVKRSNGIRIYESSRRNCANWIKCKNIRERISGFCENTLYKEPFKEAIDGRNSKNDRKTNRYKVYCVYYITFPSTFCKWCKFKFDPGKWNYFFTTRLGYQRMEFNLTSLLNEQNNKFIHKIEVSEIFANSPNIFKKLSSKTNSQASCSRIDYCLCNQRPCLIKQVRIKREIRSKTSQIKNSISSTKWKNRERGSKRISKAMEFYSFKKFPKNSCKFTKYQSYKDIKYLEMGGQRKGKKRSQTIRCKLGYTTIAKDFCWSIRKSKSSWKDFNSNTKESCFIFKNYRFNNRYRYSKDPELFIIRKQFVDCFCSRGYGDEKYTVQWKASTNLSDFAWQIYIRFDWKKVKICSCRYKLILCCLSERRKKEFRNNSTKHSYKAKTRSKLCSRKQEGAIIILSFPKSCLCSRERKQFNYFLSYNKANYLNSKLFRSMLFYKTCGFYCGIRIFKIKQNGEKYWNYDKGTLHKTQSIGKYSNVQM

SEQ ID NO: 5520 - protein, 1456 aa, synthetic construct
  REGION 1..1456: note = Synthetic
MKNILGLDLGTNSIGWALVDKENDKIIGMGSRIIPMSQDILGEFGQGNSISQTAERTNFRSIRRLRERYLLRRERLHRVLNIIGFLPQHYSNQIDFETRLGKFKEEAEPKIAYNSIINGTNGKIQFDFLFKKSFTEMLDDFRQYQPDIVANGNKIPYDWTLYFLRKKALTKKIEKEELAWILLNFNQKRGYYQVREDNDENINKKEYVISLKVTQIIKGEKDKKSKNKNWYSIILENGWVYNATFALEPQWLNNEKEFLISEELDENGQIKIVKDKKSDKGGKENRRIIPLPTFDEIDLMSKGEQDKIYKKIKTKTETAIENSGNTVGVYIYENLLKSPFQKIRGKLIRTIDRKFYREELKKILQKQKEFHSELRSENLYNDCVRELYKNNKDHIFLLSKRDFVHLFSDDIIFYQRPLKSQKSSISNCSFEFKKYSVDNEERIEYLKAIPKSHPLYQEFRLWQWIYNLRIYSRNDDCDVTINYLNDNERYADLFEFLSKRKEIEQKALLKYFKLKDSTHRWNFVENKKYPCYETRSLISTRLEKVENVPMNFLNDKTEQYLWHIIYSVKDKNEYEKALITFAKKNRLDIESFVENFKKFPTFKNEYGSYSAKALKKLIPLMRIGRYWNLDKIDEQTKSRIDKIVTGEFDEEIKNKVREKSISLTNNNHFQGLQLWLASYIVYDRHSEAATINKWETIQQLGEYIDNFKQHSLRNPIVEQIIIETLRVVKDIWHHFGKDKNNFFEEIHIELGREMKNNADERKRITNQMIDNENTNIRIKSLLSELKNDSSIQNVRPNSAVQQELLKIYEEGVLNSDIEIPEDIFKISKTAQPSNPDLQRYKLWLEQKYRSPYTGQIIPLSRLFTTEYEIEHIIPQSRYFDDSFNNKVICESSVNKLKDNQMGLEFIKNHHGEIVQTGFENSVKIFEESEYQDFVKTHYIKNRSKRNKLLMEEIPEKMIERQINDTRYIAKFISTLLSNLVRSASNDDGVNSKNLIQVNGKITSLLKQDWGINDVWNDLILPRFYRMNKITNSDSFTRYSEKYQKYLPTVPIEFSKNYQAKRIDHRHHALDALIIACATRDHVNLLNNKYAKSKERFDLNRKLRKFERTAYNHPQSGERIEREVPKEFLKPWNNFTVDLKNFLEKIVVSFKQNIRVINKTSNIYKKWVEVNKGKVKKEVKQSGVNWAIRKPLHKKTFAGKVELGKVKVPNGKILTATRKNLDASFDLKTIDSITDTGIQKILKNYLLSKGSNSSIAFAPEGIEEMNKNIKLYNDGKPHKPIYKVRIFELGSKFILGLTGNKKLKYVEAAKGTNLFFAVYQNEDEKRNFETIPLNIVIERQKQGLSSVPENNKKGHKLLFYLSPNDLVYVPDEDERENNSIIDFYNLTTKQINNIYKTVSFSGSQCFFIKHDVANSIVDKSEYSKSNKMEKSIDGIMIKEHCIKLKVDRLGNILKTYR

SEQ ID NO: 5521 - protein, 1455 aa, synthetic construct
  REGION 1..1455: note = Synthetic
MKRILGLDLGTNSIGWSLIEQDFNKKEGQILGMGTRIIPMSQDILGKFDSGNSISQTAERTSYRGMRRLNERYLLRRQRLHRVLNILGFLPDHYAASIDFHNKLGQFLPGKEVKLNYILNGGSKHHFIFQNSFDEMAKDFKIKHPDLKIPYDWTLYYLRKKALKDKISKEELAWLILNFNQKRGYYQLRGEEEEIEKNQEYVSLTVKELINTGEAVKGKPLYKVIFKNGWEYDREITKIEDWEKQEREFIVTTKTNKDGSLKRTFKKVDSEQDWIAIKKKTEQNIDETNKTVGEFIYETLLKKPSQKIRGNLVKTIDRKYYKNELIKILEVQKEFHPELENKDLYKKCLNELYPRNEAHQSNIKEKDFTYLFVEDIIFYQRPLKTKKSTISNCAYEKRYFQKDGEIQEQPLKGIPKSNPFYQEFRLWQFIQNLRIYKKIALDKQKAKIDEDITNHLLPDTKSIVELFDFLNNRKEIDQNQLLKYFSDLKLIPKQKKDAPSYRWNYVEDKKYPCNTTRAEFLTRLKKLKGIQENFFDKKTENDLWHIVYSVKDKKDFEKALGTFARKKRISESKFVENFKKIAPYSNDYGAYSEKAIKKLLPLMRMGKYWNEESLKPEIKNRIEDIQERLRAINFNKDEIETVADDAYKKQVLKSFLKSENKKNPFEGLNTYQACYAVYERHSEVSEIINWQSPSDIEFYLNETFKQHQLKNPIVEQVVTETLRVVRDIWKYYGNSKADFFSEIHVELGREMKNSAEKRQRLSNQNNERENTNLRIKAVLEELQDEGVEEVKPYSPNQQEILKLYEEGVYFNAKYDQVSEDEIEAIRKKNSPTKKDILRYKLWLEQGYRSPYTGNIIPMSKLFTTDYQIEHIIPQSRFFDDSFNNKVICESAINPYPYKDNQTAYEFINNSRGCVVPELGINGKECTIFTVEEYEAHCKSYYSKNRTKLKYLLSEDIPEGFINRQLNDSRYISKFIKGLLSNILREPNEREATVKNLVPVNGAITSQLKQDWGLNDKWNEIIAPRFKRMNEITKSNDYGYWDNKINAFRTQVPKDIETGFSKKRIDHRHHALDALVIACTTKDHINYITSINTERKNHSLVKKLRKTKDIELGGKKRTVAKSYKQPWEGFTIDAKNALEEIVISFKKNIRVINRTNNKTWHWEKKNGQWKKALKFQKGNNFAIRKPLHKETVSGLIDIPTPKGKVATATRTNISDIKNHKHIDKITDKSIQKILRNHVKNYLDQNGKEDFAEAFSPKGITDLNQNIKELNSGKNHQPIYKVRQYEVGNKFSVGERGNKTDKYVEAAKGTNLFFAVYWDDKKKKRNFETIPLNEVLEHQKQMAHIPMKDKEPIPIDHTKGKFLFFLSPNDLVYIPDREDIDSDVIPENLKKEKIYKMVSSTGIQCFFIKHQVSTVIQNKVEYSALNKMEKDIEDNMIKNICWKLEIDRLGNIKKIVK

SEQ ID NO: 5522 - protein, 1454 aa, synthetic construct
  REGION 1..1454: note = Synthetic
MKKILGLDLGTNSIGWALVEGNFENRNGNILGLGSRIIPMSQDIIGDFGKGNSVSQTAERTAYRSVRRLRERHLLRRERLHRVLNILNFLPEHYAKQIDFEKKLGQFIPSTEPKLAFNTNRFIFTDSFNEMVEDFRNKQPDLLITENGKPKLIPYDWTIYFLRKKALTQKIKKEELAWIILNFNQKRGYYQLRGEEEEENKNKLVEFYSLKVIDVVADEKPNSKGEIWYSLHLENGWIYRRSSKTPLDDWKNKTRDFIVTTDLNDDGSVKTDKEGAEKRSFRAPKEDDWTLLKKKTEKEINNSSETVGSYIYENLLNDPFKKIKGDLVRTIERKFYKKELELILNTQKDFHPELKNESLYFDSIRELYRNNEGHQLNLKKKNFVHLILEDIIFYQRPLRSQKSSISNCPLEYRTYKQNGEILKKHLKAIPKSHPIYQEFRVWQWMYNLKIYRKQDDSDVTNLFIKSTEDYENLFDFLMQQKEIDHKAVLKYFLNAEGLKGKSLNSEIAKYRWNYVYDSVKDESKKYPCNETGYDIRSRLKKVDGISPDFLTKEKEISLWHIIYSVTDKKDYEKALKSYAIKNELDIESFVEAFIKFPPFKSDYGSYSEKAIKRLLPLMRIGKYWEWDNIDIKTRDRINKFITGEYDENIKDKVREKAIKLEKEDDFQGLQLWLAGYVVYDRHSEAGEIIKWNSVAEMDEFINNFKQHSLRNPIVEQVVTETLRVVRDIWQHYGNGENDFFKEIHVELGRDLKNNADERKRLTNIVSENENTNQRIKALLIEMMNDGSIENVRPYSPVQQEILKIYEDGVLNSDIEIEDDIQKISKKAEPTKAELQRYKLWLEQKYRSPYTGQIIPLNKLFTPEYEIEHVIPQSRYFDDGFTNKVICEAAVNKLKDNQLGLEFIKNHYGQKVSTGFGKEVEVFTESQYKEFVDKHYAKSPGKRNKLLLEEIPEKMIERQLNDSRYISKYICSILSNIVRKENNDDGINSKNLLPGNGKVTTRLKQDWGLNDVWNELILPRFERMNSITKSELFTTYSKNHQKKLPSVPYEYSKGFNKKRIDHRHHAVDALVIASATRDHINLLSNKHAKSKERFDLNRKLRNYEKRVFTRDGERVEKEVPVNFIKPWPNFTADAKTSLEKMVVSFKLNQRIINKATNRYQKWVIKNGKKTKEMVEQEGQNWAVRKPMHKETVSGKVLLSNVKVPKDKILTATRKSIDPSFNHKTIKSITDKGIQNILANYLKSRDNNSELAFSPEGLEELNNNIRQYNNGKHHHPIYKARVYEVGSKFRLGENGNKKDKYVEAAKGTNLFFAVYEDENGKRNYETIPLNEVIEHQKWRATLTKEEQAETPMIPVKNDRGKFLFSLSPNDLVYVPDEEENINILELKNPSKEQAERIYKMVSSSGYQCFFIKHEVANSIVNKLEYSTLNKMERDVNGIMIKEKCIKLNVNRLGNIL

SEQ ID NO: 5523 - protein, 1453 aa, synthetic construct
  REGION 1..1453: note = Synthetic
MKKILGLDLGTNSIGWALIQQDFDKKQGSILGMGSRIIPMSQDILGEFGKGNSVSQTAERTGYRSTRRLRERHLLRRERLHRVLNVLNVLPEHYAHQIDFEKRFGQFKAESEPKLAYNNKQFIFKTSFEEMLEDFKKHQPELLTGENGKEKLVPYDWTIYYLRKKALTQQIGKHELAWIILNFNQKRGYYQLRGEEEEENPNKLVEFYSLKIVDVIPDEESNKKGETWYSLILENGWIYRRSSKTSLDDWKGKTRDFIVTTDLNDNGTIKTDKEGNEKRSFRAPGENDWGLVKKKTEQEIEQSHKTVGTYIYDSLLQNPKQKIKGKLVRTIERKFYKEELTLILKKQIELQPELFSENAYTDCIRELYRNNEAHQLTLSKKDFLHLFLNDIIFYQRPLRSQKSSIGNCTLEYRNYQIDGIEKRQYIKTIPKSNPYYQEFRVWQWLYNLKLYRNADDIEVTNEFIKDERDREHLFDFLMLQKEVDHTDILKYFFKELKGKVLTNEIGKYRWNYVYDSDKKESKKYPMNETGYEINRRLSKIESTPINFLDRETEQKLWHIIYSVTDKKEYESALKTFAEKQHLDATSFVEHFRKFPPFKSDYGTYSEKAIKKLLPLLRIGKYWDFNSIDNKTKNRIDNIINSIDDEGIRLLVREKAEKHKLESEADFQGLPLWLAQYIVYDRHSEADIAGKWSSVTDLEKFLSDFKQHSLRNPIVEQVVTETLRVVKDIWQHYGNGVENFFDEIHIELGREMKNTADQRKRLTNIITENENTNIRIKALLIEMMNDTTVENVRPHSPMQQEILKIYEDGVLNSNIEIEEEYLKISKKAEPTKSELQRYKLWLEQKYRSPYTGQIIPLNKLFTHEYEIEHIIPQSRFFDDSFSNKVICESAVNKLKDNQLGLEFIKNHYGQKVSVGLGKEIPIFTEDQYRDFIKENYSKNRSKRNKLLLEDIPEKMIERQLNDTRYISKFISNALSNIVRSKKDDDGINSKNVIPLNGKITSELKQDWGLNDVWNELILPRFERMNTLTNTDLYTTYNEKYQKFLPTVPFEHSKGFQKKRIDHRHHALDALVIACATRDHVNLLNNESAKSEMKRYDLQNKLRKKEPYFNLKENKEKDAFKEFFKPWETFTEDTKKSLETIITSFKQNIRVINKATNKYEKWVEKNGEKKKELVEQKGVNWAIRKSMHKDTVSGKIELHRIKVPKGKILTATRKSIDSSFTQKTIESITDTGIQKILQNYLLSKGGNSELAFSPEGIEDLNRNIAKYNNNKPHQPIYKVRIFEIGSKFSLGQTGNKKDKYVEAAKGTNLFFAVYQDENGKRNYATIPLNEVIERQKQGLSSVPETNDKGNKLLFSLSPNDLVYVPNEDENISTVDFNHLTKEQTERIYKMVSSTGSKCHFIQSSISSLIRNYDAKSKIGEIGSLNKQETTLDNLIRIKERCIKLKVDRLGTILKA

SEQ ID NO: 5524 - protein, 1453 aa, synthetic construct
  REGION 1..1453: note = Synthetic
MAKNILGLDLGTNSIGWALVKQDFQNKQGEILGMGSRIIPMSQDILGEFGKGNSVSQTASRTGYRGVRRLRERFLLRRERLHRVLNLLQFLPAHYAAQIDFAKRFGKFKEETEPKLVYDANKFIFKNSFEEMLSDFKKHQPQLLENNKKVPYDWTIYYLRNKALTQKIQKEELAWILLNFNQKRGYYQLRGEEEEENPNKLVEFYSLTIVDVVADEPQKGKSDIWYSLILENGWIYRRASKTPLFDWKDKTRDFIVTTDLNDDGSVKTDKDGNEKRSFRAPSENDWTLIKKKTESEIDKSKKTVGTYIYNALLLNPKQKINGKLVRTIERKFYKEELKNILEMQKSFHPELQNDDLYNDCVRELYRNNEAHQLTLSKKDFVHFFMDDIIFYQRPLRSQKSSISNCTLEFRKYKDENGVEYTQYLKAVPKSNPYYQEFRVWQWMYNLNIYLRDDDSNVTKEFLNTTKNFENLFEFLNNRKEVDQKALLKHFKLNEKTYRWNYVEDKKYPCNETKAMISSRLDKVENISNDFFTRELEQRIWHIIYSVNDKIEYEKALKSFANKNNLDEVSFFEAFKKFPPFKSEYGSFSEKAIKKLLSLMRLGKYWNYADIDKYSKDRIQKIINGEYDENIKDKVREKAVHFTTENDFQGLQLWLAQYIVYGRHSEASLIGKWNSADDLEEFLKDFKQHSLRNPIVEQVITETLRVVKDIWIKYGNGAKDFFNEIHIELGREMKLPADEREQLTKQISENENTNLRIKALLAEMMNDHSVENVRPYSPMQQEILKIYEDGILKSNIEIDDDILKISKTAQPSTSDLKRYKLWLEQKYKSPYTGQIIPLNKLFTPEYEIEHIIPQSRYFDDSFSNKIICESAINKLKDNYIGLGFIKQFGGTIIELGFGKSVKVFEAEEYEDFVKKHYANNRGKRNKLLLEEIPEKMIERQMNDTRHISKYISGVLSNIVRAEDGSDEGVNSKNIVPGNGKITTQLKQDWGLNDVWNDLILPRFKRMNKLTNSTDFTAWNENHQKFLPTVPIEFSKGFSKKRIDHRHHALDALVIACATKDHVNLLNNQSAKSDTKRYDLKKKLMKFEKVVYNHTQTGEKIEREIPKQFLKPWDNFTVDARNNLENIIVSFKQNLRVINKATNYYEKYVEKYGVKTKERVEQKGTNWAIRKPMHKETVSGKIDLPWVKVPKGKILTATRKSLDTSFDLKSINSITDTGIQKILKNYLEFKGNSEIAFSPEGIEDMNKNIEKYNDGKQHQPINKVRVFELGSKFQVGQIGNKKDKYVEAAKGTNLFFAVYEDKNGKRSYETIPLNIVVERQKQGLNSVPLENDKGNQLLFSLSPNDLVYVPLEDEILEGNFNLYNLSKEQIQRIYKVEKTSGVECYFVRQDIAFLIKQYDAKTKIGELESQNKLQVTMTEDRIKIADVCLKINCDRLGNINFLTKEKIKQIFNGYR

SEQ ID NO: 5525 - protein, 1453 aa, synthetic construct
  REGION 1..1453: note = Synthetic
MKTILGLDLGTNSIGWALIEQDFDNKKGNIIGMGSRIIPMTQDIKDEFGKGNSISQTADRTNFRGIRRIRERYLLRRERLHRVINVLGFLPKHYANQIDFEKRLGKFIDETEPKLAYDEKNFIFKKSFEEMLTDFKQHQPQILVNEKGEDKLIPYDWTIYYLRKKALTEKIEKNELAWLILNFNQKRGYYQLRGEEEEENPNKLIEFHSLKISDVIADDTLKGKSEIWYSLILENGWIYRRSSKTPLFDWKDKVRDFIVTTDLNDDGSVKTDKEGSEKRSFRAPSEDDWTLLKKKTEQEIIHSKKTVGTYIYEALLQNPKQKIKGKLVRTIERKFYKEELKAILKAQQVFHPELNDMDLYIECVRELYRNNEAHQTSLGKKDIVHLLTDDIIFYQRPLRSQKSSISSCTLEFRKYKDENGVEQTNNLKAIPKSHPLYQEFRLWQWIYNLGIYTKENDINVSTKLLENIEDYENLFNFLFSKKEIKQDILLKFLLEQKGYKSKLLSAEVAKYRWNFVPDKIYPCNETGSQIRYRLSKIENISDDFLTSEMEQKLWHIIYSVTDKIDYEKALNTFAQKHNLDVNSFVDNFKKFPPFKSEYGSFSEKAIKKLLPLIRIGKHWDWNTIDHKSQERISKIITGEFDESIKDRVREKSINLTTEDHFQGLQLWLAQYIVYGRHSEAVNLGKWNTVSDLETYLKEFKQHSLRNPIVEQVITETLRVVKDIWKKYGAGAKDFFKEIHVELGREMKNTADGRKQLTNQITENENTNLRIKALLTELLNDSNVENVRPFSPMQQEILKIYEDGVLNSNIEIDDEYLKISKTAQPSSSELKRYKLWLEQKYRSPYTGEIIPLNKLFTPEYEIEHIIPQSRYFDDSFSNKVICESAVNKLKDKQLGLEFIKNHHGEIVPTGFGRQVTVFGEDEYETFVKENYSKNRGKKNKLMLEEIPDKMIERQLNDTRYISKFISALLSNLVREESNDDGVNSKNVLPGNGKITTELKRDWGLNDVWNDLILPRFERMNKLTDSTAFTAWNANHQKFLPTIPLEFSKGFQKKRIDHRHHAMDALVIACASRDHINLLNNQSAKSQTKRYDLQHKLRRKEPYFNQKEQKQKEAFKEFFKPWDSFTVDARNSLENIIVSFKQNLRVINKTTNSYESYKDENNNLRIGKDGKFKKDLVPQTNGDSWAIRKSMHKDTVSGLVKLDRVKIPNGKILTATRKRIDTSFNFKTIESITDTGIQKILKNYLISKGNDPELAFSPEGIEDMNKNIRKYNDNKNHQPIYKARVFELGSKFPLGQTGNKKYKFVEAAKGTNLFFAIYQDEKGKRSYETIPLNIVIERQKQGLNSVPLENNKSEKLLFHLSPNDLVYVPNHELLFEDNEVSINNSLKGERENIYKMVSSSGVQCFFVKQELATTIVNKVEYSALNKMERSLHGVMIKDSCVKLNIDRLGSISIVI

SEQ ID NO: 5526 - protein, 1453 aa, synthetic construct
  REGION 1..1453: note = Synthetic
MEKYIIGLDLGTNSIGWSLIQQHFENKYGRILGLGTRIIPMSQDIISDFGKGKSISQTAERTGYRSTRRLRERHLLRRERLHRVLHLLGFLPKHYDEQIDFKKHFGKFFSGSEPKLVYNQNEFLFKDSFLEMLADFKQHQPEFLKDKKGNDCLIPYDWTIYFLRKKALTQKIAKEELAWILLNFNQKRGYYQLRGEEEEENPNKLVVFHSLRVLDVVADEEKNKKGETWYSLYLENGWIYRRSSKTKLYDWKDKVRDFIVTTDLNDDGTEKQDKDGNVKRSFRAPGSDDWTLIKKKTEQDIGQLGKTVGTYIYDHLLLNPKQKIKGKLVRTIERKFYKEELEQILKTQQSFHVELQDTFLLKKCIEELYRHNKTQQQQLFSKDFVYLFLKDIIFYQRPLHSQKSNVSNCSLEFRMTKNEKGESIVRPLKVIAKSNPYYQEFRLLQWIHNLAIYRKEDDVNVSDEFFKTIENKDELFDFLNHKKEIEQKVLIRFLLEKKGFKGRALTTEIEKYRWNYVMDKKYPCNETKAMLYSCLSKVDNVPADFLSFHQELNLWHLIYSVTDKEEYNKALITFARKHQLNEESFFEAFRKFPPFKSDYGSFSQKAILKLLPLMRFGKNWDWNQIDKESQERISKIITGEYDKEITDRVREKAQHLTTETDFQQLPLWLAQYVVYGRHSEATNTDKWYSVKDLENYIASFKQHSLRNPIVEQIVLETLRVVRDIWIQYGKGAKDFFNEIHIELGRDLKNTAEERERITTMVTENENTSLRIKALLAEMALDKAVENARPYSPSQQEILRIYEDGVLNSGMDIEEDILKISKTAQPSSSDLKRYKLWLEQKYRSPYTGQIIPLNKLFTPEYEIEHIIPQSIYFDDSFSNKIICEAAVNKLKDNTIGLAFIKKFHGQIVDCGMGKQVKIFEVSGYEEFVNQNYAKNRAKRNKLLMEDIPEKMIERQLNDTRYISKYISGILSNIVRSESNDDGVNSKNLISGNGKITTALKQDWGLNDIWNDLILPRFERMNELTNSSDFTSWNENYQQHLPTVPLELSKNFSKKRIDHRHHALDALIIACATRDHINFMNNEHALKNWKTKEEKQKFRFDLRAKLCDKKYNNGSSENYKWVFKKPWETFTTDSKDELERIVVSFKQNLRVINKATNYYEKWIDKNGEKVKETVKQEGINWAIRKPLHKETVSGKISLDRIKVGKGKILTATRKSLDSSFNENNIETITDTGIQKIVSNYLKSKNNDSEIAFSPEGIEEMNQNIRDYNEGKLHQPILKVRVFEQGSKFQLGETGNKTKKYVEAAKGTNLFFAVYQDKSGKRNYDTIALNLVIERQKQGLPSVPEINEKGHQLLFTLSPNDLVYVPMDEEDISGINFNNLNKEQVNRLYKMVSSTGSECHFIHSRVATLIKNYDSKSKIGEFGSLNKLEVTMDNSVRIKEKCIKLKVDRLGNIFKA

SEQ ID NO: 5527 - protein, 1450 aa, synthetic construct
  REGION 1..1450: note = Synthetic
MKHILGLDLGSNSIGWAFVQQDFENKQGKIIATGSRIIPMDQGILGDFERGNTVSQTAERTAYRSTRRLRERHLLRRERLHRVLHILGFLPPHYDAQIDFTKRYGKFIDNAEPKIAYNNGNFIFMNSFNEMVEDFKKHQPQLFYKKSNGEESKIPYDWTIYYLRKKVLSQKITQQELAWLILHFNQKRGYYQLRGEEETENPNKEVAFHSLKVVDVEAEAPNKKGEIWYTIRLENGWIYRRTSKIPLDDWKGKTRDFIVTTDLNDDGTIKLDKEGKEKRSFRAPDENDWNLLKKKTEHDIDFSGKTVGAYIYDHLLQNPNQKIKGKLVRTIERKYYKDELKAILAKQIALQPELFTETLLADCIRELYRKNETQQQNLLSKDFLHLFVEDIIFYQRPLRSKKSTIANCTLEKRSYIDKETNERKDTPIKVCAKSNPYYQEFRVLQWLQNLRIYEIETDREVTAEFIETAQDYEALFNFLMSQKEIDNESLLKYFLLAKNPQIKDKAAKSELKKWITTYRWNYVYDVADNSSKKYPMNETGYDLQRYLQKVEGLPANFLTFDTTYRLWHLLYSVKDKVEFEKALKKFAQEYQLDEASFVDSFKNFKPYPNEYGSFSEKAIKKLLPLMRFGNHWDFNRIDVSTQKRIDDLINGVANEEIRTIIREKAEKYQLNSETCFQGLPLWLAQYVVYNRHAEATDIEKWTSVNDLEVYLEDFKQHSLRNPIVEQVVTETLRVVRDIWQQYGGGQANFFDEIHIELGRELKKTAEERKQLSDKNQENENTNLRIKKLLAELKEDASIQNVRPYSLVQQELLKIYEEGVFSSTDEIEEDIQKIRKKAEPTTPEIQRYRLWLEQKYKSPYTGEVISLTKLFTEEYEIEHIIPQSRYYDDSLSNKVICESAVNKLKTNQLGLEFIQNHHGEKVRITANKEVTIFTEEQYKEFVKKHYANNSAKQQKLLLNEIPEKMVARQLNDTRYISKYISEILSKIVRSDEKDEGVNSKNVIPCTGKITTALKQDWGLNDVWNELILPRFERMNQLTQTQLFTSYNDRLQKNLPTVPIEYSQGFQKKRIDHRHHAMDALVIACATREHINYMNNQHALDKSKDKKEKQQSRIDLRTILCEKKNNNWQFKKPWSTFTQEAKEALEHIVVSFKQNLRVINKATNYYEKWEEKNGVLVKKKVKQEGTNWAIRKPLHKETVSGKIVLDRKIGKDKILTATRKAVDITFTEKIISSITDTGIQKILLNYLKYKGSPEVAFSAEGLEELNKNIAQYNDGKKHQPIYKVRIFEEGSKFPLGETGAKATKYVEAAKGTNLFFGVYQGKGKRTYATIPLNEVIERQKQGLPSVPERNGKGEPLLFSLSPNDLVYVPMEGEIAETIDFNNLSKEQKERIYKTVSFTGNQCFFVQETVASPIVNKMEYSPLNKMERDILGIMIKEVCVKLKVDRLGNIIKA

SEQ ID NO: 5528 - protein, 1450 aa, synthetic construct
  REGION 1..1450: note = Synthetic
MKKILGLDLGTNSIGWALIEQDFENRQGKILGLGSRIIPMSQDQLGDFGKGNSISQTAERTRMRSVRRLRERHLLRRQRLLRLLNILGYLPEHYALEIDFEHRLGQFLPEKEPKIAYNNKQFIFKNSFSEMLEDFRKQRPDYLKDEAGNEKLIPYDWTIYFLRKKALTEKIEKEELAWILLNFNQKRGYYQLRGEEEEEFLNKIVEFHSLAITDVKADDQQKGKSEVWYSLVLENGWIYRRSSKIPLYDWKDKVRDFIVTTELNDDGTVKKDKEGREKRSFRAPGEDDWTLLKKKTEQEIEQANETVGAYIYDTLLQNPKQKIRGKLVRTIERKYYKDELRQILKKQSEYHSELQDEEIYNDCVRELYKNNETHQLTLSKRDFVHLFLDDIIFYQRPLKSKKSSITNCTLEYREFTDKEGKRQIQHLKAIPKSHPAYQEFRLWQWIYNLSIYKKDDDTNITKSVLQNTEDYEKLFEFLNNRKDVDQKAVIKYLLANTGLKGKDLNNEIIKYRWNFVEDKLYPCNETHTNIKNRIEKVVNIGNDFLTAETEQQLWHIIYSVTDKTEYEKALKQYAKKHKLDIDSFVENFIKYPPFKSEYGSYSVKAIKKLLPLIRLGKYWEWDNIDHKTKQRIDKIINAEEDSEIRVLVREKASKNELKTPNDFQGLQLWLASYIVYDRHSEATSNDKWNSLEDLSQYLEDFKQHSLRNPIVEQVITETLRVVKDIWAKFGNGAKDYFNEIHVELGREMKNTAEERKSITNLVVENENTNLRIKSLLAELKNDPKIENVRPHSPMQQEILKIFEDGVLKSNIELPDEILKISKSALPTNSELQRYKLWLEQKYRSPYTGKIIPLHKLFTPAYEIEHIIPQSRFFDDSFNNKIICESAVNKLKDNLLGLEFVKKHHGEIIELGIGNESVKIFSEEEYLDFIKQNYLNNRSKRNKLLLDEIPDKMIKRQLNDTRYISKFISALLSNIVRSAHNDDGINSKNVIPGNGKITSRLKQDWGLNDVWNDLILPRFQRMNKLTNTTDFTTYNEKYQKELPTVPIGLSKGFQKKRIDHRHHALDALVIACATRDHVNLLNNLYAKSNERFDLNRKLRKFEKVSYKQPKKGKTVEREVPMDFIKPWENFTEDANNNLESIIVSFKQNLRVINKTTNKYTNWIEKDGKKVKGVVSQTKGDSWAIRKPMHKDTVSGEVKLAWIKVPKGKRLTATRKPIDITFDLKTIESITDTGIQKILKNYLISKENNPELAFTPEGLEEMNKNILIYNDGKLHQPIYKARVFELGSKFPLGQIGNKESKFVEAAKGTNLFFAIYIDNKGKRDYDSIPLNIVIERQKHGLNAVPETNEKGYKLLFHLSPNDLVYAPTLEEIPEIGHKQIDINYIKKVNRVYKMVSSSGKQCFFIKHEVSTPIVYKSEYSALNKMERSIDDLMIKDVCSKIIVDRLGNVIYT

SEQ ID NO: 5529 - protein, 1447 aa, synthetic construct
  REGION 1..1447: note = Synthetic
MMIKNILGLDLGTNSIGWALIKQDFENKYGEILGMGSRIIPMSQDILGEFGKGNSVSQTAARTGYRGVRRLRERFLLRRERLHRVLNVLNFLPKHYASQIDFKKRFGKFKEETEPKLAYNNDGFLFRNSFEEMLTDFKNHQPQLLANNKKIPYDWTIYYLRQKALYHKIQKEELAWILLNFNQKRGYYQLRGEDFEDEKNKVFVRLKVDKIVDSGENIKGKILYDVYFENGWKYEKQIVKTEDWIGRTKEFIVTESILKNGDTKRTFKAVDSEKDWIAIKTMTEQEIERSHKTVGTYIYETLLQNPKQKINGKLVRTIERRFYKEELKQILEKQKEFHQELQSDDLYSDCIRELYRNNEAHQLTLSKKEFVHFFMDDIIFYQRPLRSQKSSISNCTLEFRKYKDENGVEHTQFLKAIPKSNPYYQEFRIWQWIFNLNIYKKDDDSNITKELLSTTEDFESLFEFLNNRKEIEQKPLLKFLLERKDFKGKLLSVEIEKYRWKYVEDKKYPCNETRTMILSRLDKVENISIDFLTREVEQKIWHIIYSVNDKIEYEKALKTFAVKNNLDENSFFEVFKKFPPFKSEYGSFSEKAIKKLLPFMRLGKYWDYENINEYSKEKIQKIISGEFDENIKNRVREKATHLTTETDFQGLQLWLAQYIVYGRHSEASMNDKWNSADDLEKFLNEFKQHSLRNPIVEQVITETLRVVKDIWLKYGNGAKDFFSEIHIELGREMKQTKDERANATKRITENENTNLRIKALLAEMMNDNSVENVRPYSPMQQEILKIYEDGILRSEIEIDDDILKISKTAQPSSSDLKRYKLWLEQRYKSPYTGQIIPLNKLFTPEYEIEHIIPQSRYFDDSFNNKIICESAVNKLKDNYIGLGFIKQFGGTMVECGFGRSVRVFEAGEYEEFVKKHYANNRGKRSKLLLEEIPDKMIERQMNDTRHISKYISGVLSNIVRVEDGTDEGVNSKNLVPGNGKITSQLKQDWGLNDVWNELILPRFERMNQLTNSTDFTTWNENYQKFLPTVPVEFSKGFSKKRIDHRHHALDALIIACATKDHVNLLNNQSAKSDTKRYDLKKKLMKFEKVIYKHPQTDERIDREVPKYFLKPWEDFTVEAKNNLEKIIVSFKQNLRVINKATNYYEKYVEKDGVKIKERVEQTGTNWAIRKSLHEETVSGKIKLSWLETSNGEFITATRKLLDSSFTFEKIKKITDTGIQKILTNYLKTKENNPELAFSPEGIEDLNKNIEKYNDGKSHQPIMKVRLYEKGKGRFVLGQTGNKINKYVQGSPNLFFAIYKNENGKKNFESIRLDIVIERLKQGLQAVPGTNENGVPLYESLSPLDLVYVPTEGELESPHLLDFSKLNKTQITRLYNTNDFSGVTAYFSQNSFARHIYPKEMDLSWNVKKQKLSGSFDSKTASYNKTPIKDIFIKVKVDRLGNISKDKL

SEQ ID NO: 5530 - protein, 1447 aa, synthetic construct
  REGION 1..1447: note = Synthetic
MKRILGLDLGTNSIGWALIKQDFENKQGKILGMGSRIIPMSQDILGEFGKGNSVSQTAERTGYRGVRRLRERYLLRRERLYRVLNIIKFLPEHFANEIDFDKRFGKFKSDNEPKIAYNTDGFVFKNSFEEMLSDFKMHQPQILKNEKDKDKLVPYDWTIYYLRKKALSQKIEKEELAWILLNFNQKRGYYQLRGEEEEENPNKLVEFYSLRIVEVTADEPQRGKSDIWYSLMLENGWVYRRASKTPLFDWKNKTRDFIVTTDLNDDGSIKKDKDGNEKRSFRAPTETDWTLVKKKTEQEIDNSHKTVGTYIYDTLLQNPKQKIKGKLVRTIERKFYKAELKQILEKQAAFHPELQNVDLYNDCVRELYKNNDAHQLTLSKKDFVHLFLEDIIFYQRPLRSQKSSISNCSLEFKKYVDKDGVEHTQYLKAIPKSNPYYQEFRIWQWMYNLNIYRKDDDENVTKEFLNSYEDLENLFKFLDERKEIEQKALLKFLLEQKDFKGKVLTAEIEKYRWNFVEGKAYPCNETKTMIATRLSKVDNIADDFFTREIEQQIWHIIYSVNDKIEYEKALKSFARKNNLDEISFFEAFRKFPPFKSEYGSFSEKAIKKLLPLMRVGKHWSYANIDEHSKARIDKIITGEYVENIKDKVREKAINLKTESHFQGLQLWLAQYIVYGRHSEASIIGKWNSADDLELFLKEFKQHSLRNPIVEQVITETLRVVKDIWVQYGKGARDFFNEIHIELGREMKNTADDRKKITNQVTEKENTNLRIKALLAEMMNDANVENVRPFSPMQQEILKIYEDGVLNSDIEIDDDILKISKTAQPSSSDLKRYKLWLEQGYKSPYTGQIIPLNKLFTPEYEIEHIIPQSRYFDDSFSNKIICEAAVNSLKGNKLAYEFIKDPVLQTVEVGFGKSVPILKADEYEEFVKKHYAKNRSKKAKLLLEEIPEKMIERQMNDTRYISKYISGVLSNIVRVEDGTDEGVNSKNIVPGNGKITTTLKQDWGLNDVWNDLILPRFERMNQLTNSTDFTAWNENHQKFLPTVPIELSKGFSKKRIDHRHHAMDALVIASATKEHVNLLNNQSAKSDTKRYDLKKKLMKFEKAVYTDAKTGKRIERDVPTKFLKPWENFTADARNSLENIIVSFKQNLRVINKATNYYESYKDEDGNIRLGSDGKPKKDFISQKGTNWAIRKPMHKETVSGKVHLPWVKLPKGKILTATRKSLDTSFDMKTIGSITDTGIQKILRNYLAAKGSSELAFSPEGIEDLNRNIKQYNDGKDHQPITKVRVFEMGSKFQVGYSGNKKYKYVEAAKGTNLFFAVYEDEKGKRSYESVPLNIVIERQKQGLDVVDLKGDKDFYLSPNDLVYLPSGDELDNSNNIDFENLSKQKKQNIYKVVSFTGNRLYVIPYYVSVAILNKVEHTQLNKIEFTKEKEICFKLKTDRLGNISKA

SEQ ID NO: 5531 - protein, 1446 aa, synthetic construct
  REGION 1..1446: note = Synthetic
MVKNILGLDLGTNSVGWALIKQDFENKQGDILGMGSRIIPMSQDVLGDFGKGNSISQTAERTKYRSVRRLRERFLLRRERLHRVLNVLDFLPEHYASQIDFNKRFGKFKEETEPKLAYSNDGFIFKKSFEEMISDFKTHQPELLENNKKVPYDWTIYYLRNKALSHKIEKEELAWILLNFNQKRGYYQLRGEEEEENPNKLIEFYSLKIVDVLADEPQKGKSDIWYSLILENGWIYRRSSKIPLLDWKGKTRDFIVTTDLNDDGSVKTDKEGNEKRSFRAPGENDWTLVKKKTEQEIDNSDKTVGAYIYEALLQNPKQKIKGKLVRTIERKFYKAELKQILEKQMEFHPELRQDDLYSDCVRELYKNNEAHQLTLSKKDFVHLFMEDIIFYQRPLRSQKSSISNCTLEFRKYKDENGTEHIQYLKALPKSNPYYQEFRIWQWMYNLNIYKKEDDTNVTKEFLNSKADFESLFEFLNNKKEVDQKALLKHFKINDKTHRWKYVEDKKYPCNETKTMISERLKKVENISDDFLTREMEQKIWHIIYSVNDKVKYEKALKSFAEKNNLDESSFFEAFKKFPPFKSEYGAFSEKAIKKLLPLMRLGKYWDDDEILKYSDIYFKNIEYLLGVLKQKDKNISDDNRQNWNKSINNKLREELEIFQNAEIESFQGLRLHIAQYILYGRHSEAAMLGKWNSADDLEEFLKEFKQHSLRNPIVEQVITETLRVVKDIWVKYGNGAKDFFNEIHIELGREMKLPAEDRKKITNQISENENTNLRIKALLAEMMVDSSVENVRPFSPMQQEILKIYEDGVLNSDIEIEDDILKISKTAQPSPSDLKRYKLWLEQKYKSPYTGQIIPLNKLFTPEYEIEHIIPQSRYFDDSFSNKVICEAAVNKLKDNFIGLGFIKQFGGTIVECGNGKSVTVLKEDQYEDFVKKHYANNRSKRNKLLLEDIPEKMIERQMNDTRYISKYISGVLSNIVRTEDGTDDGVNSKNIVPGNGKITNTLKQDWGLNDIWNDLILPRFERMNQLTNSTDFTAWNENHQKFLPTVPVEFSKGFSKKRIDHRHHALDALVIACATKDHVNLLNNQSAKSDTKRHDLKRKLMKFEKVAYNHPQTGERIEREVPKQFLKPWETFTVEAKNGLETIIVSFKQNLRVINKATNHYEKYVEKDGAKVKGRVEQAGTNWAIRKPMHKETVSGKIDLPRIKVPKGKILTATRKNLDTSFDLKTIGSITDTGIQKILKNYLQYKDNNPELAFSPEGIEDMNKNIEKFNDGKVHQPIIKVRIFELGSKFPLGQSGNKKDKYVEAAKGTNLFFAVYEDKNGKRSYETIPLNEVIERQKQGLTVVDLKGVNDFYLSPNDLVYVPSEDELENVSMIDYNKLSNEKVYKVVSFTGNQIFFVRQDVATSIVNKAEFSSLNKMERAIGGTMIKEVFVKIKIDRLGNISKV

SEQ ID NO: 5532 - protein, 1445 aa, synthetic construct
  REGION 1..1445: note = Synthetic
MKNILGLDLGPNSIGWALLHLDCNSRYGNIVDCGVRIIPMSQDILGDYNKGIKVSQTAERTKYRSMRRLRERYLLRRERLHRVLYLLKFLPSHYADEIDFQKRLGKFKEGREPKIAYDKNGFIFMSSFLEMMEDFRIHQPALLINEKGEPKSIPYDWTLYYLRKKALTAPIRKEELAWLLLNFNQKRGYYQLGGDEEESSLEKNTALYTLKVVDVIAEESKKGGDQWYSLTLENGWVYRRSSKLPLFDLKGKIRDFIVTTDLNADGSVKKDKKGGDKRSLRIPEDKDWILLKKQTEQEIGKFGSTVGAYIYENLLKDPYQRINGKLVGTIEREFYKSELKQILEKQMEFHTELQSEEMYSTCIRELYKQNDGHHLNLSRKDFVHFFVDDIIFYQRQVKSQRSMVSNCPLEFRYYKDKDGVVQKVYLKAIPKSNPYYQEFRLWQWIHNLFIYRKEDDVDVTATFLNDFKELENLFIFLNGRAEIEQRHLLGFLLGPKGFKGKLLNKEVDKYRWNYGEKSFPCNETRTLICKRLEKINNVPADFLTKEIEMHLWHINYSVSDRIDREKAFTRFATNNNLDVNEVVNAFKVVPPLKSDFGAFSEKAIKKLLPLMRVGSYWNWEAMDVRTRERIGKIITGEYDERIGDRLRKQAIHLKKETDFQRVPVWLAQYIIYGFHSESQMADKWTSIQDLESYLKCFKQHSLRNPIVEQVVLEALRLVKDIWKEHGKGANNFFDEIHIELSREMKSPAEERKSMSLKALQNENTNLRIKALLSELANDQNVENVRAYSPSQQEILKIYEEGVLNTESEIGEDILKISKMAQPSPADLRKYKLWLEQKYRSPYTGAIIPLNKLFTTEYEIEHIIPQSRYFDDGFSNKVICEAAVNKLKDNQLGMEFIKNHHGEIVQLGFGKTIQILAVEQYEKLVKENYVNNSSKRNKLLLEEIPEKMIERQLNDTRYISSYISGLLSNIVRQDTDDNGFNSKNLIQTNGRITGILRQDWGLNDVWNSLILPRFERMNKITNSSQYVAWSETHQKNLPTVPLTLKNFSKKRIDHRHHALDAIVTACVTRDHINLLNNLHAKSPIRHDLNRKLRHHKSIVLNHHKTGEKIERQIPVDFRKPWEDFTLDVKSSLENIIVSFKLNLRVINKTINNYYVWEVKDGVKQKVRIRQSGENWAIRKPLHKETVYGIVNLPHVKVKIGQITTASRKNIDVTFDLSVIENSITDTGIQRILKNYLEFKNGDPEIAFSPEGLEELNQNLRKFNEGKFHHPIYKVRKYEKGYRFVLGEVGYKSTKYVEAERGTNLFCAIYCNTAGARSYETIPLNIIIERQKQGLPSVPQENSKGEKLLFHLSPNDLVYIPDEEELSSHSVPKFEINNKKHIGRIYKVVNFSDNQIFFIKHEVATSILHKQEFSTSNKMERSIDGIMIKEHCIKLNISRIGKLISDK

SEQ ID NO: 5533 - protein, 1444 aa, synthetic construct
  REGION 1..1444: note = Synthetic
MIKNILGLDLGTNSIGWALIKQDFENKQGEILGMGSRIIPMDVGDMGKFAEGAAVSKTADRTKYRSVRRLRERFLLRRERLHRVLNIMNFLPKNYASQIDFNNRFGKFKEETEPKLAYDTEGFIFKNSFEEMLIDFKNHQPQLLENNKKIPYDWTIYYLRKKALSKKIEKEELAWILLNFNQKRGYYQSRGEEEEENSNKLVEFYSLKIVDVLADEPQKGKSDIWYSLVLENGWIYRRSSKMPLFDWKDKTRDFIVTTDLNDDGSIKTDKDGNEKRSFRAPAETDWTLVKKKTEQEIDKSHKTVGTYIYETLFQNPKQKIKGKLVRTIERKFYKDELKQILEKQKEFHQELKNDDLYNDCVRELYRNNEAHQLTLSKKEFVHLLMEDLIFYQRPLRSQKSSISNCTLEFRKYKDENGVEHTQFLKAIPKSNPYYQEFRIWQWIFNLNIYKRDDDSNITNDFLNSTEDFESLFEFLNNRKEVEQKALLKHFKLNEKTHRWNFVEAKKYPCNETKTMISSRLDKVENISDDFLTREIEQKIWHIIYSVNDKIEYEKALKSFAGKNNLDESSFFEAFKKFPPFKSEFGSFSEKAIKKLLPLMRLGKFWNYENINDYSKDRIQKIITGEFDENIKDKVREKAINLTTESHFQGLQLWLAQYIVYGRHSEASMIGKWNSADDLEEFLKEFKQHSLRNPIVEQVITETLRVVKDIWLKYGNGAKDFFNEIHIELGREMKNTAEDRKQITNMVTENENTNLRIKALLAEMMNDNSVENVRPYSPMQQEILKIYEDGILKSDIEIEDDILKITKTAQPSSSDLKRYKLWLEQKYKSPYTGQIIPLNKLFTPEYEIEHIIPQSRYFDDSFSNKIICESAVNKLKDNYIGLGFIKQFGGTIVECGFGKSVKVFEAEEYEDFVKKHYANNRGKKNKLLLEEIPEKMIERQMNDTRHISKYISGVLSNIVRVEDGSDEGVNSKNIVPGNGKITTQLKQDWGLNDVWNELILPRFERMNQLTNSTDFTAWNENHQKFLPTVPIEFSKGFSKKRIDHRHHALDALVIACATKEHVNLLNNQSAKSDTKRYDLKKKLMKFEKVVYNHPQTGERIEREVPKQFLKPWDNFTVEAKSSLDKIIVSFKQNLRVINKATNYYEKYVEKDGVKTKERVEQTGTNWAIRKSLHEETVSGKIDLPWVEKSNGEFITATRKSLDTSFNLEKIKKITDTGIHKILRNYLEARDDNPELAFSPEGIEDLNKNIEKYNDGKSHQPIIKVRLYEKGKGRFALGQTGNKIDKYVQGSPNLFFAIYKDENGKKKFESIRLDIVIERLRQGLQAVPETNEHGVSLYQNLSPLDLVYIPTEDELGSPNLIDFSKLNKSQLERIYNVNDFSGYTIYFSQNSFAKNIYPKEMDMAWNEKKQKASGSFDSKTASYNKRSIKDIFIKVKIDRLGNILNQ

SEQ ID NO: 5534 - protein, 1444 aa, synthetic construct
  REGION 1..1444: note = Synthetic
MKKHILGLDLGTNSVGWALLEVNENGKPYKIRGMGSRIIPMSQDILGNFENGNSISQTAERTDYRGTRRLRERHLLRRERLHRVLNVLGFLPEHYASQIDFEKRLGQFASDTEPKLAWKKLDEGKFEFIFQKSFNEMITDFKNTQPQLLKEGKLIPYDWTIYYLRKKALTQKIEKEELAWILLNFNQKRGYYQLRGEDEEENPNKLVEFYALKVVDITADGPQRGKTDIWYNVVLENGWVYHRSSKVSLTDWIGKTKEFIVTTDLNDDGTIKIDKEGNEKRSFRAPSADDWTLLKKKTEADINKSNQTVGEYIYEALLQNPKQKIKGKLVRTIERKFYKEELRQILLKQKGFHQELQNEDLYNEAVRELYRNNESQQLSLAKKDFISLFLNDIIFYQRPLRSQKSSISNCTLEFRKYKDKDNIEHIEYLKASPKSNPYYQEFRLWQWINNLAIYRRDDDANVTQEFLNQIEKFEDLFDFLNNRKEIKQDVLIKYFLEKKGYKGKALTNEVSKYRWNFVDDKDKAYPCNETRYLITNRLEKVQNTPSDFLNREIEQQLWHIIYSVTDKAEFEKALKSFAEKHQLDMESFVDNFRKFPPFRNEYGSFSEKAIKKLLPLMRFGKYWNWEAIDPKTKDRIDKIITGEYNEEIKDKVREKAIHLSQKENFQGLQLWLASYIVYGRHSEANAAEKWNTVEDLETFLKNFKQHSLRNPIVEQVVTETLRVLKDIWKHYGNGAKDFFSEIHIELGREMKLPTEERQRLTKQITENEITNLRIKSLLAEMENYAEVENVRPLSPMQQEVLKIYEDSVLNSGIEIDDDILKISKTAQPSSSELRRYKLWLEQRYRSPYTGTVIPLNKLFTSDYEIEHIIPQSRYFDDSFSNKVICESAVNKLKGNQLGLEFIKEHPEEMVEIGFGKKVRIFNEKEYLEFVKEHYSKNRSKRSKLLMEEIPEKMIERQINDTRYISKYISSLLSNIVREEIKDDGVNSKNLIPLNGKITTRLKQDWGLNDIWNDLILPRFERMNQLTNSTDFITYNERYQKYLPTVPIEVSKNFQKKRIDHRHHAMDALVIACATRSHVNYMNNQYALDKSKTKEEKQVKREDLRTVLCYKKYNDNFSKSYNWFFKKPWDSFTVDARNELEKIIVSFKQNLRVINKSVNYYQHYVDGKKVIDKQTKGDNWAIRKSLHKEFVYAKVNLVRIKVSRGKFITAIRKKLDTSFDLKTIDKITDTGIQKILKNYLSYKKSPELAFSPEGIEDLNNNIEKFNDGKKRQPIHKVRIFEIGSRFPLGETGNKKSKYVEAAKGTNLFFAIYVDEEGNRSYETIPLNIVIERLKQGLTDVPEINEKGDKLLFHLSPNDLVYVPTEEENAKPLDREELHQNRIYKMVSSSGSQCFFIKSEVANSIVNKIEYSALNKMERAIDGTMIKQVCIKLKVDRLGKVEEAFR

SEQ ID NO: 5535 - protein, 1443 aa, synthetic construct
  REGION 1..1443: note = Synthetic
MSFLSLFKKILTKFGIDCKNISMKHILGLDLGSNSIGWALIEQDFDNKQGKILGLGSRIIPMDQGILGEFERGNKVSQTAERTGFRGVRRLRERHLLRRERLHRVLHLLGFLPPHYDAQIDFTKRFGKFIGDSEPKLAYNNEGFIFLESFNEMVEDFKKHQPQLFYIKSNGEESKIPYDWTIYYLRKKALQEKISKEELAWIILNFNQKRGYYQLRGEEEEKSTKNVEFYSLEITDVIADTPNNKGEIWYSIHLENGWVYRRASKISLEDWKGKVRDFIVTTELNEDGSVKLDKEGKEKRSFRAPSEDDWNLIKKKTEQNIVFSGKTVGEYIYDHLLQNPNQKIKGKLVRTIERKFYKEELKAILEKQVALQPELFTEELFVDCVRELYKNNEIHQNSLSSKDFVHLFLNDIIFYQRPLRSQKSNISSCSLEYRFCIDKETKQRRKTYLKVISKSNPYYQEFRVLQWLSNLKIYRKEDDKDVTSEFISSIEDKETLYEFLMSEKEVSNKSILEFLLMKSLRETYPFAKETELKKELKKEITKYRWNYVYEEENDSKKYPMNETGYEIKKRLKEVKNIPDNFLTRDIEYQLWHIIYSVTDKYEYEKALMKFAQKHNLDAESFVENFKRIKPYPSDYGAFSEKAIKKLLPLMRFGKYWNYSDISEPVQVRISDIINGVDNENIKTIVREKAEKYQLSQEVDFQGLPLWLAQYIVYGIHSEAADIQHWTSPSDLEEYLKGFKQHSLRNPIVEQVVTETLRVVKDIWEYYGKGEQNFFDEIHIELGRELKKTAEERNRMTREINENEETNLKVKKELQQIFENKSAENVRPYSPIQQEKYRLWLEQEKESPYTGQPIPLSKLFTDEYQIEHVIPQSRFFDDSLSNKVICEAAVNAEKGAQLGLEFIKKHGGEIIEIGLNKKVTILNEKEYKELVNKHFANNRAKKAKMLMEEIPEKMVERQLNDTRYISKFISQILSNIVRSPQEDDGVNSKNIIPYTGKITAALKQDWGLNDVWNDLILPRFERMNNLTQTELFTTYSEKYQKKIPTVPLEHAKGFQKKRIDHRHHALDALVVACATRSHINYMNNKHALDKHKAKEEKQNARIDLRTVLCEKKYNDNAEDKYNWTFKKPWNTFTQDVRSALEMIVVSFKQNLRVINKATNYYEKWVEEKGKMVKKKVKQEGINWAIRKPLHKETISGKITLERVKVGKGKILTATRKSIDSSFTEKTIASITDTGIQKILLNYLAHKGSPELAFSPEGLEEMNKNIAKYNDGKDHQPIYKVRIFEEGSKFPLGEIGTKSQKYVEAAKGTNLFFGIYQGEEKRSYATILLDEVIERQKQGLTSVPELNEKGEKLLFSLSPNDLVYVPVEGEDTQSIDYANLSKEQRERIYKIVSFTKNRLYGIPNIVAVSIVNKMEYTQLNKIEFLKEKETCIKLKIDRLGNISKA

SEQ ID NO: 5536 - protein, 1441 aa, synthetic construct
  REGION 1..1441: note = Synthetic
MGKTILGLDLGTNSIGWALIQQDFDSKAGAILGMGVRVIPMSQDILGEFGKGNSVSQTAERTGYRSVRRLRERFLLRRERLHRVLNVLNFLPQHYAAQIDFNKRLGKFLEETEPKLPYNNERFVFKSSFNEMLEDFRKHQPQILKNDKGEEKLVPYDWTIYYLRKKALRERIEKEELAWILLNFNQKRGYYQLRGEEEEEQLNKLVEFYSLKIVDVLADEPQKGKPDIWHSLVLENGWIYRRSSKTPLFDWKDKTRDFIVTTDLNDDGSVKKDKEGNEKRSFRAPAETDWTLIKKKTEQEIDNSHKTVGAYIYDTLLQNPRQKIKGKLVRTIERKFYKQELKQILDRQRGFHPELQNEDLYNDCVRELYRNNEAHQLMLSKKDFVHLFIDDIIFYQRPLRSQKSSISNCTLEFRKYKDEKGAEHVQYLKAVPKSNPYYQEFRIWQWLYNLNIYKKDDDTNVTSDFIHSIEDIETLFDFLNTRKEIEQKPLFKFLLEQEGYKGKLLNAEVEKYRWNYVEDKKYPCNETRTMIATRLEKIENVSNDFLTREIEQKIWHIIYSVNDKTEYEKALKSFARKNDLDENAFLQAFKKFPPFRSEYGSFSEKAIKKLLPLMRIGRHWNYDNIEGKSKERIDKIITGEYDENIKDKVREKAMHLVEETDFQGLQLWLAQYIVYGRHSEATALGKWNAADDLEQFLQDFKQHSLRNPIVEQVITETLRVVKDIWIKYGSGEKDFFSEIHIELGREMKNTAEDRKKITNMVSENENTNLRIKALLAEMMSDVAVENVRPFSPMQQEILKVYEDGVLNSDIEIEDDILKISKTAQPSSSDLRRYKLWLEQKYRSPYTGEIIPLNRLFTPEYEIEHIIPQSRYFDDSFNNKVICETAVNKLKDNYIGLGFIKKFGGTIVECGMGKSVKVFKQEAYEDFVKQHYAKNRGKRSKLMLEEIPEKMIERQMNDTRHISKYISGVLSNIVRVEDGSDEGINSKYIVPGNGKITAQLKQDWGLNDVWNDLILPRFERLNQLTNAAHFTAWNENHQKFLPTVPIELSKGFSKKRIDHRHHALDALVIACATRDHVNLLNNQSAKSDTKRYDLKRKLMQFEREVYNHPHTGERIERDIAKQFLKPWNSFTVDAKSNLEKIVVSFKQNLRVINKATNYYEKWVEKDGMKSKEKVEQTGTNWAIRKAMHKDTVSGKVDLPWYKVPKGKILTATRKSVDVSFDIKTIGSITDTGIQKILKNYLTSKDNNPEMAFSPEGLEDMNKNIEKYNGGKSHQPIVKVRVFELGSKFQIGQAGNKKHKYVEAAKGTNLFFAVYKDEKGKKSYVSVPFNEVVERQKQGLSAVELKGKEDFYLCPNDLVYIPSEDELDNVEGIDFESLSAEKNNSIYKVVSFTGNRLYCIPSNVSTVILNKIEFSQLNKIEFTKEKENCVKLKVDRLGNISKA

SEQ ID NO: 5537 - protein, 1440 aa, synthetic construct
  REGION 1..1440: note = Synthetic
MKTILGLDLGTNSIGWALVEQDFENKQGLILGMGSRIIPMDAGIIGKFAEGSSISQTAERTGYRSIRRLRERHLLRRERLHRVLNILKFLPEHYAAEIDFEKRFGQFLAETEPKLAWKKNAEGKFEFLFQRSFDEMVADFKANGQDIKIPYDWTIYYLRKKALTQKISPQELAWIILNFNQKRGYYQLRGEEEEENPNKKVEFYSLKIVDVVADEQPNKKGDTWYSLHLENGWVYRRSSKIPLYDWKDKVRDFIVTTDINEDGSEKLDKDGEVKRSFRAPKEDDWTLIKKKTEQEIEQFNQTVGSYIYEALLDNPTQKIRGKLVRTIERKFYKSELKKILEKQIELQPELFTEDLYNACARELYRRNVAHQQQLSSRDFVYLFLNDIIFYQRPLRSQKSLISNCSLEFRTIKDKDGNGQIIYLKAIPKSNPYYQEFRVWQWLYNLKIFTKEDDKDVTNQFINKVEDLEALFEFLMNQKEVNHTDILTYLIEPIVKSKYPNAKGKAFKDELKKELKKYRWNYVYDADKDESKSYPMNETRYELRKRLDKVENVPADFMTRKIEQHLWHIIYSVTDKIEFEKALKSFANKYDLHQESFVENFKRFKPFDSDYGTYSEKAIKKLLPLMRVGKYWSWDIIDDKTKTRIGKIITGEYDETIKNRVREKAIDLTEENHFQGLQLWLAQYIVYDRHSEADIAGKWNSVADLEQYLSEFKQHSLRNPIVEQVITETLRVVRDIWKQYGKGAKDYFDEIHIELGREMKNTAEERKRLSSIISENETTNLRIRAILEELMYDENMENVRPYSPMQQEALKIYEDGVLSSSVEIPEDIEKISKKSEPTKSEIQRYKLWLEQKYRSPYTGRPIPLSKLFTPAYQIEHIIPQARFFDDGFSNKVICESEVNALKDKMLGLEFIQNYYGQKVTTSFGEVTILTEDAYKAFVKEHYDKNRSKRNKLLLEEIPEKMIDRQMNDTRYISKYISKVLSNLVRGEKDDEGVNSKNIIPGNGKITGILKQDWGLNDVWNDLILPRFERMNQLTNSTDFTAWNEKHQKFLPSVPLELSKGFQKKRIDHRHHALDALIIACATRDHVNLLNNKHAKSRNERYDLQHKLRHTTPWQDKEGKVRTKFTEFKKPWETFTQDTKKELEKIVVNFKQNLRVINKATNYYEKIVDGKKVMFKQEGVNWAIRKPMHKETVSGKIDLPRVKVSKGKILTATRKSLDTSFNAKTILSITDTGIQKILLNYLKAKGNPELAFSPEGIEEMNQNISLYNDGKPHQPILKVRVFEQGSKFPLGETGNKTTKYVEAAKGTNLFFGVYEDNQGKRSYDTIPLNIVIERQKQGLNSVPETNEKGHRLLFSLSPNDLVYVPIEGEVFDETNPDVNRIYKVVSFSGSQMFCVRQDVATSIVYKLEFSSLNKMERTIDGIMIKEICIKLKVDRLGNISKA

SEQ ID NO: 5538 - protein, 1440 aa, synthetic construct
  REGION 1..1440: note = Synthetic
MKNILGLDLGTNSIGWALVKQDFENKQGEILGMGARIIPMSQDILGDFGKGNSVSQTAERTKYRSVRRLRERFLLRRERLHRVLNILNFLPEHYASQIDFEKRFGKFKVETEPKLAWKNIEGQFSFLFQNSFNEMLEDFKANGQDLRIPYDWTIYYLRKKALYQKIEKEELAWILLNFNQKRGYYQLRGEEEEENPNKLVEFYSLKVVDVLADEPQKSKSDIWYSLVLENGWIYRRASKILLFDWKDKTRDFIVTTDLNDDGSVKTDKEGNEKRSFRAPGENDWTLVKKKTEQEIEQSHKTVGMYIYETLLANPKQKIKGKLVRTIERKFYKEELRQILEKQKEFHQELQNDDLYNDCIRELYRNNEAHQLTLSKKDFIHLFIKDIVFYQRPLRSQKSSISNCTLEFRKYKDENGAEHTQYLKAIPKSNPYYQEFRLWQWIFNLNLYKKDNDENVIKEFLTTTQDVENLFEFLNNRKEVDQKTLLKHFKLNEKTHRWNFVEDKKYPCNETKTMISTRLQKVENISGDFLTREIEQKIWHIIYSVNDKIEYEKALKSFALKHQLDKSSFFEAFRKFPPFKREYGSFSEKAIKKLLPLMRLGKYWDYANIDKFSKDRIQKIINGEYDENIKDRVREKAVHLRSEDDFQGLQLWLAQYIVYGRHSEASITGKWNSADDLEEFLKDFKHHLLRNPIVEQVITETLRVVKDIWLKYGKGAKDFFNEIHIELGREMKLPADDRKKLTNQITENENTNLRIKALLTEMMNDHAVENVRPFSPQQQEILKIYEDGVLNSGIEIEDEYLKISKTAQPSPSDLKRYKLWLEQKYKSPYTGQIIPLNKLFTPEYEIEHIIPQSRYFDDSFSNKIICESAVNKLKDNYIGLGFIKQFGGTIIELGFGKSVKVFDIDEYEDFVKKHYANNRSKRNKLLLEDIPEKMIERQINDTRYISKYISGILSNIVRLEDGSDEGVNSKNIVPGNGKITTQLKKDWGLNDVWNDLILPRFKRMNQLTNSTDFTAWNENFQKFLPTVPIEYSKGFSKKRIDHRHHALDALVIACATKDHVNLLNNQSAKSETKRYDLKKKLMKFERVVYLHVQTGEKIEREVPKQFLKPWENFTVDVKHNLDTVIVSFKQNLRVINKATNYYEKYVEKDGARNKTRVEQKGINWAIRKPMHKDTVSGKVDLPWVKVPKGKILTATRKSLDASFDLKSIASITDTGIQKILKNYLMLKDGNPELAFSPEGIEDLNKSIEKYNDGKPHQPINKVRVFELGSKFQIGQAGNKKDKYVEAAKGTNLFFALYEDENGKRSYETIPLNEVIERQKHGLPVVDLTSTNDFYLCPNDLVYILSDDERDNMTNNDFESLSDEQVKRIYKFVSCTGGEGHFIPYASATEIIKNENGTNSKSERMQNFYDGSCMLDKNSKPIMIKENCVKLKVDRLGNISKI

SEQ ID NO: 5539 - protein, 1439 aa, synthetic construct
  REGION 1..1439: note = Synthetic
MTKTILGLDLGTNSIGWALVQQDFENKQGEILGMGSRIIPMSQDILGEFGRGNSISQTAERTGYRGVRRLRERHLLRRERLHRTLNILGFLPKHYANEIDFTKRFGKFINHAEPKLPYKNGDFLFKKSFLEMLEDFKSNQPEFLKDKNGNNCLVPYDWTIYYLRKKALSQKIEKEELAWLILNFNQKRGYYQLRGEDFAEEKDKLFVKLKVDKVVDSGEKIKGNILHDVYFDNGWKYDRQIVKTEDWVGKTKEFIVTESCLKNGDIKRTYKAVDSEKDWIAIKSKTEQDIDNSNKTVGTYIYENLLLNPKQKIKGKLVRTIERKFYKEELNQILRKQQEFHSELQNEELLQDCVRELYKHNEQHQQMLESKDFVHLFLNDIIFYQRPLRSQKSSISNCTLEKRISKEGVVFSIKVISKSNPYYQEFRLLQWLQNLEIYRNEDDTKVTTEFITSVEDKEALFDFLNSKKEVEQKHVIDFLLKQKSNKNKLPKGEAEKYRWNYVQDKKYPMNETRYLIQSKLDKVEDVPNDFLSFENEMALWHIIYSVNDKIEYEKALAKFALKHQLDEASFVESFKKFPPFKSDYGSFSEKAIKKLLPLMRFGNQWNYDAIDNISKERIYKIITGEYDEKIKNRVREKAEQFNLTTENNFQNLPLWLAQYVAYGRHSEAEITGKWNSVSDLENYLKEFKQHSLRNPIVEQVITETLRVVKDIWQEYGKGAQDFFSEIHIELGREMKNTADERKRLTNVVTENENTNLRIKALLAELALDATVENVRPYSPMQQDILKIYEEGVLNAEENIEEDILKISKTAQPSSSDLKRYKLWLEQRYRSPYTGQMIPLNKLFSHEYEIEHIIPQSLFFDDSLSNKIICESAVNKLKDNRIGLAFIKAYHGEVVPLGNGKTVKILEVQDYEDFVKQNYSKNRTKRNKLLMEDIPEKMIERQLNDTRYISKYISHLLSNIVRDVTPDSKDDGINSINVLPGNGKITTRLKQDWGLNDVWNELILPRFERMNELTNSTDFTSTNTNGKVIPTVPIELSKGFSKKRIDHRHHAMDALVIACATRDHVNLLNNESAKSETKRYDLNRKLRVYEKVTYKDQKTGEQITREVPKDFLKPWTQFTIEAKNALENIVVSFKQNTRVINKATNYYESYKDENGNLRFDKNGKPKKDFVEQKGMNWAVRKPLHKETVSGQVHLDRVKVAKGKILSATRKSLDTTFNEKTIQSITDTGIQKILLNYLKAKGSPEVAFSPEGIEEMNKTISLYNEGKNHQPILKVRVFEQGSKFPLGETGNKTKKFVEAAKGTNLFFGIYEDKAGKRSYNTIPLNLVIERQKQGLSPVSEINDKGHRLLFHLSPNDLVVIPKDGDINSKDVYKVVSFTGGRLYVIPHFVSSVIVNKIEYTQLNKIELTKEKDLIKKIEFDRLGNLISKSSKLEELFYKRRM

SEQ ID NO: 5540 - protein, 1438 aa, synthetic construct
  REGION 1..1438: note = Synthetic
MKKNILGLDLGTNSIGWALINQDFDKKDGKILGMGSRIIPMDAADMGKFAEGGSVSKTAARTDYRGVRRLRERFLLRRERLHRVLNILNFLPEHYASQIDFEKRFGKFKEETEPKLVYDNGFIFKNSFEEMLSDFRIHQPQVLENDKKVPYDWTIYFLRNKALTQKIENEELAWILLNFNQKRGYYQLRGEDFEEEKDKTFVRLKVDKIVDSGDNVKGKILYDVYFENGWKYDKQIVKTEDWIERVKEFIVTESFLKNGDIKRTFKAVDSEKDWIAIKTKTEQEIDNSHKTVGTYIYETLLQNPKQKIKGKLVRTIERKFYKDELKQILEKQKEFHPELRNDDLYSDCVRELYRNNEAHQLTLSKKDFVHLLMEDIIFYQRPLRSQKSSISNCTLEFRKYKDENGVEHAQYLKAIPKSNPYYQEFRIWQWIYNLNIYRRDDEQNPVTKEFLNTTKDFENLFEFLNSRKDVDQKALLKHFKLNEKTYRWNFVEDKKYPCNETKTMISSRLDKVENISDDFLTREIEQKIWHIIYSVNDKVEYEKALKSFANKNNLDEVSFFEAFRKFPPFKSEYGSFSEKAIKKLLPLMRLGKYWNEDEILRYSEVYFKNIEYLLGVLKQKDKNISDDDRQNWNKTINNKLREELENFQNAEIESFQGLRLHIAQYILYGKHSEGDNKKFNSADDLEAFLKEFKQHSLRNPIVEQVITETLRVVKDIWLKYGNGAKDFFNEIHIELGREMKLPADDRKKLTNQISENENTNLRIKALLAEMMNDHSVENVRPFSPMQQEILKIYEDGVLNSGIEIEDEYLKISKTAQPSPSDLKRYKLWLEQKYKSPYTGQIIPLNKLFTPEYEIEHIIPQSRYFDDSFSNKIICESAVNKLKDNYIGLGFIKQFGGTIIELGFGKNVKVFEQHEYEDFVKKHYANNRGKRNKLLLEDIPEKMIERQINDTRHISKYISGVLSNIVRVEDGTDEGINSKNIVPGNGKITTQLKQDWGLNDVWNDLILPRFERMNQLTNSTDFTAWNENHQKYLPTVPIEFSKGFSKKRIDHRHHALDALVIACATKDHVNLLNNQSAKSDTRRYDLKKKLMKFEKVSYIHTQTGEKTERDVPKQFLKPWENFTVEAKNSLEKIIVSFKQNLRVINKATNYYEKYVEKDGVKIKERVEQTGTNWAIRKPMHKDTVSGKVDLPWIKVPKGKLVTATRKSIDTSFDLKSINSITDTGIQKILKNYLEFKGSPELAFSPEGIEDLNKNIEKYNDGKPHQPINKVRVFELGSKFQVGQTGNKKAKYVEAAKGTNLFFAVYEDKNGKRSYETIPLNEVIERQKQGLSVVDLKGVNDFYLCPNDFVYIPSGDEIENKSNIDFKNLPKENIEKIYKVVSFSGGQIFFIRQDIATSIVNKAEFSTLNKMERAMDGSMVKELCIKLNVDRLGNISKHSS

SEQ ID NO: 5541 - protein, 1438 aa, synthetic construct
  REGION 1..1438: note = Synthetic
IKTILGLDLGTNSIGWALIKQNFENKYGEILGMGSRIIPMSQDILGEFGKGNSVSQTAARTDYRATRRLRERFLLRRERLHRVLNVLNFLPEHYASQIDFDKRFGKFKVETEPKLAWKNIDGKFSFLFQTSFNEMLEDFKAHGQDLKVPYDWTIYYLRKKALSQKIEKEELVWILLNFNQKRGYYQLRGEEEEENPNKLIEFYSLKIIDVLADEPQKGKSDIWYSLVLENGWIYRRSSKTSLLDWKDKIRDFIVTTDLNDDGSVKTDKEGNEKRSFRAPGENDWTLVKTKTEQEIDRSRKTVGNYIYETLLQNPKQKIKGKLVRTIERKFYKEELKRILEKQKEFHRELESNDLYNDCIRELYRNNEAHQLTLSKKDFVHLFMEDIIFYQRPLKSQKSSISNCTLEFRKYKDENGIEHTQFLKAIPKSNPYYQEFRIWQWIFNLNIYKKDNDDNVTKEFLNTTRDFENLFEFLNNRKEIEQKPLLKFLLEQKEFKGKLLNAETEKFRWNYVEDKKYPCNETRTMISERLKKVENISDDFLTREMEQKIWHIIYSVNDKTEYEKALKSFAEKNNLDENSLFEAFKKLPPFKSEYGSFSEKAIKKLLPLMRLGKYWSYAKIDLYSKNRIQKIITGEFDENIKDRVREKAIRLTAENDFQGLQLWLAQYIVYGRHSEASMIGKWNSADDLEEFLKEFKQHSLRNPIVEQVITETLRIVKDIWLKYGNGAKDFFNEIHIELGREMKQTKDERANATKTITENENTNLRIKALLAEMMNDHSVENVRPYSPMQQEILKIYEDGILKSDIEIDDDILKISKTAQPSSSDLKRYKLWLEQKYKSPYTGQIIPLNKLFTPEYEIEHIIPQSRYFDDSFSNKIICESAVNKLKDNYIGLGFIKQFGGTIIECGFGKRVKVFEVGEYEEFVKKHYANNRGKRNKLLLEEIPEKMIERQMNDTRHISKYISGILSHIVRVEDGTDEGVNSKNVIPGNGKITTQLRQDWGLNDVWNELILPRFERMNQLTNSTDFTSWNENHQKYLPTVPVEFSKGFSKKRIDHRHHALDALVIACATKDHVNLLNNQSAKSATKRYDLKKKLMKFEKTVYKDPQTEKRIEREVPKHFLKPWETFTVDAKNRLETIIVSFKQNLRVINKATNYYEKYVEKDGVMMKERVEQTGTNWAIRKPMHKETVSGKIDLPWVKVPKGKILTATRKSLDTSFDLKAIASITDTGIQKILKNYLEFKESPELAFSPEGIEDMNKNIEKYNGGRPHQPISKVRVFELGSKFQVGQTGNKKDKYVEAAKGTNLFFAIYEDKKGKRSYETIPLNEVIERQKQGLSVVDLKNVNDFFLCPNDLVYIPSGDEFENRGSIEIENITKEKSERFYKVVSFSGSQIFFVRHDIAVSIVNKGEFSTLNKMERAIDGSMVKEICIKLKIDRLGDVLKA

SEQ ID NO: 5542 - protein, 1437 aa, synthetic construct
  REGION 1..1437: note = Synthetic
MKYIKYILGLDIGSNSIGWALIQLDLLQKTKRIIAAGSRVIPMDQKVLSDFGKGITISPTAQRTSYRNARHCRERHLLRRERLHRVLHILGFLPTHYDKQIDFSKRYGKFVDNTEPKIAYNEGKFLFMDSFQEMLVDFKIHQPDLFYTKRNGEESKIPYDWTIYYLRKKALSRKISKEELAWIILNFNQKRGYYQLREEEENKENDFEIISSKIISVIKKDKDKKYNKYWYDIILENGLVYQAAFYNDFVYNWINQDREFIIERTSLKNGTEKVKLSYLPTFDEIDKMDKKEQDKYYKKIKIKTENSIGNKTVGCYIYDHILQNPNEKIKGKLVRTIERKYYKEELKAILEKQIALQPELFTDQLFADCIRELYSKNEAQQRNLAARDFVHLFVEDIIFYQRPLRSQKSTIANCSLESRSYIDKDSHTRKEVSLKVCPKSNPYYQEFRVLQWLQNLKIYEIESDREVTHEFIKTLEDKQQLFDFLMAQKEIDCEELLKYFLSLTYPNAKEKALKSELKKWKDTYRWNYVYDIGEKSSKKYPMNETRYELKRHLEKVANLPDNFLSSEVEYLLWHLIYSVTDKVAYEKGLKKFAQKHHLDKDSFVESFKKFKPYPSEYGSFSEKAIRKLLPLMRFGSYWDFNHIDKNTQKRIEDLITGVENEEIRTILREKAEKYQLEKETDFQNLPLWLAQYIAYNRHAEASSLEKWTSVNDLETYLNEFKQHSLRNPIVEQVVTETLRVVRDIWQQYGQGKADFFDEIHIELGRELKKTAKEREKLSKQNQKNEDTNLSIKEKLKELEKYNTRAYSITHQEKYKLWLEQKHISPYTGQIISLENLFTDNYEIEHIIPQSRFFDDSLSNKVVCESIVNKAPYKDRQLGLEFIKNQGGRIVKELSKENKTIKIFTEEQYRTFIKEHYSNNPAKTKKLLLEEIPEKMVARQMNDTRYISKFIPEILSKIVRSDEQDEGVHSKNVILCTGKITSILRQDWGLNDVWDNLILPRFERMNNLLQKEKFTIYSIEKQKKIPVVPINDQFKSFQKKRIDHRHHAMDAIIIACATREHINYINNQHALEKGKNKEEKQKSRIDLRTILCEKKYNDNAKENYNWIFKKPWDTFTQEVRSALEGIVISFKQNLRVINKATNYYEHWVEENGKLFKKMVKQEGTNWAIRKPLHEETISGKIYLDREKINKNDILTATRKTVDSSFDEKRIKKITDTGIQKILLNYLKYKGSPEIAFSPEGLEELNKNISLYNDGKPHKPIRKVRIFEQGSKFPLGEVGNKATKYVEAAKGTNLYFGVYQGKDKRSFATIPLNEVIERQKQGLPSIPEYNEKGDPLLFSLSPNDLVYIPIEGEIIEDIDFRNLSNEQKGRIYKAASFTRNECFFIKSSIASLIKNYDAKTKIGELGSQNKLEVTICKGIRIKEVCIKLKVDRLGNISKA

SEQ ID NO: 5543 - protein, 1437 aa, synthetic construct
  REGION 1..1437: note = Synthetic
MKRIFGLDIGTNSIGWSLIKQDFPNKIGEIIASGTRIIPMSQDILGEFDKGNSISQTAERTRLRSSRRLRERFLLRRERLHRVLNVMGFLPAHYAAAIDFEKRLGKFKNGEPKLPYDKDGFIFKKSFSEMLADFQISQPELLKNEKGEQKLIPYDWTIYYLRKKALAERIEKEELAWILLNFNQKRGYYQLRGEEEEEHPNKLVEFHSLKILDVSTDEEQNKKGETWYTLTLENGWEYRRSNKVPLYDWKGKTRDFIVTTDLDNDGTIKKRSFRAPSEGDWTLLKKKTEKEIENSRNTVGAFIYDHLLKKPGQKIKGKLIHTIERRFYRQELKQILLKQQEFHAALKQEEVYNHCIRELYRSNEARQLVLKEKDILHLLMDDILFYQRPLKSQKSSIANCPLEYRTYKDKNGTVHQQYLKAIAKSNPYYQEFRIWQWQHNLSIYKKMDDTNVTADFITNIEDREELFRFLDNRKEIEQKHLLKFILEKKGFKGKALSAEIEKYRWNYVSDKIYPCNETGALIKNRLEKVDALPTGFPTKEHEYQLWHIIYSVTDKVEYEKALKTFAEKYGIDQVTFVSSFKKFPPFKSDYGSFSEKAIKKLLPLMRVGKYWNWEAIDESSKSRIEKIITGEYDENIKDRVRKHAIHLVHENSFQGLQVWLAQYIIYGYHSEATSTDKWRSPQDIASFLKDFRQHSLRNPIVEQVVMETMRVVKDVWQQYGNGASDFFDEIHIELGREMKNPADERKKITNQVLENENTNLRIKALLGELLNDPDIENVRPYSPMQQEILKIYEEGVLNSDIEINEEIIKISKIAQPSSAELKKYKLWLEQKYRSPYTGAIIPLNKLFTPAYEIEHIIPQSRYFDDSFSNKVICEAAVNKLKDNQVGLEFIKSHHGEIVQTGLGKTVRIFEVKEYEDFVNQHYAKNRSKRNKLLMEDIPEKMIERQLNDTRYISKFISGLLSNIVRSATDDDGVNSKNLIQTNGRITGILKQDWGLNDVWNDLILPRFERMNAQSNSSNYTAWNETYQKFLPTVPLNESKNFSRKRLDHRHHALDALIICCTTRDHINLLNNLYAKSPVRYDLNRKLRRYEQVSYIHPETGEKIEREIPKEFHKPWQNFTVGVKNALESIIVSFKQNLRIINKATNHYESWVVKDGVKVKALQKQNGQNWAIRKPLHKDTVSGLVNLPRIKVPKGKIITATRKDIDTSFDLKTIEAITDTGIQKILKNYLAARENNPEMAFTPEGLEELNKHIRDYNDGKFHQPIYKARVFELGSKFQLGQSGNKSRKFVEAEKGTNLFFAVYQGEKGKRSFESIPLNIVIERQKQGLSSVPERDIKGQPLLFHLSPNDLVYLPTEDELQQNSNISFRDKHPKYVGRIYKVVSFSGNQVFFIKHEVATSIVNKVEFTSSNKMERSIDGLMIKESCIKLTVGRLGNINI

SEQ ID NO: 5544 - protein, 1437 aa, synthetic construct
  REGION 1..1437: note = Synthetic
MKTIMVKNILGLDLGTNSIGWALIKQDFENKQGEILGMGSRIIPMSQDILGDFGKGNSVSQTAERTKYRSVRRLRERFLLRRERLHRVLNVLDFLPEHYASQIDFNKRFGKFKEETEPKLAYSNDGFIFKKSFEEMIPDFKTHQPQLLENNKKVPYDWTIYYLRNKALSHKIEKEELAWILLNFNQKRGYYQLRGEDFEEEKDKVFVRLKVDRVVDSGENVKGRILYDVYFENGWKYEKQIVKTEDWIGRTKEFIVTESILKNGDTKRTFKTVDSEKDWIAIKTKTEQEIDKSHKTVGAYIYETLLQNPKQKIKGKLVRTIERKFYKAELKKILEKQKEFHPELRQDDLYNDCVRELYKNNEAHQLTLSKKDFVHLFMEDIIFYQRPLRSQKSSISNCTLEFRKYKDENGTEHIQYLKALPKSNPYYQEFRIWQWMYNLNIYKKEDDTNVTKHFLNTKADFESLFEFLNNRKEVDQKALLKHFKLNDKTHRWKYVEDKKYPCNETKTMISERLKKVENISDDFLTREIEQKIWHIIYSVNDKVEYEKALKSFAGKNNLEKNSFFEAFKKFPPFKSEYGAFSEKAIKKLLPLMRLGKHWDYSNISEQSKSRIQKIITGEYDENIKDRVREKAVHLTKETDFQGLQLWLAQYIVYGRHSEAAMLGKWNSADDLEEFLKEFKQHSLRNPIVEQVITETLRVIKDIWVKYGNGAKDFFNEIHIELGREMKLPAEDRKKITSQISENENTNLRIKALLAEMMADSSVENVRPFSPMQQEILKIYEDGVLNSDIEIEDDILKISKTAQPSPSDLKRYKLWLEQKYKSPYTGQIIPLNKLFTPEYEIEHIIPQSRYFDDSFSNKVICESAVNKLKDNFIGLGFIKQFGGTIVECGNGKSVTVLKEDQYEDFVKKHYANNRSKRNKLLLEDIPEKMIERQMNDTRYISKYISGVLSNIVRTEDGTDDGVNSKNIVPGSGKITNTLKQDWGLNDIWNDLILPRFERMNQLTNSTDFTVWNENHQKFLPTVPVEFSKGFSKKRIDHRHHALDALVIACATKDHVNLLNNQSAKSDTKRYDLKKKLMKFEKVVYKNPHTGEKIEREVPKQFLKPWETFTVDAKSRLETIIVSFKQNLRVINKATNYYEKYVEKEGKKVKERVEQTGTNWAIRKPLHEETVSGKINLPWVETSKGEFITATRKPLDISFNLEKIKKITDTAIQKILENYLETKDNNPELAFSPEGIEDLNKSIEKYNGGKLHQPIIKVRVYEKGKGRFSLGQTGNKVDKYVQGSPNLFFAVYKDENGKNSFESIRLDIVIERMKQMLNPVPDLNSNGEELFKVLSPLDLVYIPTEEELHNIETLDFNKIDKIKLERLYNVNDFSGVTIYFSQNSFAKNIYPKEMDMSWNEKRQKTSGSFDSKTASFNKKSIKEFFVKLKIDRLGNISKV

SEQ ID NO: 5545 - protein, 1434 aa, synthetic construct
  REGION 1..1434: note = Synthetic
MNNHMKTILGLDLGTNSIGWALIQQDFENKQGEILGMGSRIIPMSQDILGEFGKGNSVSQTAERTGYRGVRRLRERFLLRRERLHRILNVLGFLPEHYAAQIDFEKRFGKFKAETEPKLVYDRSRFIFENSFEEMLSDFKKYQPLLLENSKKIPYDWTIYYLRKKSLIQKIEKEELAWILLNFNQKRGYYQLRGEEEEENPNKLVEFYSLTIVNVLADEPQRGKSDIWYSLILENGWIYRRSSKIPLFNWKDKTRDFIVTTDLNDDGSVKTDKEGNEKRSFRAPSENDWTLVKKRTEQEIDKSHKTVGTYIYDTLIQNPKQKINGKLVRTIERKFYKAELKQILEKQKEFHSEFQNTDLYDDCIRELYRNNEAHQLTLSKKDFVHLFLDDIIFYQRPLRSQKSSVSNCTLEFRKYKDENEVEQIQYLKTIPKSNPYYQEFRIWQWIFNLNIYKKDDDTNVTQEFLSNTKDYEVLFSFLNNRKEVDQKALLKHFKLNEKTHRWNYVEDKKYPCNETRTMISTRLEKVENCPVDFMTREIEQSIWHMIYSVNDKTEYEKALKSFARKKNLDGTSFFESFKKFPPFKSEYGSFSEKAIKKLLPLMRLGKYWNWESIAGESQKRIEKIITGEFDENIKDKVREKALHLTQENHFQGLPLWLAQYVVYGHHSEASVLGKWNSADDLEEFLKGFKQHSLRNPIVEQVIIETLRVVKDIWVKYGNGTKDFFSEIHIELGREMKNTAEERKRLTNIVTENESTNLRIKALLAEMMNDSDVENVRPFSPMQQEILKIYEEGVLNSEIEIEDEYLKISKTAQPSSSDLKRYKLWLEQKYRSPYTGEIIPLNKLFTTEYEIEHIIPQSRYFDDSFNNKIICESAVNKLKDNYIGLGFIKQFHGVTVECGFGKTVRVFEVEAYEDFVKKHYAKNRSKRTKLLLEEIPEKMIERQLNDTRHISKYISGVLSNIVRVEDGTDESVNSKNIIPGNGKITTQLKQDWGLNDIWNELILPRFERMNQLTNSNNFTAWNESHQKFLPTVPIELSKGFSKKRIDHRHHAMDALIIACATKDHINLLNNQSAKSDIKRYDLKRKLMKFEKVIYNHPQTGKKTEKEVPKQFWKPWDNFTVDAKNKLEAIIISFKQNLRVINKATNYYEKWVEREGRKTKELIKQEGINWAVRKPMHKETVSGKVYLPWVKVPKGKILTATRRSLDTSFDVKTINSITDTGIQKILKNYLEFKGSSEVAFSPEGIEDLNKNIEKFNDGKPHQPINKVRVFELGSKFPVGQTGNKKAKYVEAAKGTNLFFAVYTDDRGKRSYETIPLNEVIERQKQGLAPVSFKNKEDFLLSPNDLVYIPSEDEFENMHNIDFKNLVKEKQKNIYKVVSFSGSQIFFIRQDVATSIANKLEFSTLNKMERAIDGSMIKENCIKLRIDRLGNISKHNK

SEQ ID NO: 5546 - protein, 1433 aa, synthetic construct
  REGION 1..1433: note = Synthetic
MKNILGLDLGTNSIGWALIKQNFDNKEGEILGMGSRIIPMSQDILGEFGRGNSISQTAERTGYRGVRRLRERHLLRRERLHRVLHLLNFLPKHYSNQIDFTKRFGQFISGTEPKLAYDKAFLFQNSFNEMLEDFKQNQPQFLINRKGEEALIPHDWTIYYLRKKALIQKIEKEELAWIILNFNQKRGYYQLRGEDFDEEKDKQFIQLKVDKVIDSGDKIKDKILYDVYFENGWKYDRQIVKTEDWIGRTKEFIVSESLLKTGDIKRTFKAVDSEKDWIAIKTKTEQEIDNSHKTVGTYIYENLLLDPKQKIKGKLVRTIERKFYKDELKQILNKQAEFHSEFKDENLLMDCVRELYKNNEQHQQMLYGKDLVHLIMEDILFYQRPLKSQKSTISNCPLESRIYKDKDGNEIIQPLKTTSKSNPYYQEFRLLQWLQNLVIYRNDDDANVTADFISSIEDKEVLFDFLNNRKEIEQKQLIEFLLKHKNEGKKLAKGETEKYRWNYVQDKKYPCNETRGLIKSRLDKVENAPSDFLNSENEMALWHIIYSVNDKIEYEKALHKFAEKHQLNVIEFVDSFKKFPPFKSDYGSFSEKAIKKLLPLMRFGKDWNYDAIQTTSKDRIDKIITGEYDEKIKDRVREKAQHLATETDFQNLPLWLAQYVVYGRHSEASVAGKWSSVKDLEDFLQEFKQHSLRNPIVEQVITETLRVVKDIWQQYGNGAKDFFDEIHIELGREMKNTADDRKSMTNQVTENENTNLRLKALLAEMATDNSVENVRSYSPSQLDILKIYEEGVLNAETEIDEEILKISKTAQPSSSDLKRYKLWLEQRYRSPYTGQMIPLNKLFTHEYEIEHIIPQSRYFDDSMSNKVICESAVNKLKDNQIGLAFIKNHHGEVVDCGHGRKVKILEVPDYEDFVKQNYSKNRGKRNKLMLEEIPEKMIERQLNDTRYISKYISQLLSNIVRDDKAGSNDDGVNSKNILPGNGKITTRLKQDWGLNDVWNDLVLPRFERMNTLTNSTDFTTWNENHQKFLPTVPIELSKGFSKKRIDHRHHAMDALVIACATRDHINLLNNESAKSDTKRFDLNRKLRKYEKIAYDDTKTGKRIEREVPKDFFKPWESFTVDAKNKLDGIVVSFKQNTRVINKATNYYESYKEENGNLRIGKDGKPVKGLISQQGTNWAIRKPLHKETVSGKVHLDRIKVAKGKILTATRKSLDSSFTEKSIESITDTGIQKILLNYLKAKENKPEIAFSPEGIEELNQNISQYNDGKNHQPILKVRVFEQGSKFALGETGNKTDKFVEAAKGTNLFFGVYADKDGKRSYETIPLNVVVERQKQGLTSVPETNEKGHNLLFTLSPNDLVCIPNENDDINNKQVYKVVSFSTYQLFFIRQDISVSIVNKVEFSALNKMERSIEGIMIKDICIKLKVDRLGNISKM

SEQ ID NO: 5547 - protein, 1432 aa, synthetic construct
  REGION 1..1432: note = Synthetic
MSKNILGLDLGTNSIGWALVKQDFKNKEGEILGMGSRIIPMSQDIIGDFGKGNSISQTADRTAYRGVRRLRERHLLRRERLHRVLHILNFLPKHYDQQIDFIQRLGKFKRDFEPKIAYFENEFLFKESFNEMLEDFKVHQPGFLLNKKGENSLVPYDWTIYYLRKKALTQKIEKEELSWIILNFNQKRGYYQLRGEEEEESPNKLVEFHSLRIVDVVADEQKNNKGEFWYSLQLENGWVYRRSSKIPLDDWKNKVRDFIVSTDLNDDGTEKIGKDGNVKRSFRAPSPDDWTLMKKKTEQEIKESDKTVGTFIYDHLLAHPKQKIKGQLVRTIERKFYKEELHKILSKQAEFHNEFKDSSVLNDCACELYRSNHLHQKMIASKDLLYLFINDIIFYQRPLRSQKSNIGTCSLEFRVSKDEKGQEIVRPLKVIAKSNPYYQEFRLRQWIQNLSIYRKNDDVNVTRDFWDSIEDLEKLFEFLNQRKEIEQKFLIKFLLENQDFKGKALTAEIEKYRWNYVQDKKYPCNETRHMIQSRLDKVRSTSDGFLTFEKEMALWHLIYSVTDKIEYEKALKTFSKKNGLEMETFVDAFKKIPPFNSDYGSYSEKAIKNLLPLLRFGKTWSWESINTDAQSRIDKIITGEFDENIKTQIREKAEKYKLNKEKDFQNLPLWLAQYIMYGRHSEAALAGKWTSVKDLEDFIKDFKQHSLRNPIVEQIITETLRVVQDIWKKYGKGAANFFDEIHVELGRDMKNTADERKSITNIVTDNENTNLRIKLLLAEMSSDIAVDNVRAYSPMQAEILKIYEDGILKSDIEIEEDILKISKTAQPSSSELRRYKLWLEQKYKSPYTGQIIPLNKLFTSEYEIEHIIPQSRYFDDSFSNKIICESAVNKLKDNQIGLEFIKNFHGYKMPNGTKIFEIDEYENFVKLHYNKNRSKRNKLLMDDIPEKMIERQLNDTRYISKYISNLLSNIVRSDVNDDGYNSKNILPGNGKITNRLKQDWGLNDVWNDLVLPRFERMNQITNSSDFTSYNENHQKFLPTVPLELSKGFSKKRIDHRHHAMDALVIACATRDHINLLNNESAKSDSKRYDLNRKLRKFEKVAYNDSRIGERIEREVAKDFLKPWGTFTNDAKKELGNIVISFKQNLRVINKATNYYEKWVDKNGELTKENVKQEGVNWAIRKPLHKETVSGKIKLDRIKVAKGKILTATRKMLDTSFNEKVIATITDTGIQKILLNYLRHKEGNSEIAFSPEGVEEMNLNISHFNDGKDHQPILKVRVFEQGSKFILGETGNKTDKYVEAAKGTNLFFAVYADNNGKRNFQTIPLNLVVERQKQGLNSVPEENDKGEKLLFTLSPNDLVCLSEIESFKEQDLYKVVSFSGSQLFFIKHNMAVSIVNKIEFSALNKMERSVDGIMIKDICVKLEVDRLGNISKA

SEQ ID NO: 5548 - protein, 1431 aa, synthetic construct
  REGION 1..1431: note = Synthetic
MKTIMVKNILGLDLGTNSIGWALIKQDFENNQGDILGMGSRIIPMSQDVLGDFGKGNSISQTAERTKYRSVRRLRERFLLRRERLHRVLNVLDFLPEHYASQIDFNKRFGKFKEETEPKLVYNNDGFIFKKSFEEMILDFKTHQPQLLENNKKVPYDWTIYYLRKKALSHKIEKEELAWILLNFNQKRGYYQLRGEEEEENPNKLIEFYSLKIVDVLADEPQKGKSDIWYSLVLENDWIYRRSSKISLLDWKNKTRDFIVTTDLNDDGSIKKDKHGNEKRSFRAPDENDWTLVKKKTEQEIDSSHKTVGTYIYETLLQNPKQKIKGKLVRTIERKFYKVELKQILEKQKEFHPELRQDDLYSDCVRELYKNNEAHQLTLSKKDFVHLFMEDIIFYQRPLRSQKSSISNCTLEFRKYKDENGTEHTQYLKAIPKSNPYYQEFRIWQWMYNLNIYKKDDDTNVTKEFLNSKAEFESLFEFLNNRKEVDQKALLKHFKINDKTHRWKYVEDKKYPCNETKTMISERLKKVENISDDFLTREMEQKIWHIIYSVNDKVEYEKALKSFAEKNNLDESSFFEVFKKFPPFKSEYGAFSEKAIKKLLPLMRLGKYWDYADIDKCSKDRIQKIITGEYDENIKDRVREKAVHLTKETDFQGLQLWLAQYIVYGRHSEAAMLGKWNSADDLEEFLKEFKQHSLRNPIVEQVITETLRVVKDIWVKYGNGAKDFFNEIHIELGREMKLPAEDRKKITSQISENENTNLRIKALLAEMMADSSVENVRPFSPMQQEILKIYEDGVLNSDIEIEDDILKISKTAQPSPSDLKRYKLWLEQKYKSPYTGQIIPLNKLFTPEYEIEHIIPQSRYFDDSYSNKVICESAVNKLKDNYIGLGFIKQFGGTIVECGNGKSVTVLKEDQYEDFVKKHYANNRSKRNKLLLEDIPEKMIDRQMNDTRYISKYISGVLSNIVRVEDGSDEGINSKNIVPGNGKITTKLKHDWGLNDVWNDLILPRFERMNQLTDSTDFTAWNENHQKFLPTVPVEFSKGFSKKRIDHRHHALDALVIACATKDHVNLLNNQSAKSDMKRYDLKKKLMKFEKVAYNHPQTGERIEREVPKQFLKPWETFTINVKNSLETIIVSFKQNLRVINKATNYYEKYVEADSIKKKEKVEQTGTNWAIRKPMHKETVSGKIDLPRIKVPKGKILTATRKSLDTSFNLKTIESITDTGIQKILKKYLEYKDNNPELAFSPEGIEDMNKNIEKFNDGKAHQPITKVRIFELGSKFALGQSGNKKDKYVEAAKGTNLFFAVYEDKNGKRSYETITLNEVIERQKQGLSVVDLKDVNDFYLSPNDLVYIPSEDELENISMIDYNKLSNERVYKVVSFTGNQIFFVRHNVAISIVNKAEFSTLNKMERAIGGTMIKETCVKIKTDRLGNISKV

SEQ ID NO: 5549 - protein, 1429 aa, synthetic construct
  REGION 1..1429: note = Synthetic
MIKNILGLDLGTNSIGWALVRQDFENKLGEILGMGSRIIPMSQDILGEFGKGNSVSQTAERTGYRSVRRLRERFLLRRERLHRVLNVLGFLPEHYALQIDFENRFGKFRAETEPKLVYDDEGFIFKNSFEEMLSDFKKHQPRLLENNRKIPYDWTIYYLRKKALTQKIEKEELVWILLNFNQKRGYYQLRGEEEEENPNKLVEFYSLKIIDVLADEPQRGKPDIWYSLILENGWIYRRSSKIPLFDWKDKIKDFIVTIDLSDDGSIKKDREGNEKRSFRAPSENDWTLVKKKTEQEIDQSHKTVGTYIYETLLQNPKQKIKGKLVRTIERKFYRTELKQILEKQKEFHPELQNDDLYNDCVRELYRNNETHQLTLSKKDFVHLFLNDIIFYQRPLKSQKSSISNCTLEFRKYKDENKVDQTQYLKTIPKSNPYYQEFRIWQWVFNLNIYKKDDDTNVTKEFLRNIQDYETLFGFLNNRKEVDQKALLKHFKLNEKTHRWNYVEDKKYPCNETKTMILTRLEKVENCLVNFLTREMEQSIWHIIYSVNDKTEYEKALKSFARRNNLDESSFFEAFRKFPPFKSEYGSFSEKAIKKLLPIMRLGKYWNWENIDEKSQERIGKIITGEFDENIKDKVREKVLHLTNEKHFQGLPLWLTQYIVYGRHSEASVLGKWNSADDLEEFLKEFKQHSLRNPIVEQVITETLRVVKDIWLKYGNGAKDFFNEIHIELGREMKLPAEEREKLTRQISENENTSLRIKALLAEMMNDNEVENVRPFSPMQQEILKIYEEGVLNSDIEIEDEYLKISKTAQPSSSDLKRYKLWLEQKYRSPYTGEIIPLNKLFTPEYEIEHIIPQSRYFDDSFSNKIICESAVNKLKDNHIGLGFIKQFHGTTVECGLGRNVRIFEVEAYEDFVKKHYAKNRSKRTKLLLEEIPEKMIERQLNDTRYISKYISGVLSNIVRIEDGTDEGVNSKNIVPGNGKITTQLKQDWGLSDVWNELILPRFERMNQLTNSSDFTVWSKNHQKFLPTVPVEFSKGFSKKRIDHRHHAMDALVIACATKDHINLLNNQSAKSDTKRYDLKRKLMKFEKVVYNHPQTDEKVEKDVPKQFLKPWNNFSVDAKNKLETIIVSFKQNLRVINKATNNYEKWIEKNGVKTKELVKQKGINWAIRKPMHKETVSGKVDLSWVKVPKGKILTATRKSVDSSFDLKTIASITDTGIQKILKNYLEFKGSPELAFSPEGIEDMNRNIEKFNEGKPHQPINKVRIFELGSKFPVGQTGNKKNKYVEAAKGTNLFFAVYENKNGKRSYETIPLNEVIERQKQGLDSVLFKSKEDFLLCPNDLVYIPSGDEVENVYNIDFENFTKQKMANIYKVVSFSGSQIFFIQQNVSVSIVNKTEFSTLNKMERSIDGLMIKDNCVKLKIDRLGNILKT

SEQ ID NO: 5550 - protein, 1429 aa, synthetic construct
  REGION 1..1429: note = Synthetic
MTKNILGLDLGTNSIGWALIQQDFQNKQGEILGMGSRIIPMSQDVLGDFGKGNSVSQTASRTGYRGVRRLRERFLLRRERLHRVLNILNFLPEYYASQIDFEKRFGKFREETEPKLAYSKEGFIFKNSFEEMLTDFKNHQPQILQNDKKVPYDWTIYYLRKKALSQKIEKEELAWILLNFNQKRGYYQLRGEDFEEEKDKMFVRLKVDRIVDSGENVKGKILYDVYFDNGWKYDKQIVKTEDWIERVKEFIVTESFLKNGDIKRTFKAVDSEKDWIAIKTKIEQEIDNSDKTVGTYIYETLLQNPKQKIKGKLVRTIERKFYKEELKQILETQKEFHPELNNESLYNDCVRELYRNNEAHQLTLSKKDFVHLFMDDIIFYQRPLRSQKSSISNCSLEFRKYKDENGVEHTQYLKAIPKSNPYYQEFRIWQWIYNLNIYKKEDDANVTKEFLNTTKDYENLFEFLNNRKEVDQKALLKHFKLNDKTHRWNFVEDKKYPCNETKTMIYERLKKVENISNDFLTREIEQKIWHIIYSVNDKIEYEKALKSFARKNHLDENSFFEAFKKFPPFKNEYGSFSEKAIKKLLPLMRLGKYWNYADIDKYSRERIQKIITGEYDENIKDKVREKAVHLTTENDFQGLQLWLAQYIVYGRHSEASMIGKWNSADDLEEFLKEFKQHSLRNPIVEQVITETLRVVKDIWMKYGNGAKDFFDEIHIELGREMKLPAEERDRLTRQISENENTNLRIKALLAEMMNDGAVENVRPYSPMQQEILKIYEDGVLNSGIEIEDEYLKISKTAQPSSSDLKRYKLWLEQKYKSPYTGQIIPLNKLFTPEYEIEHIIPQSRYFDDSFSNKIICESAVNKLKDNYIGFGFIKQFGGTIVECGFGKSVKVFESEEYEDFIKKHYANNRSKRNKLLLEDIPEKMIERQMNDTRHISKYISGILSNIVRVEDGTDEGVNSKNIVPGNGKITTQLKQDWGLNDVWNDLILPRFERMNQLTNSNDFTAWNENHQKFLPTVPIEYSKGFSKKRIDHRHHAMDALVIACATKDHVNLLNNQSAKSDTKRYDLKKKLMKFEKVVYNHPQTGDRIEREVPKQFFKPWDNFTVGAKNSLEKIIVSFKQNLRVINKATNHYEKYVEKDGVKTKERVEQTGTNWAIRKPMHKETVSGKVDLPWVKVPKGKILTATRKSLDTSFDLKTINSITDTGIQKILKNYLEFKGSPELAFSPEGIEDMNKNIEKYNDGKPHQPINKVRIFELGSKFPLGQSGNKKDKYVEAAKGTNLFFAVYEGKNEKRSYETIPLNIVVERQKQGLLACPETNEKGERLLFYLSPNDLVYLATEEENDIAPSINFNNINKEQINNLYKIVSFTGNRLYAIPLSVATTIVNKVEYTQLNKIEFTKEKEFLLKLNVNRLGDVKTFTANDIRKIFIG

SEQ ID NO: 5551 - protein, 1428 aa, synthetic construct
  REGION 1..1428: note = Synthetic
MTKNILGLDLGTNSIGWALIKQDFENKYGEILGIGSRIIPMSQDILGDFGKGNSVSQTAERTKYRSVRRLRERFLLRRERLHRVLNILNFLPEHYSSQIDFEKRFGKFKEETEPKLAWKNIGRQFSFLFQVSFNDMLEEFKANGQDLKIPYDWTIYYLRKKALSQKIEKEELAWILLNFNQKRGYYQLRGEDFEEEKDKTFVLLKVERVVDSGENIKGKILYDVYFDNGWKYDKQIVKTEDWIDRTKEFIVSESILKSGEVKRTFKAVDSEKDWIAIKTKTEQEIDQSRKTVGIYIYEALLQNPKQKIKGKLVRTIERKFYKDELKQILEKQREFHQELQNDDLYNDCIRELYRNNEAHQLTLSKKDFVHLLMDDLIFYQRPLRSQKSSISNCTLEFRKYKDENGMEHTQYLKAIPKSNPYYQEFRLWQWICNLNIYRKDDEANVTKDFLSTAQDFENLFEFLNNRKEIEQKPLIKFLFEQKDINKKLFNAEAEKYRWNYVEDKKYPCNETKTMISSRLDKVDNISDDFLTRDIVQKIWHIIYSVNDKIEYEKALKSFAKKHHLDESSFSEAFRKFPPFKSEYGSFSEKAIKKLLPLMRLGKYWNYADIDTFSKDRIQKIINGEYDENIKDKVREKAVHLTSENDFQGLQLWLAQYIIYGRHSEASIIGKWNSTNDLEVFLKDFKQHSLRNPIVEQVITETLRVVKDIWLKYGNGAKDFFNEIHIELGREMKLPADDRKKLTNQISENENTNLRIKALLAEMMNDHSVENVRPFSPMQQEILKIYEDGVLNSGIEIEDEYLKISKTAQPSSADLKRYKLWLEQKYKSPYTGQIIPLNKLFTPEYEIEHIIPQSRYFDDSFSNKVICESAVNKLKDNYIGLEFIKKLGGTVVECGNGKSVTVLKEDQYEDFVKKHYANNRSKRNKLLLEDIPEKMIERQLNDTRYISRYISGILSNIVRVEDGSDEGVNSKNIVPGNGKITTQLKQDWGLNDVWNDLILPRFERMNQLTNSKNFTAWNENHQKFLPTIPIEFSKGFSKKRIDHRHHALDALVIACATKDHVNLLNNQSAKSDTRRYDLKKKLMKFEKVVYHNTQTGQKIEREIPKQFLKPWENFTVETKNSLEEIIISFKQNLRVINKATNYYEKYVEKGGLKNKERVEQTGTNWAIRKSMHKDTVSGKIDLPWVKVPKGKILTATRKSLDTSFDLKSIGSITDTGIQKILRNYLEFKGSPELAFSPEGIEDLNKNIEKYNDGKSHQPINKVRVFELGSKFQVGQTGNKKDKYVEAAKGTNLFFAVYENENGNRSYETIPLNEVIERQKQGLSVVDLKGTIDFFLCPNDLVYIPSEDELENSSNIDFKNFKKDQNKKIYKVVSFSGSQLFFIRQEIAISIVNKTEFSTLNKMERSIDGLMIKENCIKLKVDRLGNISKA

SEQ ID NO: 5552 - protein, 1418 aa, synthetic construct
  REGION 1..1418: note = Synthetic
MAKNILGLDLGTNSIGWALISQDFNKKEGNILGMGSRIIPMSQDILGEFGKGNSVSQTAARTGYRGVRRLRERFLLRRERLHRVLNQLQFLPTHYASQIDFEKRFGKFKEETEPKLVYDANEFIFKNSFEEMLSDFQKHQPQLLDNDKKVPYDWTIYYLRNKALTQKIEKEELAWILLNFNQKRGYYQLRGEDFEEEKDKTFVRLKVEKIVDSGDNVKGKILYDVYFDNGWKYDKQIVKTEDWIERVKEFIVTESFLKNGDIKRTFKAVDSERDWIAIKTKTEQEIDKSQKTVGTYIYNALLQNPKQKINGKLVRTIERKFYKEELKKILETQQSFHPELRNDDLYNDCVRELYRNNEAHQLTLSKKDFVHLFMDDIIFYQRPLRSQKSSISNCTLEFRKYKDESGVEHTQYLKAIPKSNPYYQEFRVWQWMYNLNIYKKDDDTNVTKEFLNTTKDFENLFEFLNNRKEVDQKLLLKHFKLNDKTHRWNYVEDKKYPCNETKTMISSRLDKVENISDDFFTREIEQKIWHIIYSVNDKIEYEKALKSFANKNYLDEVSFFEAFKKFPPFKSEYGSFSEKAIKKLLPLMRLGKSWSYADIDKFSRDRIQKIINGEYNENIKDKVREKAINLTTESHFQGLQLWLAQYIIYGRHSEASLIGKWNSADDLEEFLKEFKQHSLRNPIVEQVITETLRVVKDIWVKYGNGAKDFFDEIHIELGREMKLPAADREQLTRQISENENTNLRIKALLAEMMNDHSVENVRPYSPMQQEILKIYEDGILKSDIEIEDDILKISKTAQPSPSDLKRYKLWLEQKYKSPYTGKIIPLNKLFTPEYEIEHIIPQSRYFDDSFSNKIICESAVNKLKDNYIGLGFIKQFGGTVIELGFGKNVKVFEVDEYEDFVKKHYANNRGKRIKLLLEEIPEKMIERQLNDTRHISKYISGVLSNIVRVEDGSDEGVNSKNIVPGNGKITTQLKQDWGLNDVWNELILPRFERMNQLTNSTDFTTWNENHQKFLPTVPIELSKGFSKKRIDHRHHAMDALIIACATKDHVNLLNNQSAKSDTKRYDLKKKLMKFEKVVYNHTQTGERIEREIPKQFLKPWGDFTIDAKNSLETIIVSFKQNLRVINKATNYYEKWVEIDGVKTKERVEQKGINWAIRKPMHKETVSGKVDLQRIKVPKGKILTATRKSLDTSFDLKTINSITDTGIQKILKNYLELKGSPELAFSPEGIEDLNNNIEKYNDGKAHQPIHKVRIFELGSKFQVGQTGNKKDKYVEAAKGTNLFFAVYEDKNGKRSYETIPLNEVIERQKLGLPVVDLKGVNDLYLSPNDLVYIPLGDELENINNIDFENISNGRMRNIYKVVSFSGSQIFFVKQDVATSIVNKAEFSTLNKMERAIDGTMIKEICIKLKVDRLGNISKA

SEQ ID NO: 5553 - protein, 1416 aa, synthetic construct
  REGION 1..1416: note = Synthetic
MGSRIIPMSQDILGEFGKGNSVSQTSERTAYRSTRRLRERFLLRRERLHRVLNILDFLPTHYASQIDFKKRLGKFKENKEPKIAYDNKSFLFLDSFNEMLKDFEQEQPNMLINEKGEKKLIPYDWTLYYLRKKALREKISKEELSWIILNFNQKRGYYQLRGEDEEENPSKLVEFHSLTVVDVVPDEPIKGKLETWYSIILDNGWVYRRSSKTELYDWKDKIKEFIVTTDLNYDGTVKTDKEGNVKRSFRAPSETDWTLIKKKTEYEIEQSSKTIGEYIYNTLLKYPEQKIRGKLIRTIERKYYKEELKQILLKQTEFHNELKDDSLYYDCLRELYRNNESHQLFLEKKNFAQLFIEDIIFYQRPLRSQKSLISNCPLEFYKFKDSVGNEKVQHLKAIPKSNPFYQEFRIWQWISNLSIYSKLDDSNFTSHFFDSTDDWESLFEMLNGRKEIEQKQLLKFLLEKKGFKGKSLSSEIEKYRWNYVEDKKYPCNETRSLIQSRLDKVANLPESFLTRHVEQELWHLIYSVTDKIEFEKALDTFSKKYKIDTPTFVDAFKKCPPFKSEYGSFSEKAIKKLLPLMRTGKYWDLDNIDKATKQRIEKIISGEYDKDIRDRVREKAINLLSETDFNRLQLWLAQYIVYDRHSEATSLDKWETIDDIVTYLHSFKQHSLRNPIVEQVITETIRVVKDIWSNYGNGSKDYFNEIHVELGREMKLPAEERKRIQEKNSQNEDTNLRIKALLSEMQNDPNVENVRPYSPVQQEILKIYEEGVLNSNIEIADDILKISKTAQPSSSDLKRYKLWLEQKYQSPYTGEIIPLNKLFTPEYEIEHIIPQSRYFDDSYNNKVICESAVNKLKDNSLGYEFIKGYNGQIVECGFGKKVKIFSIDEYEDFVQKNYANNRSKASRLMMADIPEKMIERQLNDTRYISKYISNILSNIVRSESNDDGVNSKNLISVNGKITTVLKKDWGMNDIWNDLILPRFIRMNQITDSDSFTTWNERFQKFIPTVPIELSKNFSAKRIDHRHHAMDALVIACATRDHVNLLNNLYAKSSARYDLNRKLRIFEKTTYKDIKTGQIIEREIPKAFLKPWQNFTTDAKDAIESIIVSYKQSLRVINKSTNYYQKWVEKDGIVKKEKIKQEGKNWAIRKPLHKDTVSGLVQLSWVKVPKGKVMTATRKSLDSSFDLKTIATITDTGIQKILIKYLESKGNNPESAFSPEGIEDFNNNIHLYNDGKKHRPITKVRLYEIGSKFPLGEKGNKNAKYVEAAKGTNLFFAVYANNKGERSFETIPLNLVIDRLKLGLSAVPETNEKGDNLLFHLSPNDLVYVPSEDEMENLKLINLEHISKDQLNRIYKMVSSTSNRCFFIKSEIALSIVNKIEYSPLNKMEKSIEGIMIKDVCLKLQVNRIGNLERYFS

SEQ ID NO: 5554 - protein, 1411 aa, synthetic construct
  REGION 1..1411: note = Synthetic
MRNILGLDLGTNSIGWALIKYSFDNRQGSILGMGTRVLPMSQDILGDFGKGNSVSQTAIRTGYRGVRRLRERFLLRRERLHRVLNILGFLPEFYASQIDFDKRFGKFKTETEPRLPYNKEGFIFKKSFNEMLSDFERFQPELLSGNKKVPYDWTIYYLRKKAVSQKIEKEELAWILLNFNQKRGYYQLRGEDLDEEREKVFVTLEVDRVVDSGEKVKGKGLYEVYFTNGWKYEKQIAKPEDWIGRTKEFIVTESVLKNGEIKRTFKAVDSEKDWIAIKTKTEQEIEISHKTVGSYIYDEILQNPKQKIKGRLVRTIERKFYKEELNEILKKQKEFHPELNNEDLYADCIRELYRNNEAHQLSLSKKDFVHLFLEDIIFYQRPLRSQKSSVSNCTLEFRKYKDENGKDYTRYLKVIPKSNPYYQEFRIWQWMFNLSIYRREDDINVTSEYLNTKEDYEKLFEFLNNRKEADQKALLKYFKLNEKTHRWNYVEDKKYPCNETRSIIVSRLEKVENSITGFLTREIEQELWHLIYSVNDKTEYEKALKSFAEKKHLDENLFFESFRNFPPFKSEYGAFSEKAIKRLLPFMRLGRYWNWENIDEKSRQRVQKIIDGEYDERITDKVREKTVLLQKESDFQGLPLWLAQYVVYGRHSEALLTGKWNSVADLDEYLKDFKQHSLRNPIVEQVITETLRVVRDIWKKYGNGTKDFFDEIHIELAREMKLPADERNRLTRKITENENTNLRIKALLAEMMNDTDVENVRPYSPMQQEILKIYEDGVLNSDISVDDDILKISKTAQPSSSDLKKYKLWLEQKYRSPYTGEIIPLNKLFTSEYEVEHIIPQSRYFDDSFSNKVICESSVNKLKDNYIGLGFIKKFHGYKISDKIKVFEVEEYEDFVKKNYANNRSKRSKLLMEEIPEEMIERQLNDTRYISKFISGVLSNIVRKEKNDDGINSKDLIPGNGRITSQLKQDWGFNDVWNDLILPRFERMNLLTNSNDFTVWNDKYQKFLPTVPIEMSKGFSKKRIDHRHHALDALIIACATRDHINLLNNQSSRSEIKRYDLKRKLMKFEKKNYKHPQTGGRIEREIPVLFFKPWESITVDAKENLEKIIVSFKQNLRVINKATNHYEKWTEKDGIKMKELVKQEGINWAIRKPLHKDTVSGKVDLPWIKIPKGKILTATRKMLDSSFNLKTISSITDTGIQKILKNYLEYKGGNPEDAFSPEGIEDMNQNIKKFNDGKAHQPITKVRVFELGSKFPLGQTGNKKHKYVEAAKGTNLFFAVYENNSSKRNFETIPLNEIIERQKQGLDPVSLNNKNDFYLCPNDLVYVAAEGESVNNLNVQELSINDVNNIYKVVSFSGSQIFFVRQEIAASIVNKAEFSTLNKMERAIDGRMIKETCVKLRIDRLGNIINA

SEQ ID NO: 5555 - protein, 1411 aa, synthetic construct
  REGION 1..1411: note = Synthetic
IKNILGLDLGTNSIGWALIKQNAEERQGSILGMGTRVLPMSQDVLGDFGKGNSVSQTAARTGYRGIRRLRERFLLRRERLHRVLNILGFLPYYYAAQIDFDKRFGKFKAETEPKLPYNNEGFIFKNSFEEMLSDFKISQPELLSGNKKVPYDWTIYYLRKKAVSQKIEKEELAWILLNFNQKRGYYQLRGEDFDEEKDKTFVTLNVDKVIDSGEKVKGNILFDIYFTNGWKYEKQTTKPEDWLGRSKEFIITESLLKNGEVRRTFKAVDSEKDWIAIKAKTEQEIETAHKTVGSYIYDAILQNPKQKIKGKLVRTIERKFYKEELRKILEKQKDFHLELQNEDLYSDCVRELYRNNDTHQLSLAKKSFIHLFLEDIIFYQRPLKSQKSSVSNCTLECRKYRDKNGAEGIQFLKVIPKSNPYYQEFRIWQWMSNLKIYRRDDDVNITSECLKTAEDYEDLFVFLNIRKEVDQKACLRHFKLSEKTHRWNYVEDKKYPCNETGTMISERLKKVGDSPDNIFTREMEQQIWHIIYSVNDKTEYEKALKSFAKKNELDNDSFFEAFRKFPPFDSEYGSFSEKAIKKLLPLMRIGKHWNWEAVDEKIKNRIQKIIIGEYDENIKDNIREKTLSLQKESDFQGLPLWLAQYVVYGRHSEASVAGKWNSVDDIEEYLKEFKQHSLRNPIVEQVIMETVRVVKDIWIKYGNGAADFFDEIHIELGREMKLPAKERNKMTQKISENENTNLRIKALLAEMMNDSEVQNVRPYSPMQQEILKIYEDGALNSEISVDDDILKISKTAQPSPSDLKKYKLWLEQKYRSPYTGDIIPLNKLFTTEYEIEHIIPQSRYFDDSFSNKVICESLVNRLKDNYIGLGFIKQFHGYKISDKTKVFEVEEYEDFVKKNYANNRSKRSKLLLEEIPEEMIERQLNDTRYISKYISGILSNIVRKKENDEGVNSKDIIPGNGKITSQLKQDWGLNDVWNDLILPRFERMNELTKSSYFTVWNEKYQKFLPTVPVEFSKGFSKKRIDHRHHALDALVIACATKDHVNLLNNKSAKSEMKRYDLKRKLMKFEKKTYQHSQTGERIVKDVPVEFLKPWNDFTVEAKENLEKIIVSFKQNLRVINKATNHYEKWIEKDNVKVKGLVEQQGLNWAIRKPLHKDTVSGKVDLPGIKVPKGKILTATRKSIDTSFDLKTINSITDTGVQKILKNYLEYKGNSSEEAFSSEGIEDMNNNIEKFNEGKLHQPITKVRIFELGSKFPLGQIGNKKHKYVETAKGTNLFFAIYEDDKGKRTYETIPLNEVIERQKQGLAPVTLKSKNDFYLCPNDLVYVAAEGESVNKIDFKYASQEFIHNIYKVVSFSGSQIFFVKQNIAVSIVNKAEFSTLNKMERAVDGKMIKDCCIKLKIDRIGNITKS

SEQ ID NO: 5556 - protein, 1410 aa, synthetic construct
  REGION 1..1410: note = Synthetic
MKNILGLDLGTNSIGWAIIKQNSESRQGSVLGMGTRVLPMSQDILGDFGKGNSVSQTAARTGYRGVRRLRERFLLRRERLHRVLNILGFLPKYYASQIDFDKRFGKFREETEPKLPYNNEGFIFKNSFEEMLLDFKISQSELLSGNKKVPYDWTIYYLRKKAVYQKIEKEELAWILLNFNQKRGYYQLRGEDFDEGKDKTFVTLDVEKVIDSGEKIKGNVLFDVYFTNGWKYEKQITKPQDWIGRTKEFIITESILKNGDIKRTFKAVDSEKDWIAIKAKTEQEIDASHKTVGSYIYDAILQNPKQKINGKLVRTIERKFYKEELKQILEKQKEFHPELEINDLYNDCVRELYRNNEAHQLNLAKKDFVHLFLEDIIFYQRPLRSQKSSVSNCTLEFRKYKDGNGVERIQFLKVIPKSNPYYQEFRIWQWMFNLSIYRRDDDINITSDYLKTIEDYERLFEFLNNRKEVDQKALLKHFKLNDKTHQWRYVEDKRYPCNETRAMIIACLGKTQSNMAEFLTRKIEQEIWHIIYSVNDKTEYEKALKSFAKKNHLDENSFFEAFRKFPPFSSEYGSYSEKAIKRLLPLMRTGKYWSWEDIDTKSKNRIQKIITGEYDEDIKDNIREKTRTLQKESDFQGLPLWLTQYVVYGRHSEASLTGKWNSVDNIEEYLREFKQHSLRNPIVEQVITETLRVVKDIWMKYGNGVKDFFSEIHIELGREMKLPAKERNKMTQRISENENTNLRIKALLAEMANDSEVKNVRPYSPMQQEVLKIYEDGVLNSEISVDDDILKISKTAQPSSSDLKKYKLWLEQKYRSPYTGGIIPLNKLFTPEYEIEHIIPQSRYFDDSFSNKVICESAVNKLKDNYIGLGFIKQFHGYKISDRIKVFEVEEYEDFVKKNYANNRTKRSKLLLEEIPEEMIERQLNDTRYISKFVSGILSNIVRKEVNDDGMNSKDIIPGNGRITSELKQDWGLNDVWNDLILPRFERMNLITESNDYTVWNEKYQKFLPTVPIEFSKGFSKKRIDHRHHALDALVIACATRDHINLLNNQAAKSEMKRYDLKRKLMKFEKKIYQHPQTGERIERDIPKQFLKPWENFTVEAKENLDKIIVSFKQNLRVINKATNYYEKWIEKDNIKVKGLVEQQGLNWAIRKPLHKDTVAGKVELPWIKVPRGKILTATRKSLDTSFDLKNISSITDTGIQKILKNYLEYKGSSEDAFSPEGIEDMNKNIEKFNDGKPHQPIAKVRIFELGSKFPLGQIGNKKHKYVETAKGTNLFFAVYEGDKDKRTYETILLNEVIERQKQGLSPVALKSKNDFYLCPNDLVYVAAEDELVDSLDFQTISKENMNNVYKVVSFSGSQIFFVRQNVAVSIVNKTEFSTLNKMERAIDGRMIKESCVKLKIDRLGNITKS

SEQ ID NO: 5557 - protein, 1406 aa, synthetic construct
  REGION 1..1406: note = Synthetic
VLGEFGRGNSVSQTAERTGYRGVRRLRERHLLRRERLHRVLNILGFLPERYASQIDFDKRFGKFKKESEPKLVYHNNEFLFKDSFNEMLEDFKKHQAHFLINKNGEEGLVPYDWTIYYLRKKALSQKIGKEELAWIILSFNQKRGYYQLRGEEEEENSNKLVEFHSLKIIDVVPDNDINKKGETWYSLHLENGWIYRRSSKNSLNDWKDKVRDFIVTTDINEDGSEKLDKEGQVKRSFRAPSADDWTLLKKKTEQEIDNSQKTVGTYIYENLLLDPKQKIKGKLVRTIERKFYKAELEQILKKQSEFHSELISEDLLSECARELYKNNQNHQQTIIAKDFVHLFLNDIIFYQRPLKSQKNLITNCTLESRKSKDGITFPIKVISKSNPYFQEFRILQWLQNLAIYTKEDDKNVTQEFFDSNEKWEDLLRWLKSRNEIKQEALLKFLLEQKGFKSKALTAEIAKYRWNYVQDKDYPAYETRTLIQSRLDKVVDIGVDFLDDEIEYKLWHLIYSVTDKIEYEKALIKFATKHKLDETSFVDSFKKVPPFKSEFGSYSEKAIKKLLPLMRFGSVWNYEQIDDNSKAKIDKILTGEYDENIKNRVREFIEKRIITNEEQFQNLPLWLAQYIVYNRHSESADIKKWQSVEELNQFLQDFKQHSLRNPIVEQVITETLRVVKDIWMKYGKGVKDFFSEIHVELGREMKNTADERKRLTNIVTDNENTNFRIKALLAELANDAMVENVRPYSPMQQDILKIYEEGVLNSVENIEDDILKISKTAQPSSSDLKRYKLWLEQKYKSPYTGQIIPLNKLFTHEYEIEHIIPQSRYFDDSLSNKIICEAAVNKLKDNQIGLAFIKKHHGEVVSLGNGKTVKVFEVANFEEFVKQHYTKNRTKRNKLLMEEIPEQMIERQLNDTRYISKYISQILSNIVRDDQPESTDDGINSKNVLPGNGKITTKLKQDWGLNDVWNDLILPRFIRMNELTSSTDYTSKNTNGKLIPTVPLEQSKGFSKKRIDHRHHAMDALVIACATRDHINLLNNEAAKSNTKRFDLQHKLRKQETYRTQEGNEQKAFKDFFKPWKTFTEDSKNALENIVVSFKQNTRVINKATNYYESYKDENGNIRLDTNGNPKKGVLVQKGTNWAVRKALHKETVSGKIHLDRIKVAKDKILTASRKSLDASFNEKTILSITDTGIQKILLNYLKFKNNDSEIAFSSEGIDEMNKNVAQFNEGKKHQPILKVRVFEQGSKFALGETGSKTKKYVEAAKGTNLFFAIYQDKIGKRSYETIPLNIVIERQKQGLSSVPETNEKGHSLLMSLSPNDLVYVPLEGENGDLDNIDSNRVYKMVSSTGSECHFIKVNISTLIKGYDAKSKIGELGSLNKLEVTIDSLFRIKEVCTKLKVDRLGNISKA

SEQ ID NO: 5558 - protein, 1506 aa, synthetic construct
  REGION 1..1506: note = Synthetic
MRTILGLDLGTNSIGWAVINSVIKEQTERIWIEMAGSRIIPMDAAILGDFDKGNSISQTAERTRFRGVRRLRERQLLRRERLHKVLKILGFLPEHYLKGIDFEKHTGKFLSGSEPKLPWVKDRWGKYSFLFQTAFNEMLADFAKHQPSLVFDGKKIPYDWTVYYLRKKALTEMISKEELAWILLNFNQKRGYYQLRGEEEEDNAGKSVEFYALKVLSVEATDEKKGRDIWYNVHLENGWVYRRSSNVPLDWEGRVKEFIVTTDLNPDGTPKLDKYGEVKRSFRAPKEDDWMLIKKRTEADITGTHKTIGSYIYDALLQEPQQKIIGKLVKTVERKFYKEELNFILQKQCAFHAELQDRDLYMRCIEALYPGNEVQRRNIANRDFIYLLIDDVLFYQRPLKTKKSLIANCPYEENEYVNRKTGEIKTAPLKCIAKSHPLFQEFRLWYFLSNIRVYQKEREVNGTLHLDVDVTTEFLKTEDDYVALFDWLNSRKEIDQKAFLRYPAFGLKKEINNYRWNYVEDKFYPCNETRHAILSRLEKAGIDFLSDEKETALWHILYSVSDKQEIEKALATFAVKNGLNESFVEVFKKFPPFKSEYGAYSAKAIKKLLPLMRCGKYWDMSLIDGTTKERIERIIAGECDESIGAKVREKAMNLSDISCFKRLPLWLACYVVYNRHSEDKEITKWESPADIDAYLAAFKQHSLRNPIVEQVITETLRVVRDIWKQVGKIDEIHIELGREMKNPADKRKRMTTQILENENANLRIKALLAEFVNPEYGVENVRPYSPSQQEILRIYEDAVLKGEEQIPEDIDVILKKFNTSKLPTKSEFLRYKLWLEQKYRSPYTGELIPLAKLFTAAYEIEHVIPQSRYFDDSFSNKVICESAVNKLKDNQLGYEFIKNHHGQKVEVGFGKTVEIFSVDSYERFVKEQYAKSGIKMKKLLMDDIPEQFIERQLNDSRYISKVVKGLLSNIVREKNDSGEYEPEAVSKNILVCTGSVTDRLKKDWGMNDVWNSIVSPRFERLNALTETQCFGHWENKDGKKVFQTAVPLEYQKGFSKKRIDHRHHAMDAIVIACATRNHVNYLNNESASRNAKISRYDLQRLLCDKSRGDGNGNYRWIIKKPWTTFTQDAREALSGIIVSLKQNLRIINKTTNIYQHFDANGTRVYEKQKIGDSWAIRKPMHKDTVFGAVNLRKVKVVRLSVALDTPSMIVDKRVKNKVLELLSYKYDKKKIEKYFKENAFLWKELDIAKVAVYYFTENTTEPLVAVRKSLDSTFNEKKIASVTDTGIQKILLNHLKSKEGKAELAFSAEGIEEMNRNLLQLNDGKGHQPIYKVRVYEPRGNKFKVGVLGNKGAKWVEAAKGTNLFFAIYITEDGNRTYETIPLNWVIEREKQGLVPVPDRNEKGDKLLFWLSPNDLVYLPTEEERDFGRINEPIDRGRIYKMVSSSGNQCFFIPQSISNAIISTKELGSNNKAEKSWDGEMIKNICIPVKVDRLGRIIEVKYRVNE

SEQ ID NO: 5559 - protein, 1511 aa, synthetic construct
  REGION 1..1511: note = Synthetic
MVMKHILGLDLGTNSIGWAVINALENEDGRETLEKILCAGSRIIPMDAAVLGDFDKGNTKSQTADRTMKRMARRLYERNHLRRERLIRVLSVLGFLPEHYAAQTDRYGKFINHGEPKLPWATDAQGRPVFLFKESFDEMLADFRQNWPDFFTASRKVPYDWTIYYLRKKALTRKIEKEELAWVLLNFNQKRGYYQLREEPEQEKPSKTRQYFDSQVVVEIIDTGQLYKGMKVLIVVLENGTKGKIFKKDKPEWVGQKKDVIVVVDLDKNGQDKYDENGELCARFKVPTEQEWETQWKLVKAKTENDLTGSGKTVGEYIYDTLLQMPGQKIRGKLVRTIERKYYKDELRRILKKQQEFHPEFQDRALYKACIDALYPQNDAHRNLISTRDLAYLLLDDILFYQRPLKSKKALIANCPYETHDCINRETGEVKPYRLKCIAKSHPLFQEFRLWQFLSNLRIYQKEKVVDGKICFDVDVTAEFLKGEDDYVGLFDWLTGQESIKQDTFFKYPPFGMTKDAAKNFRWNYVEDKIYPCNETRALILKRLEKVGVDAGFLTGEMEQALWHILYSISDKQELRTALGTFAGKHGLDDRFVEAFQNMPPFEKEYGAYSAKAIKKLLPLMRMGKYWSEKDIDAHTYERIAKIMSGECDDNIRQRVREKAIHLKDVHSFRGLPLWLACYVVYDRHSEAKDMQKWKQPSDIDTYLAGFRQHSLHNPIVEQVILETLRTVRDIWKQVGHIDEIHVELGREMKSPKNKREMMTRQMLENENTNIRIKAMLMEFMNPEFNVENVRPYSPAQQDLLRIYEEGVWNSVDNIPDDIRIIINRLSESETHKRPTTAEVLRYKLWLEQKYRSPYTGEMIPLGKLFTPAYEIEHIIPQARYFDDSFSNKVICESEVNKLKSNMLGHEFISKHRGEKVPLSGGGCVNIFSVADYEKFVKDNYAKSIVKQRKLLMDDIPEQFIARQLNDSRYISRVVKSLLSNIVREESEQEEVSKNLIVCTGGVTDRLKKDWGINDVWNKIILPRFLRMNEITGTDSFTAPNTNGRLIPAMPLELQKGFNKKRIDHRHHAMDAIVIACANRNIVNYLNNESASKNAKIARYDLQRLLCDKQKTDEQGNYRWLIRKPWPTFTQDVYATLQNIIVSFKQNLRVINKTVNYYQRYVDGKKKFVLQEKGDSWAIRKSMHKDTFYGEVNLRMTKTISLKEALKNPKSIVEKDLKKKIQELLSHKQNEKQIRAYFEANKDAWQDVDLKKIKVYYFASETKDRYYASRKPLDDSFDEKKIRSVTDVGIQKILLRHLENNGNDAKLAFSPEGIERLNENIAMLNGGKYHYPIYKVRTYEKADKFAVGRTGNKISKYVEADKGTNLFFAVYETEGVDKVTGENVRKRSYATVPLNVVIERQKCGLPSAPEDENGIPPRFVLSPNDLVYVPTAEELESGHITYPLERTRIYKMVSCTGNEVHFIPAFVSNPILQVKELGSNNKSQRAWSGEMIKEICMPLKVDRLGNVIQPL

SEQ ID NO: 5560 - protein, 1307 aa, synthetic construct
  REGION 1..1307: note = Synthetic
MMFGTMCIWRTAWSIAARVKRPWIGREKLKSLSLLLISKKMERQKKDKEGNIKRSFRAPKEDDWTLLKKKTEFDIDNSHMTVGCYIYDNLLQKPNQKIIGKLVRTVERKYYKDELRQILETQIALIPELKDETIYNRCLEELYPNNESHRKNNAKPDFANLFINDILFYQRPLKSKKSLISDCPYESHFDKDGNEHPVKCIAKSNPLFQEFRLWQFVQNLRIYQRERIVSDGQLDLFGNQSAGKLQTDVDVTDEFLKSEDDYVKLIDWLNDRASIKQDTLLNSYFKIKKEKGKDLYPYRWNYVEDKDYPCNETRATMLGGLWKCGIDTGFLTSEKEMSLWHILYSVEDKMEIAKALKKYAEKNNLSDLFAEVFAKVKPFKKDYGSYSEKAIKKLLPLMRMGKYWSADAIDIKTKERIDKMLTGEYDENIKNRVREKAINLTDIDHFKGLPIWLACYIVYDRHSEAKEIGKWKTPEDIDGYLKEFKQHSLRNPIVEQVVTETLRTVRDIWKQEEQIDEIHLELGREMKNPADKRKRMTENILQNENTNLRIKAMLMEFLNDPEIENVRPYSPSQQDILRIYEENALDNLTKDDKDYDFVSKISKSAQPSKADIIRYKCWLEQKYRSPYTGEMIPLAKLFTSAYEIEHVIPQSRYFDDSFTNKVICEKEVNGLKDRQLGFEFIKNHHGEKVQLSQGKVVEILSVEAYEKFVKEHYANNRTKMKKLLMDDIPDGFIERQLNDSRYISKLVKGLLSNIVREKLENGEYEQEAVSKNLISCNGSITDRMKKDWGMNDVWNGIVLPRFRRLNELTGKDCFTTISAEGHEIPAMPLELQKGFNKKRIDHRHHAMDAIVIACATRDHVNLLNNEAAHSKHNANRYQLQRKLRRFEKLTIDGVEKEIAKEFLKPWDSFTTDAKQILENIIVSFKQNLRVINKTTNSYQHYDETGKKVMVKQEKGDSWSIRKPMHKDTVFGEVNLRMSDKTVSLNEALKNPKTIVNKEFKKKVMEMLEAGRDAKFIKKYVEDNKDVWSDIDVKRIQIYYFTKETKDRYFATRKPLDTSYNSKKIKESVTDTGIQKILLEHLEAKGGDPELAFSPDGIDEMNRNIVALNKGKFHQPILKVRVYEKAEKYAVGQNGNKSAKFVEAAKGTNLFFAIFGTEKANKETGETEMVRSYLTIPLNVMIDCQKKYGSQWRNNIESYLQEQQLATSDAKLLFILSPNDLVYLPMPEELKDGIYKIDKSRIYKLVSCTGSRLYAIPFSVAKVIVDKMEFTQLNKVEFTDYKSSIKEICVPIKVDRLGNIIELNGKKL

SEQ ID NO: 5561 - protein, 1273 aa, synthetic construct
  REGION 1..1273: note = Synthetic
MKTILGLDLGTNSVGWAVINSVIKEQAERIWIETAGSRIIPMDAAVLGDFDKGNSISQTSERTRLRGARRLRERQLLRRERLHKVLNILGFLPNHYLEYIDFEKHPGKFLADAEPKLAWVKDEQGKYTFLFQAAFDEMLADFAIHQPSLVSGDKKIPYDWTIYYLRKKALTEMISKEELAWILLNFNQKRGYYQLRGEEEEDNAGKSVEFYALKVLTVEATDEKKGRDVWYNVHLENGWIYRRSSSVPLDWEGQVKEFIVTTDLNPDGTPKLDKYGEVKRSFRAPKEDDWMLIKKRTEADIANTHKTVGAYIYDTLLQKPQQKIIGKLVKTVERKLYRDELSLILQKQCAFHAELQDRALYARCVEALYPSNEVRRKNIANRDFVYLLMDDILFYQRPLKTKKSLIANCPYEENEYVDRETGEIKKAPLKCIAKSHPLFQEFRLWNFLSNIRIYQKEKEINGTLHLDVDVTAEFLKTEDDYVALFDWLNSRKEIEQKTFLKYPKFGLKKEISNYRWNYVEDKQYPCNETRHAILSSLEKANVCIDFLSNEKEVALWHILYSVSDKQEIEKALRTFAAKNGLDESFVEAFKKFPPFKSEYGAYSAKAIKKMLPLMRCGKYWDVSSIDDTTKERIKKIVTGEYDERIAVKVRDKVMNLSDISCFRRLPLWLACYIVYNRHSEDKEAVKWESPADIDAYLASFKQHSLRNPIVEQVITETLRVVRDIWKQVGRIDEIHIELGREMKNPADKRKRMTAQILENENANLRIKALLAEFMNPEYEIENVRPYSPSQQEILRIYEDTVLHAEDQLPEEIDAILKKFNSSKVPTKSEFLRYKLWLEQKYRSPYTGELIPLGKLFTAAYEIEHVIPQSRYFDDSFSNKVICESAVNKLKDNQLGYEFIKNHHGQKVEVGFGKSVEIFSVDSYERFVKEQYAKSAVKMKKLLMDDIPEQFIERQLNDSRYISKVIKGLLSNIVREKNDSGEYEPEAVSKNIVVCTGSVTDRLKRDWGMNDVWNSIVYPRFERLNSLTDTQSFGHWENKSGKKVFQTELPLEYQKGFSKKRIDHRHHAMDAIVIACATRNHVNYLSNESASRNAKISRYDLQRLLCDKNRTDDNGNYKWVIKKPWDTFTQDAREVLSKIVVSLKQNLRIINKTTNVYRHFDATVNRVYEKQKTGDSWAIRKPMHKDTVFGAVNLRKVKVVRLSVALDTPAMIVDKRVKNKVFELLSYKYDKKRIEKYFKENAFLWKVWGTERNGLTMDSTKRRISPLFIGVSER

SEQ ID NO: 5562 - protein, 1219 aa, synthetic construct
  REGION 1..1219: note = Synthetic
MLIKKRTEADIANTHKTVGAYIYDTLLQKPQQKIIGKLVKTVERKLYRDELSLILQKQCAFHAELQDRALYARCVEALYPSNEVRRKNIANRDFVYLLMDDILFYQRPLKTKKSLIANCPYEENEYVDRETGEIKKAPLKCIAKSHPLFQEFRLWNFLSNIRIYQKEKEINGTLHLDVDVTAEFLKTEDDYVALFDWLNSRKEIEQKTFLKYPKFGLKKEISNYRWNYVEDKQYPCNETRHAILSSLEKANVCIDFLSNEKEVALWHILYSVSDKQEIEKALRTFAAKNGLDESFVEAFKKFPPFKSEYGAYSAKAIKKMLPLMRCGKYWDVSSIDDTTKERIKKIVTGEYDERISVKVRDKVMNLSDISCFRRLPLWLACYIVYNRHSEDKEAVKWESPADIDAYLASFKQHSLRNPIVEQVITETLRVVRDIWKQVGRIDEIHIELGREMKNPADKRKRMTAQILENENANLRIKALLAEFMNPEYEIENVRPYSPSQQEILRIYEDTVLHAEDQLPEEIDAILKKFNSSKVPTKSEFLRYKLWLEQKYRSPYTGELIPLGKLFTAAYEIEHVIPQSRYFDDSFSNKVICESAVNKLKDNQLGYEFIKNHHGQKVEVGFGKSVEIFSVDSYERFVKEQYAKSAVKMKKLLMDDIPEQFIERQLNDSRYISKVIKGLLSNIVREKNDSGEYEPEAVSKNIVVCTGSVTDRLKRDWGMNDVWNSIVYPRFERLNSLTDTQSFGHWENKSGKKVFQTELPLEYQKGFSKKRIDHRHHAMDAIVIACATRNHVNYLSNESASRNAKISRYDLQRLLCDKSRTDDNGNYKWVIKKPWDTFTQDAREVLSKIVVSLKQNLRIINKTTNVYRHFDATVNRVYQKQKTGDSWAIRKPMHKDTVFGAVNLRKVKVVRLSVALDTPAMIVDKRVKNKVFELLSYKYDKKRIEKYFKENAFLWKELDLAKVAVYYFTEATTEPLVAVRKPLDSTFNEKKIKESVTDTGIQKILLNHLCTKEGKPDLAFSAEGIEEMNRNLLQLNNGKSHQPIYKVRVYEPRGNKFSVGVLGNKGTKWVEAAKGTNLFFAIYITEDGKRTYETIPLNVVIEREKQGLVPVPDRNEKGDKLLFWLSPNDLVYLPTEEEREFGRINEPIDRGRIYKMVSCTGNEGHFIPANVANPIVPVIELGSNNKAQRAWTNEMIKDICIPIKVDRLGHIIEVKYRIDE

SEQ ID NO: 5563 - protein, 1152 aa, synthetic construct
  REGION 1..1152: note = Synthetic
MKTIMVKNILGLDLGTNSIGWALIKQDFENKQGEILGMGSRIIPMSQDILGDFGKGNSVSQTAERTKYRSVRRLRERFLLRRERLHRVLNVLDFLPEHYASQIDFNKRFGKFKEETEPKLAYSNDGFIFKKSFEEMIPDFKTHQPQLLENNKKVPYDWTIYYLRNKALSHKIEKEELAWILLNFNQKRGYYQLRGEDFEEEKDKVFVRLKVDRVVDSGENVKGRILYDVYFENGWKYEKQIVKTEDWIGRTKEFIVTESILKNGDTKRTFKTVDSEKDWIAIKTKTEQEIDKSHKTVGAYIYETLLQNPKQKIKGKLVRTIERKFYKAELKKILEKQKEFHPELRQDDLYNDCVRELYKNNEAHQLTLSKKDFVHLFMEDIIFYQRPLRSQKSSISNCTLEFRKYKDENGTEHIQYLKALPKSNPYYQEFRIWQWMYNLNIYKKEDDTNVTKHFLNTKADFESLFEFLNNRKEVDQKALLKHFKLNDKTHRWKYVEDKKYPCNETKTMISERLKKVENISDDFLTREIEQKIWHIIYSVNDKVEYEKALKSFAGKNNLEKNSFFEAFKKFPPFKSEYGAFSEKAIKKLLPLMRLGKHWDYSNISEQSKSRIQKIITGEYDENIKDRVREKAVHLTKETDFQGLQLWLAQYIVYGRHSEAAMLGKWNSADDLEEFLKEFKQHSLRNPIVEQVITETLRVIKDIWVKYGNGAKDFFNEIHIELGREMKLPAEDRKKITSQISENENTNLRIKALLAEMMADSSVENVRPFSPMQQEILKIYEDGVLNSDIEIEDDILKISKTAQPSPSDLKRYKLWLEQKYKSPYTGQIIPLNKLFTPEYEIEHIIPQSRYFDDSFSNKVICESAVNKLKDNFIGLGFIKQFGGTIVECGNGKSVTVLKEDQYEDFVKKHYANNRSKRNKLLLEDIPEKMIERQMNDTRYISKYISGVLSNIVRTEDGTDDGVNSKNIVPGSGKITNTLKQDWGLNDIWNDLILPRFERMNQLTNSTDFTVWNENHQKFLPTVPVEFSKGFSKKRIDHRHHALDALVIACATKDHVNLLNNQSAKSDTKRYDLKKKLMKFEKVVYKNPHTGEKIEREVPKQFLKPWETFTVDAKSRLETIIVSFKQNLRVINKATNYYEKYVEKEGKKVKERVE

SEQ ID NO: 5564 - protein, 1488 aa, synthetic construct
  REGION 1..1488: note = Synthetic
MAKIVGLDLGSNSIGWAVIDNEKHSIEAAGSRIIPMDAGRLGDFEKGNSVSFTAERTKYRGMRRLRERYLLRRERLLRTLKIMGFLPEHFASQLTRYGQLPTDKEPKLAWREGKDGKPEFLFQPSFEEMVSDFRKAEIVQKIPYDWTIYYLRQKALSQPISKEELAWILLQFNQKRGYYQLRGKADESIIPDEEKKEEKSYHELEITKVEDSGEKDKKGNTWYNITLENGWVYRRAFLSKPDWEGKKRGFIATFKLDNNGNHKDDTPKLSSPSEDDWGLRKIKTENDIKESGTTIGAYIYQSLLHHPDRKIIGDLVQTIDRELYKDELRKIIDTQRQFMPELNDMNLYNQCIKELYPSNNAYRNSIATRGFRYLLVEDILFYQRPLKSKLSLIDDCPFEQRHGKAIKCIAKSHPLYQEFRLWQFIANLKIYKDDNDITESLLPDGAKYANLYDYLSTIKEIDQQTTLKYFKIGKKDMPHYRWNYVPERKYPMGETRAVLLGGLRKAGINDKFLTFEKELLLWHLLYSVNDQIQYRKALITFTLKQGWDEQRSKAFCQAFDRLTVYKEKDYGAYSTKAIKRLLPLMRRGRYWDESAIDGQTLSRIEHIITGEDDNTLSPHVRELFCSLSSIEQCQGLNTWQACYLVYNRHSEAIDAQKWTKPEDIDQYLSQFRHNSLNNPVVEQVVTESLRVVRDIWKQTGHIDEIHIELGRELKKTKAERERLSQSIIDGETTNQRIRLLLTELMNPELEVENVRPQSPSQMEILKLYEEGVMQSGTEIPDDIKDIQKRFTAAKNQPTTAEVKKYRLWLDQKYISPYTGRPIPLAKLFTPAYEIEHVIPQSRWFDDSMSNKVICEAEVNKLKGRELGHEFISHHQGERITLNLGETVEILSLEAYEKLIKTTISNSKKREKLMLDDIPDDFTSRQMNDSRYISRLMMHLLSNIVRSEDEEGHREESVTSKYVISCSGSITDRLKRDWGINDVWNRIILPRFERMNEITGTNDYTAITDNGHHIPQVPLHLRQGFNKKRIDHRHHAMDAIVIACATRSHVNLLNNQNAKSNTRYDLQHTLRATDYYLDEQGEKHSCPGNFIKPWPTFTEDVYHTLESIVVSFKQNLRVINKTSNHYTSLQNGKPAVHKQEKGDSWAIRKPLHKETVFGEVNLQLKKRVKIREAVATPKAIVDRELKEKILHFLSHQHSVKQITDYFDKHKDIWPEVSDGKIEIYYFTKETKDRYFATRKDLIGIFKDITTESAAQKIIDSITDSGIRSILQAHLASENNNPVEAFSPDGLERMNRNIRFLNGGHNHMPIKKVRVYEQANKYSVGNHGQKSTKYVEAAKGTNLFFVIFTDKKGSRGYATVPLNVVIELQKQYEKHWKEHLSERLQQEDLGLMPLEANLLYILSPGDLVYVPNEEERNNGISSQEPNRIYKVVSMTGIQFMCISNRVATPIVNKMEFTTSNKMEKTMNGEMIKEVCIPIQVDRLGNITKIG

SEQ ID NO: 5565 - protein, 1537 aa, synthetic construct
  REGION 1..1537: note = Synthetic
MKNILGLDLGTNSIGWALVSRNEENKIEGLKGLGSRIIPMSQDILGKFDSGNSISQTAERTGFRGTRRLRERHLLRRERLHRVLHLLGFLPEHYEQTIDFEKRLGKFLPDTESKLPWKEIEEKKYEFLFQDSFEEMLSDFAQIQPQLLTENRKVPYDWTIYYLRKKALQQKITKEELAWILLNFNQKRGYYQLRGEEEEENPNKRVEFHALKVVDVTADEPQKGKADIWYNLILENGWVYRRSSKTPLFDWKDKIKEFIVTTDLNDDGSIKTDKEGVERRSFRAPSPDDWTLLKKKTELDINKSDKTVGTYIYDTLLQNPSQKIRGKLVRTIERKFYKEELKQILEKQKEFYNELNNDDLFQSCVTELYPYNEAHRSILQNSDFTGLFLNDIIFYQRPLKSKKSLISNCSYEFRAFKNESGVIEKLPIKCISKSHPLYQEFRLWQFIHNLRIYEREKEVNGKFQTDVDVTTEFLQTIEDRVNLFDWLNDRKEIKQDTLLQSYFKIKKRNKSDDNLPYRWNYVEDKEYPCNETSSQIHSRLSKLNIPVDFFGKETEFALWHILYSVEDKEEIKKALKSFAGKYQLSDEFVDVFAKFPPFKKEYGAYSEKAIKKLLPLMRMGKYWDEHAISDETKKRIQSIQERLADFKETEKKIEDVSDDDIPKQVLKSFVDVENPYSGLNTFQACYAVYGRHSEASDLTRWKTPEDIDNYLAEFKQHSLRNPIVEQVITETLRVVRDVWKKYGDIAEIHIELGREMKNPADKRAQMTARISENENTNLRIKALLMELKNHSDVENVRPYSPSQQEILKIYEEGALNSVAEIPDDILKITKLSQPTQSELIRYKLWLEQKYKSPYTGLVIPLGKLFTSDYEIEHIIPQSRYFDDSLSNKVICESEVNKKKDNQLGYEFVKKHAGEIVDLGFGKKVQIQSIDAYERFVQENYGKNRGKLKKLLLEDIPESFIERQLNDSRYISKIVMGLLSNIVREDKEQEAKLDNVIPCTGGITTILKQDWGLNDVWNRIVTPRFERMNLLTKSNSFGEWVNKNGKKVFQTELPIELQKGFNKKRIDHRHHSLDAVIIACATREHIQYLNNEHAHSKNNDVRYGLRNKLRRIEDREIERIENGNKVRKTIKVACEFHKPWDTFTQDVQNALENTIVSFKQNLRVINKTVNHIQSYKDESSNLQLDRNGKPIKISRKQVKGDNWAIRKPLHKDTVAGHVNLRFKKQVNLSVAIDQWEMLVDKNLKTKIKQLINDGLDKKKIQKFFADKENSWMGKEVSKPEVYYFSDEKEKLVASRVTLDISFNSKKIESITDTGIQKILRQHLEKYNEEKDGKIIEYPELAFAPEAIEEMNKNISALNKGKFHQPILKVRTYEPKGNKFNVGVNGNKKDKFVEAAKGTNLFFAIYADENGNRSYETIPLNIVVERLKQRLNAVPEKNEKGYSLLFYLSPNDLVYVPTEEEIDNPYSVDTKNLTKEQKERIYKIVSFTNSRLYGIPYVVASPIANKLEFTQLNKLEFVENRALKENCCKLKVDRLGNLL

SEQ ID NO: 5566 - protein, 1473 aa, synthetic construct
  REGION 1..1473: note = Synthetic
MTKNILGLDLGTNSIGWALIKQDFENKKGEILGMGSRIIPMSQDILSDFGKGNSVSQTAERTKYRSVRRLRERFLLRRERLHRVLHILNFLPEHYASQIDFEKRFGKFKVETEPKLAWKKIDGQFSFLFQTSFNEMLEDFRVNGQDVKIPYDWTIYYLRKKALSQKIEKDELAWILLNFNQKRGYYQLRGEEEEENPNKLVEFYSLKVIDVLADEPQKGKSDIWYSLILENGWIYRRSSKIPLFDWKDKTRDFIVTTDLNDDGSIKKDKDGNEKRSFRAPSENDWTLVKKKTEQEIEQSHKTVGTYIYQALLDNPKQKIKGKLVRTIERKFYKEELRQILEKQKEFHQELQSDNLYNDCVRELYRNNEAHQLTLSKKDFVHLLMDDLIFYQRPLRSQKSSVSNCTLEFRKYKDENGVEHTQYLKAIPKSNPYYQEFRIWQWMYNLNIYRRDDEQNPVTGEFLSTTKDFENLFEFLNNRKEIEQKPLIKFLLEQKDVNKKLLNVEAEKYRWNFVEDKKYPCNETKTMISSRLDKVENISDDFLTREIEQKIWHIIYSVNDKIEYEKALKSFARKHHLDESSFFEAFRKFPPFKSEYGSFSEKAVKRLLPLMRLGKYWNYADIDKSSKARIQKIISGEYDENIKDKVREKSVHLTTENDFQGLQLWLAQYIVYGRHSEASMIGKWNSADDLEEFLKDFKQHSLRNPIVEQVITETLRVVKDIWLKYGNGAKDFFNEIHIELGREMKLPADDRKKLTNQITENENTNLSIKALLAEMMNDSSVENVRPFSPMQQEILKIYEDGVLNSGIEIEDEYLKISKTAQPSPSDLKRYKLWLEQKYKSPYTGQIIPLNKLFTPEYEIEHIIPQSRYFDDSFSNKIICESAVNKLKDNYIGLGFIKQFGGTIIELGFGKSVKVFEMEEYEDFVKKHYANNRSKRNKLLLEDIPEKMIERQINDTRHISKYISGVLSNIVRIDDEQAKKIIEDAEILARKEIDKDKADEIRRKAKSLATDDGINSKNIVPGNGKITTQLKQDWGLNDVWNDLILPRFERMNQLSNSKDFTAWNENHQKYLPTVPIEFSKGFSKKRIDHRHHALDALVIACATKDHVNLLNNQSAKSDTKRYDLKKKLMKFEKVVYHHTQTGEKIEREVPKQFLKPWENFTFDAKHNLESTIVSFKQNLRVINKATNYYEKYVEKDGTKNKGRVEQTGTNWAIRKPMHKDTVSGKVDLPWVKVPKGKILTATRKILDTSFDSKSIGSITDTGIQKILRNYLEFKGSPELAFSPEGIEDMNKNIEKYNDGKPHQPISKVRVFELGSKFQVGQTGNKKDKYVEAAKGTNLFFAVYEDKNGKRSYETIPLNEVIERQKQGLSVVDLKGREDFYLCPNDLVYIPSNDELENINNIDFKNIAKEKNERIYKVVSFSGSQIFFVRQDIATSIVNKAELSTLNKMERAMDGSMIKENCVKLNVDRLGNISKA

SEQ ID NO: 5567 - protein, 1444 aa, synthetic construct
  REGION 1..1444: note = Synthetic
MKKILGLDLGTNSIGWALIEQNFENKEGNIIGVGSRIIPMTQDVIGEFGRGNSISQTAERTSYRGVRRLRERHLLRRERLHRVLNILGFLPEHYANQIDFQKRLGKFFPESEPKIVYHNNEFLFKNSFNEMIENFKKSQPDFLKDKNGKECLVPYDWTIYYLRKKALTQKIDKGELAWIILNFNQKRGYYQLRGEEEEENLNKLVEFHSLRIVDVIADEEANKKGETWYSLHLENGWIYRRSSKISLADWKDKIRDFIVTTDINDDGSEKLDKDGNVKRSFRAPGADDWTLLKKKTEQEIDNSNKTVGTYIYEHLLLDPKQKIKGKLVRTIERKFYKQELEQILKKQSEFHSELMDGNLLSDSARELYKNNLSQQQIISAKDFVHLFLNDIIFYQRPLRSQKNLISNCTLESRKSKDGVVFPIKVIAKSNPYFQEFRLLQWLQNLAIYTKEDDKNVTQNFLDSLEKWEALLNWLKTKKEIKQDALIRYLLEAQGFKSKALTAEMAKYRWNYVQNKDYPAFETRHLIQSRLDKVEGVPVGFLNAEMEMKLWHLIFSVTDKLEYEKALKKFASKYKLDEVSFVEAFKKVPPFKSEYGSYSEKAIKNLLTLMRFGSDWSFENINKNAKNRIEKILTGEYDEKIKNRVREFVEKRGIQAEFDFQNLPLWLAQYIVYDRHSEAAIVGKWQSVEELNQFVNDFKQHSLRNPIVEQVITETLRVVRDIWTKYGNGAKDFFSEIHIELGREMKNTSDERKRLTSIVTDNENTNLRIKALLAELATDSSVENVRPYSPVQQDILKIYEEGALNAVENIEEDILKISKTAQPSNSDLKRYKLWLEQKYKSPYTGQIIPLNKLFTHEYEIEHIIPQSRYFDDSLSNKVICEAAVNKLKDNQIGFAFVKKHHGEMVSLGNGKTVKVFEVEDYEEFVKQHYAKNRTKRNKLLMEDIPEQMIERQLNDTRYISKYISQLLSNIVRDDSPESSDDGVNSKNVLPGNGKITTKLKQDWGLNDVWNDLILPRFERMNELTSSSDYTSKNTNGKLIPTVPLEQSKGFSKKRIDHRHHAMDALVIACATRDHINLLNNEAAKSNTKRFDLQHKLRKQESYINSEGKEQKAFKNFYKPWKSFTEDSKKALENTVVSFKQNTRVINKATNYYESYNDEDGNLRLDKNGQPSKALVAQKGTNWAVRKALHKETVSGKIQLDRIKVAKDKILTATRKSLDSSFNEKTILSITDTGIQKILLNYLKFKSNNPEIAFSPEGIDELNSNIAQFNDGKKHQPILKVRVFEQGSKFVLGETGNKTKKFVEAAKGTNLFFAIYQDTTNKRFYETIPLNVVIERQKQGLNSAPETNDKGHSLLMTLSPNDLVYVPDERDVIKADNVYKMVSSTGSECHFVKSNISTLIKNYDAKSKIGELGSLNKLEVTNDARFRIKEVCIKLKVDRLGNISKA

SEQ ID NO: 5568 - protein, 1032 aa, synthetic construct
  REGION 1..1032: note = Synthetic
MKTILGLDLGTNSIGWALIERNIEEKYGKIIGMGSRIIPMSQDILGKFDAGQSISQTAERTGFRSTRKLYQRDNLRRERLHRVLNILGFLPTHYANAIDFEKRLGQFKENQEPKLPYAKNEEDKFEFIFKSSFEEMVADFRKQQPQLFYTKPNGKESQIPYDWTIYYLRKKALNQKLSKEELAWLLLHFNQKRGYYQLRGEDEQADESKSIKFYALKVVKVEEDGKDKKGDTWYNVHLENGWVYRRTSKNFLDWEGKVREFIVTEKLNEDGTIKVDKEGKEDRSFKAVNSEEDWIAIKKSTEDKINHSEKTVGAYIYDTLLQEPNQKIRGKLIRTIERKFYKDELIKILKKQIELQPEIFTKALYKACIEELYTHNEAHRKSISDRGFVYLFVDDIIFYQRPLKSKKSLIAKCSLEERSFVVEENGKREEKIEGIKCIAKTNPIYQEFRVLQWMYNLKIYEKFDNKDVTSLFISSIEDKENLFEFLMNQKEVNHKHILDYFVTQKVKNEFPNAKPKAFKEEVKRQMALYRWNYVYDEVKDESKTYPMNETGYEIRKRFEKVTNLPVDFYTKEKEYYLWHLIYSVTDKLDFEKALKKYAIKYGLDIESFVESFKNIKPYPSEYGGFSEKAIKKLLPLMRFGKFWDFNQISKAIQSRIQFIINGEFSEDIPLNVREQVFKFQLNKEADFQGLPLWLAQYVVYNRHSESSDLQKWTSVEDLQEFLKNFRQHSLRNPIVEQIVTETLRVVRDVWQSYGNGEKDFFSEIHIEMGRELKKTAEERNDETKKNNKNEATNLRLKALLMEMANDPKVENVRPYSPSQLEILKIYEEGVLGLFSEDELKKEGDKKDEIYIISKKSEPTKSELQRYKLWLEQKYQSPYTGEIIPLNKLFTDNYQIEHIIPQSKFFDDSFSNKVICESAVNGLKDNQLGFEFIKNHHGEKIQIGDKIVTIFSEEQYKDFVSKTYANNRVKREKLLMEEIPEKIKGVKMKCTITHKPKKPEKALKIRELQPKKPENGNKTKCTTITINYYLITI

SEQ ID NO: 5569 - protein, 980 aa, synthetic construct
  REGION 1..980: note = Synthetic
MLSDFRSHQPDLFYTKRNGEESKIPYDWTIYYLRKKALSQKISKEELAWIILNFNQKRGYYQLRGEEEVENPNKEVTYYSLMVTEVTAEAPNKKGEIWYSIQLENGWVYRRTSKIPLDNWRGKSRDFIVTTELEEDGSVKRDKEGKEKRSFRAPDENDWNLLKKKTEQDINTSQKTVGTYIYDHLLQNPNEKIKGKLVRTIERKYYKEELKAILEKQVALQPELFTDQLFADCIRELYSKNEAQQRNLAARDFVHLFVEDIIFYQRPLRSQKSTIANCSLESRSYIDKDSHTRKEVSLKVCPKSNPYYQEFRVLQWLQNLKIYEIESDREVTHELIKTLEDKQQLFDFLMAQKEIDCEELLKYFLSLTYPNAKEKALKSELKKWKDTYRWNYVYDIGEKSSKKYPMNETRYDLKRYLERVANLPDDFLSSEVEYMLWHLIYSVTDKVAYEKGLKKFAQKHHLDEDSFVESFKKFKPYPSEYGSFSEKAIRKLLPLMRFGSYWDFNHIDKNTQKRIEDLITGVENEEIRTILREKAEKYQLEKETDFQNLPLWLAQYIAYNRHAEASSLEKWTSVNDLETYLNEFKQHSLRNPIVEQVITETLRVVRDIWQQYGQGKADFFDEIHIELGRELKKTAKEREELSKQNQKNEDTNLRIKALLAELGEDSTIENVRPYSLMQQELLKLYEEGVFSSSMEIEDDIEKIHKKATPNKAELQRYKLWLEQKYKSPYTGQIISLKRLFTEDYEIEHIIPQSRYYDDSLSNKVICESAVNKLKGNQLGLEFIKNHYGEKVHAAGKEVSIFTEEQYKEFVKNHYANNSGKMKKLLLENIPEKMVARQMNDTRYISKYISEILSKIVRADERDEGVNSKNVILCTGKITTALKQDWGINDVWNDLILPRFERMNDLTQTSLFTSYNEKYQKYLPTVPMEYSNGFQKKRIDHRHHAMDAIIIACATREHINYINNQHALEKGKTKKKNKSLV

SEQ ID NO: 5570 - protein, 974 aa, synthetic construct
  REGION 1..974: note = Synthetic
MKHILGLDLGTNSIGWAVINAIKEENTQKEQLIGINTAGSRIIPMDAAQLGDFNKGNTVSQTANRTQFRGVRRLYERKKLRRERLHRILQLLGFLPKHYASQLDRYGKFIANSEPKLAWTTNTHEPSYFIFQSSFQEMLNDFLQNNNQVKKVPYDWTLFYLRKKALTQKIEKEELAWILLNFNQKRGYYQLREEETEKASSKTRQYFDSQIVTDITDTGQIYKGLKIFTITLENGEKGKFFSKNMPDWKGQKKDIIAIIDLDKNGNDKYDENGELSRRFKIPTEQEWEEQWELIKTKTQKDLDTSHKTVGAYIYDTLLQTPSQKIRGKLIRTIERKYYKDELNQILKKQEEFHPELRDSNLLEACIEELYPNNEAHRNAIAKYSISQLLIEDILFYQRPFKSKKSLISNCPYEEYTYTNKETGEICTSSLKCIAKSHPLFQEFRLWQFISNLRIYQKEGTINGKFTTDIDVTNQFLKTEDDYANLFDWLNQKKEIRQDTFLKKPAFGLKKNIANYRWNYVEDKTYPCNETHYKILSYWEKAGIEQSALTSEIEEKLWHILYSISDKNELRKALQHFADKNYLSDKFADTFQQIPPFEKDYGSYSAKAIKKLLPLMRIGRYWKAENFDSTTLDRIEKILTGEFEENIKNRTREKTIHLDNLYSFQGLPTWLACYIVYNRHSEIKDVTKWQQPSDIDAFLNAFKQHSLHNPIVEQIIMETLRTVRDIWKQTGHIDEIHVELGREMKNPAEKRRKLTQQIQENENTNLRIKALLTEFANPEFGIENVRPHSPSQQDLLRIYEEEVLNETKDIPEDIAVILKKFNEIDTKKRPSTSDVLRYKCWLEQKYRSPYTGAMIPLGKLFTPAYEIEHVIPQSRYFDDSFTNKVICEAEVNKLKGNMLGYEFIKNNQERIVELGFGQNVKIQTVEAYELFVKEHYSYNRTKMQKLLMEDIPNQFIERQLNDSRYISNVYKIIII

SEQ ID NO: 5571 - protein, 964 aa, synthetic construct
  REGION 1..964: note = Synthetic
LSYWEKAGIEQSALTSEIEEKLWHILYSISDKNELRKALQHFADKNYLSDKFADTFQQIPPFEKDYGSYSAKAIKKLLPLMRIGRYWKAENFDSTTLDRIEKILTGEFEENIKNRTREKTIHLDNLYSFQGLPTWLACYIVYNRHSEIKDVTKWQQPSDIDAFLNAFKQHSLHNPIVEQIIMETLRTVRDIWKQTGHIDEIHVELGREMKNPAEKRRKLTQQIQENENTNLRIKALLTEFANPEFGIENVRPHSPSQQDLLRIYEEEVLNETKDIPEDIAVILKKFNEIDTKKRPSTSDVLRYKCWLEQKYRSPYTGAMIPLGKLFTPAYEIEHVIPQSRYFDDSFTNKVICEAEVNKLKGNMLGYEFIKNNQERIVELGFGQNVKIQTVEAYELFVKEHYSYNRTKMQKLLMEDIPNQFIERQLNDSRYISKFIKSLLSNIVREEGEEEATSKNVIVCTGSITYRLKKDWGLNDVWNKIILPRFMRLNEITESNRFTTTNACNKTIPAMPLDLQKGFNKKRIDHRHHAMDAIVIACANRNIVNYLNNESASKNAKISRQDLRQILCKKTKTDNLGNYQWLIDKPWDTFTQDVYSILGNIIVSFKQNLRIINKTTNHYIHYENGKKVSCSQKQGDSWAIRKPMHKETVYGEINLRRTTTATLKAVLENPQRIIEKDLKKKIKELLTQGLNEKQIKKYFEDNKDIWQEINLKKIPVYYFTKETANRFFACRESINTTFNKKKIEEKVADTGIQQILLRHLEQNGNNPEQAFSPEGIEQMNKNITSLNNGKFHQPIYKVRTYEQADKFAVGQTGNKSTKFVEAAKGTNLFFAIYETAHKRNFASIPLNVVIERLKKGLPPAPENEKGNLPKFILSPNDLVYVPIKEEIENGHINQPIQKDRIYKMVSCTGNQCFFIKSNVANTIIDKYEFSPLNKMERAITGEMIKETCIPIKTDRLGNIITSISL

SEQ ID NO: 5572 - protein, 1513 aa, synthetic construct
  REGION 1..1513: note = Synthetic
MKKILGLDLGTNSIGWALVDAENNKIEGLGSRIIPSDAEILSRFNSGLPLSKANAGQAFTPTGKRTDYRGIRRIRERHLLRRERLHRILNILGFLPEHYAKEIDFAKHYGQFVDESEPKLTYNNRNFIFTKSFEEMLIDFKQSQPHLFYKRSNGKETKIPYDWTIYYLRKKALNQKIAKEELAWIILNFNQKRGYYQLRGEEEEENPNKLIEFHSLKIIDVVSDEKPNNKGEVWYSLHLENGWIYRHSSKTPLFDWKDKVRDFIVTTDLNDDGSIKTDKDGNEKRSFRAPSEDDWTLLKKKTEQEINKSDKTVGAYIYENLLQNPSQKIRGKLVRTIERKFYKDELKAILKKQIELQPELFTDELYNDCIRELYRNNIAQQLILSKRDFIHLFVEDIIFYQRPLRSQKSTIGNCSLEFHEYKIHKLDEIGNKLKDENGKYVFEKDTNGNDIKKKKYLKVSPKSHPLYQEFRVWQWLSTLKIYRKDDDTDVTTEFLKNTDDVINLFEFLMTQKEVGHKDILKYMLVPILKEKYPGAKAAAFNKEVEKEIAKYRWNYVFDDLKEKEEDKSKKYPCNTTGYEIRKRLEKVENVPNDFLTTEVEQHLWHIIYSVTDKKEYETALRSFANKYKLDENSFVEEFRKFPPFPSEYGAYSIKAINRLLPLMRRGKYWNWDAIDNKTQDRIGKIISAEYDENIKSRVREKAISLTNNDNFQGLPMWLASYIVYDRHSEAEIAGKWTTVSELEQYLEDFKQHSLRNPIVEQVIAETLRVVRDIWKQYGQGLKDFFSEIHIELGREMKNTAEDRKKLTDHITSNEATNLRIKALLAELKENSDGTLPVENVRPYSPIQQDALRIYEDGVLSSNIDLPEDIVKISKTSQPTKAELQRYKLWLEQKYRSPYTGQMIPLGRLFTEDYQIEHIIPKARYFDDSFNNKVICESAVNQLKNKQLGWEFIKNHHGEKVVCGKGKVVEILSEDAYQTFVQEHYSKNKTKRQNLLLEDIPDKMIARQMNDTRYISKFISSLLSNIVRTDKEDDGINSKNLIPGNGKITSVLKKDWGMDAVWNDLILPRFERMNQLTNTNAFTYWNEQHQKFLPVDYSPVDSKKIEKKRIDHRHHAMDALVIACMTRDHVNLLNNQSAKSEITRYDLQNKLRNKSKESWIDQKTGKQIERDVFKEFKKPWDNFTVDAKNALETVVVSFKQNLRVINKATNNYQKWTEKNGVMVKETVKQEGTNWAIRKPMHKETVSGKVILNHIKVPKGKILTATRKSLDTSFDIKTIESITDTGIQKILKTYLEQKDNNPNLAFSAEGIEDMNKNIKQYNDGKFHQPIRKVRIFEPGSKFSLGENGNKKDKYVEAAKGTNLYFAIYEKEDGKRTFETIPLNIVIERLKQDMKEVPELNEKGEKLLYYLSPNDLVYVPTEDEMLNLQSLTITQQNSEQIRRIYKMVSSTGNECHFVNHHIASLIKPYDAKSKTGELGSLNKLETSFEGLRIKEVCIKLKIDRLGNILISNKVYQ

SEQ ID NO: 5573 - protein, 1451 aa, synthetic construct
  REGION 1..1451: note = Synthetic
MKKILGLDLGTNSIGWSLIEQDFDEKEGGILGMGSRIIPMDQGVLGKFDSGNSISQTAERTDYRGMRRLNERYLLRRQRLHRVLNILGFLPTHYAEAIDFHNKLGQFLPGKEVKFNYQLNGGPKHQFIFQKSFEEMAEEFKAKHPDLKIPYDWTLYYLRKKALSEKISKEELAWVILNFNQKRGYYQLRGEDEETDKNQEYVSLQVKELIDTGEAVKGKPLYKVIFVNGWEYDRDITKTEDWENQEREFIVTTKTNKDGSTKRTFKKVDSELDWIAIKQKTQQNIDESKKTVGQYIYGSLLEKPNQKIRGNLVKTIDRKYYKKELSKILEIQKKFHPELQNNDLYQKCLNELYPRNEAHQANIKSNDFTYLFIEDIIFYQRPLKTKKSTISNCAYEKRYFKKDDELVEKPLKSIPKSNPLYQEFRLWQFIQNLRIYKKITDGEGKTKIDEDITKALLPDTSSIVDLFDFLNDRKEIDQNQLIKYFSDLKLIPKQKKDSSLFRWNYVEDKKYPCNTTRAEFLSRIKKIKEVSKDFFDQKNEKELWHIVYSVKDKKDFEKALETFAEKKQIPQEEFIENFKKIPPYPNDYGAYSEKSIKKLLPLMRMGKYWTDDSINTEIKNRINDILERLEAINFDKEKIETVADDAYKKQVLKSFLKFKDKENPLEGLNTYQACYAVYERHSEISEIINWKTPADIDSYLNEIFKQHQLRNPIVEQVVTETLRVVRDIWKHYGNSEKDFFSEIHLELGREMKNSAEKRQRLSRQNTDRENTNQRIKAILEELQNEGIEAIKPYSPNQQEILKLYEEGVYCNAKYDQVSEDEIEAIRKKNAPTKKDILRYKLWLEQGYRSPYTGNIIPMSKLFTTDYQIEHIIPQSRFFDDSFNNKVICESAINPYPYKDNQLAYEFINNSRGCVVPELANNGKECTIFTLEEYEDHCKSYFRKNRTKLKYLLSEDIPEGFVNRQLNDSRYISKFIKGLLSNILREPNEREATVKNLIPVNGAITSQLKQDWGLNDKWNEIIAPRFKRMNEVTQSDDYGYWDKKINAFRTQVPKEIEPGFSKKRIDHRHHALDALVIACTTKDHINYITSINTERKNHSLVKKLRQTKEIELGGKKRTVAKSYKKPWKGFTIDAKNALEEIVISFKKNIRVINRSNNKTWYWEKKNGQWKKSLQLQKGKNFAIRKPLHKETVSGLIDIPTPKGKVATATRINISDIKNHKHIDKITDNSIQKILRNHVKNYLDEKGKEDFEEAFSPKGIAELNKNIKTLNNGKDHQPIYKVRQYEVGSKFSVGESGNKTDKYVEAAKGTNLYFAVYWDEKKQKRNFETIPLNEVVEHQKQMAHIPMKDKEPIPIDHTKGNLLFYLSPNDLVYVPIGKDLESDIGPEKLVKENIFKIVSFTNTRLYALPNTVAISIKNKIEFNQLNKIEFTSEKLSCWKLDVDRLGNMKKLIK

SEQ ID NO: 5574 - protein, 1508 aa, synthetic construct
  REGION 1..1508: note = Synthetic
MKRILGLDLGTNSIGSALVEGIVTDNGKEELSNIRYCGSRIISMDAAKLGDFERGNSVSQTADRTKYRSTRHLYERSKLRRERLHRVLDLMGFLPAHYSNSLTRYGKFRDDVECKLPWVKDDTGVYHFLFEESFQEMLADFSKHQPQLVCDDKKVPYDWTIYYLRKKALSEKITKEELAWVLLNFNQKRGYYQLREEESDVRSDNKSEKYHSLKVVKVEALDEKKGKAIKYNVEFENGMIWSRFSNVPLDWKGKIKDIIVTTTLDKDGNPKKNKDGEIICSFRNPDENDWSLLKIRTEDEIKNSQETVGAYIYDTLLKNRHQKIRGKLVHTIERKFYKEELNKILESQKRFHEELNDRQLFLNCLEELYPNNEGHRNVRSGKGLAEFLVDDILFYQRPLKSKKSLISDCPYEFHTCIDKATGEKKRVGIKCISSSHPLFQEFRLWQFVSNLRIYQKEKRVNGKLEQDVDVTSEFIKSDEDKALLFEWLNDKRNINQKAFLKYKGFGLGKHAEEYRWNYVEDDTKKYPCNDTRALLLDYLAKANVPSSFLTKEKELALWHLLYSIEDKQELEKALGTFAQREGFDEDSFVDVFKKFPAFKKDYGAYSAKAISKLLSLMRCGKYWSEDAIDENTRLRIQHIIDGECDESIRNRVREKTMHLTDISCFKSLPLWLACYVVYDRHSEAKEVTKWNSPEDIDKYLHEFKQHSLRNPIVEQVLTETLRVVRDVWKQYGTIDEIHIELGREMNGTADKKKKWSEQSIKNENTNLRVKALLMDFMNPEFEVENVRPYSPSQQELLRIYEDGVFDSVGDDVPEDISGILKKFAQTDVNKKPSRTEVLRYKLWLDQKYVSPYTGEPIPLGKLFTSAYEIEHVIPQSLYFDDSFNNKVICEAEVNKRKSNQLGYEFIKNHHGEKIELSFGRTVTVLSVEGYEQLLKNCFSHNHAKRRNLLLEDVPEKFIQRQMNDTRYVSREIMRLLSNIVRDEDEQDSKSKHVIPCNGGITDYLKKDWGLNDVWNSIILPRFERLNRLTGKEQFTSRNTNNKLIPDMPLDLQKGFKKKRIDHRHHAMDAIVIACANINIVNYLNNSSACHDAKTSRYDLRKLLCHKCKSDADGNSNWVIDKPWPTFTQDVQEAIQQIVVSFKQNLRVINRTSNYYQHYDSEGKKEYVPQTNGDSWAIRKPLHKETLYGEVNLRKVKEVSLAEAIKSVQNVRNKDLKKRLGLMLHQGYDLKQMKRYFEDNKDVWQDINLSKIEIYYFTQNTNDRYFASRASVDTTFNRKKIEEKITDTGIQKIMIRHLESKEENPELAFSPDGIDEMNQNIIALNNGAFHHPIYKVRVYEKAEKFAVGKKGNKGSKFVEAAKGTNLFFAIYEEEKTDEATGEVKRVRSYATIPLNVAIERQKQGLSSAPDKDGIPAKYVLSPNDLVYVPTQDELEKGIVMSNIDKDRIYKMVSSSGPQCFFVKANVAKSIVDKFEFSPLNKMERALSSEMIKEICVPLKVDRLGNISID

SEQ ID NO: 5575 - protein, 1478 aa, synthetic construct
  REGION 1..1478: note = Synthetic
MKQILGLDLGTNSIGWALVKNDFEKKEGTIDGLGVRIIPMSQDILGKFDAGQSHSQTAERTNYRGVRRLYQRDNLRRERLHRVLNILGFLPKHYANSIDFEKKLGQFKNGLEPKLAYKVDEKSKYNFIFQSSFNEMLDDFKAQWPNLKIPYDWTIYFLRKKALSKKVSKEELAWIILNFNQKRGYYQLRGEEVDDKDKQFVQLKVKEVVDTGETIKGKSLFDVIFENGWKYDKQIVKTEDWINRTKEFIVTTKTLKNGDIKRTYKAVDSEKDWAAIKAKTEQDIERTNKTVGEFIYKNLLDKPNQKIRGKLIKTIERKFYKEEFKKILVKQIELQPQLFTTDLYKACIKELYPRNEAHQNAIKNRDFVYLFMDDIIFYQRPLKSQKSNISGCQLEQRVYFKTNNDKEKTEVKEAIKAIPKSHPLFQEFRNWQWLQNLKIYNKVDTDKGELTDVTEQLLPNEDSWVDLFDFLQSKKELEQNQFIKYFIDKKLINKTEKDHFRWNYVEDKKYPFAETRAQFISRLTKVEGVSDINIFLDKKTQLGNKENSPLVSRIEQLWHIIYSVSDINEYKSALEKFAIKHHLNQESFVANFIKFPPFKSDYGSYSKKALNKLLPLMRRGKYWNESDITNKVKQRVSEIMERVNALNLKEDYNSRNLAEALANVSDDDVKKQLVKSFIPFTNKNPLQGLNTYQATYLVYGRHSEIGEIQNWKTPEDIEIYLKNFKQHSLRNPIVEQVVTETLRVVRDIWKHHGKSQPNFFNEIHVELGREMKNPAGKREQISKRNNENENTNHRIREVLKVLMNDSSIEGNVRDYSPSQQDILKIYEEGIYQNPKVDYSKVSEDEISKIRRNNSPTQKEIQRYRLWLEQGYISPYTGKPIPLSKLFTHEYQIEHIIPQSRFYDNSLSNKIICESAVNEDKDNKTAFEYLKNKGGNVINGHKLLSLSEYEDHVNQYFKTNRQKLKNLLSLDIPEGFINRQMNDSRYISKLIKGLLSNIVREDDEQEATSKNLIPVTGAVTSKLKNDWGLNDKWNELILPRFERLNQLTQSNDFTATNTNGNTIPTVPDNLLKGFSKKRIDHRHHALDALVVACCTRNHSHYLSALNTEKKNYGLRDKLLIKNKQGDYTKAFQMPWQNFSTEAKNQLEQTVISFKQNLRVINKANNKFWSYTDENGKLNLDKNGKPIKKLRKQTKGNNWAIRKAMHKETVSGKYNIETPKGKIATAVRGSLSDIKNEKHLAKITDQQIREVILPNHLKNYLDEKGKIKYDVAFSDEGIEDLNKNIIALNNGKNHQPIRKVKFFEIGSKFSISENENSAKNKKYVEAAKGTNLFFAIYWDEKKQKRNYETIPLNEVIAHQKQVAHLPKSERLAIQPNSKKGAFLFTLSPNDLVYVPTDEELTNKYAIDFCNLNQEQIKRIYKMVSSSGNQCFFVKGEVATSIWNKKEYSALNKMEKDIEGNMIKERCVKLKVDRVGNISKA

SEQ ID NO: 5576 - protein, 784 aa, synthetic construct
  REGION 1..784: note = Synthetic
METLRTVRDIWKQIGHIDEIHVELGREMKNPADKRKKLTRQIQENENTNLRIKALLTEFANPEFEIENVRPHSPSQQDLLRIYEEEVLNESAKNMPEDIVTILKKFNETDAKKRPSTSDVLRYKCWLEQKYRSPYTGAMIPLGKLFTPAYEIEHVIPKSRYFDDSFTNKVICETAVNKLKDNMLGYEFIKNHSGQIIELGFGQKIQIQTVEAYEQFVKEHYSYNPVKMKKLLMEDIPEQFIQRQLNDSRYISKFIKSLLSNIVREEGESEATSKNIIVCNGSITDRLKKDWGVNDVWNKIILPRFLRLNEITNSDHFTTTNTNNKIIPTMPLALQKGFNKKRIDHRHHTMDAIVIACANRNIVNYLNNESASKNAKISRMDLRQILCKKTEPDALGNYQWIINKPWETFTQDVYAVLANIIISFKQNLRIINKTTNHYFRYQNGKKVQCVQEKGDNWAIRKPMHRETFYGEINLRKVNTVSLKVALENPQRIVEKDLKKKIKELLQQGLSEKQIKKYFEENNDIWQDVNLKKIQFYSFTKERKERFFASRESIDTSFNQKKIEKQVSDTGIQQILLRHLRQNNNDPNLAFSPEGIEWMNKNIISLNNGKWHQPIYKVRIYKQATKFAIGQTGNKTTQFVEAAQNTNLFFAIYETEHNRSFASVPLNVVIERLKKGLPPTPEDSKGNPPKYVLSPNDLVYVPTKEEMENRHINQPIQKDRIYKMVSCTEGECHFIPYFVAKPIIQTIELGSNNKAQKSWQDEMIKETCIPIKTDRLGNIITLISL

SEQ ID NO: 5577 - protein, 1476 aa, synthetic construct
  REGION 1..1476: note = Synthetic
MSKKVLGLDLGTNSIGWALVNYIESIRENQFQPSNIIDIGSRIIPMDAAALSDFDNGNLKTQTAERTRYRSVRRLHERYLLRRERLHRVLYILGFLPEHYAKCIDFEKNTGKFLSDSEPKIAYSLNDETDRYEFYFKESFVEMIQDFVKYQPELVKDGKKVPYDWTIYYLRKKALSEQISKEELAWLILHFNQKRGYYQQRGEEEDINEAKEYQKLHVVSVEDSGDKKGDAIWYNVLLENGDTYKKLSRIPLDWIGKTKEFIVTSKVDKDNNEKRTYSIPTDGDWTLIKKRTEKEIEESYKTVGSYIYDTLLANPNQKIKGKLIQTIERRFYRKELNQILNKQREFHPELNNQGLYNLCITDLYKSNNAYRNSIQNKDFVYLFIDDIIFYQRPLKSKKSLIENCQYEYRTYKNPKTGEPEKEYLKCISKSHPLFEEFRLWQFLKNVRIIRRDDSMDVTNLYLPDEDSYVALFDKLKEKKEVVEKSFLSLIKGAKLKDTEYTWNYGDRSLPMCPTHAEFINRLKHLNLDDNFLMPQIEEHLWHILYSVSDKQELEQALKSFALKYEIENLDEFVAELKKIKPFDKDYASYSSKAIKKLLPLMRIGNHWEENTIEKKTKERINKIIDGEYCETINEITREKVKKELGEELSLSLFRGLPLWLACYVVYNRHSEAGETTKWESPEDIDKFLEAFKQHSLRNPVVEQIVTETLRVVRDIWVKHGNLFEIHIELGREMRNPAKKRQEITRRNLENENTNQRIKALLSELKNEGNDVRPESLSQQERLKIYEEGVLGSDIEIPEDIVKITRQKQPTQSEIIRYKCWLEQGYCSPYTGKPIPLGRLFTSEYDIEHIIPQARYYDDSFSNKIICESAVNKDKSSMLACEYIRLQGGKNIQLGNGKQVTVLSFEEYEDFVKRNFKNSSLKKKKLLMDEIPDYFIERQMNDTRYISRYIKGLLSNIVREENEQEATSKNIISVTGVATSKLKEDWGLNDIWNKIVTPRFERLNELTKSNNYGHWVDKQTFRIQVPEANQRGFSKKRIDHRHHAMDALVIACATRSHVNYLNNQSAKLSDKETRYDLKMKLCSKNKQGKWLFDKPWETFTQDTQEALANIIISFKQNQRIINKSTNKYQKYEDGVKKLVSQTSGDNWAIRKPLHKETVYGRVNLQLKKTVTLPIALDNWRMIIDKEIRDKIKLLFDERFDKKQILAYFKKIGNRYNQKDISKIEVYYFSDEKEPLVATRKTLDSSFTVKNINAVTDSGIRQILLRHLEKYQGKTEDAFSPDGIEDMNTNIRFLNNGKFHKPIYKVRVPETLGNKFQVGYRGNKKAKYVEAAQGTNLFFAVYQSGEGKRSFDTIPLNIVIENLKRGENAVPPANEKGDRLLFTLSPNDLVYVPTEEQRESKIGIGDIEKNKNRIYKMVSATGSQCFFIPYYIASAIIPTTELGTNNKAQRAWTGEMIKEICLKIEIGRLGHIVNIAYD

SEQ ID NO: 5578 - protein, 1490 aa, synthetic construct
  REGION 1..1490: note = Synthetic
MKKILGLDLGTNSIGWALIEHNFDKKEGRIDDLGVRIIPMSADILGKFDAGQSHSQTAERTGYRGVRRLYQRDNLRRERLHRVLNILDFLPEHYAEHIDFEKRLGQFKEGKEIKLNYKSNKDSKFEFIFKASYNEMLAAFKKYQPGLFYVKANGTETKIPYDWTIYYLRKKALSQPLTKQELAWIILNFNQKRGYYQLRGEEIDDDKNKQFVQLKVKEVIDSGEAVKGKKLFNVIFENGWKYDKQVVKTEDWIGRTKEFIVTTKTLKSGEIKRTYKAVDSEKDWAAIKAKTEQDIERSNKTVGEFIYEALLQDPTQKIRGKLVKTIERKFYKAELREILRKQIELQPQLFTTKLYNACIKELYPNNEAHRNSIKNRDFLYLFLDDIIFYQRPLKSQKSNISGCHLEQRIYTKINPVSGKKEEVKQAVKAIPKSHPIFQEFRIWQWLQNLKIYDKINTDKGELADVTNQLLPSEESLLDLFDYLQTKKELDQSGFIKYFIDKKLINKSEKENYRWNYVEDKKYPFAETRAQFISRLNKVKNINNISEFLNKKTRLGEKESSPFVTRIEQLWHIIYSVSDINEYKSALEKFALKHDIDKESFVANFIKFPPFKSDYGSYSKKALSKLLPLMRRGKYWNESDISNKVKQRVSDIMERVNALNLKENYNAKELAEALKTVSDDDVKKQLIKSFVPFKDKNPLKGLNTYQATYLVYGRHSEVGDIQSWKTPEDIDTYLKNFKQHSLRNPIVEQVVTETLRVVRDIWIHYGKSQLNFFNEIHVELGREMKNPADKRKQISNRNIENENTNNRIREILKDLKNDTSIEGDIRDYSPSQQDLLKIYEEGVYQNPKVDYSKVSEDEITKIRRSNSPTPKEIQRYRLWLEQGYISPYTGKPIPLSKLFTHEYQIEHIIPQSRYFDNSLSNKIICESAVNEDKDNKTAYEYLKNKSGNVINGHKLLRIEEYEAHVNRYFKNNRQKLKNLLSEDIPEGFINRQLNDSRYISKLIKGLLSNIVRQENEQEATSKNLIPVTGAVTSKLKNDWGLNDKWNELILPRFERLNQLTQTKNFTTSNTNGNTIPTVPDDLLKGFSKKRIDHRHHALDALVVACCTRNHVQYLNALNAEKANYGLRKKLLIVNEQGDFTKIFQMPWKGFTSEAKNQLEKTVISFKQNLRVINKANNKFWSFKDENGNINLDKNGRPVKKLRKQTKGDNWAIRKAMHKETVSGKSNIETPKGKIATAVRGSLADIKNEKHLGKITDVQIREVILPNHLKNYVDEKGKVKFDLAFNDEGIEDLNKNIIALNNGKKHQPIRKVKFFEVGSKFSISENENSAKSKKYVEAAKGTNLFFAVYWDEKKQKRNYETVPLNEVIAHQKQVAHLTNNERLPIQTNRKKGDFLFTLSPNDLVYVPTDAEVANKQPIDFKNLHQNQVNRIYKMVSSSGNQCFFIKDKIATSIWNKNEFSSLNKMEKDIDGNMIKERCIKLNVDRLGNITKA

SEQ ID NO: 5579 - protein, 1529 aa, synthetic construct
  REGION 1..1529: note = Synthetic
MKKILGLDLGTNSIGWALIEKESMENNLLSNGKIIASGSRIIPMSQDVLGKFDSGVSVSQTAERTNYRGIRRLRERHLLRRERLHRVLNILGFLPPHYSKEIDFEKKLGQFLPEKEPKIAYRKVKNKSEFIFEDSFNEMIKDFEKHQPQLLKKDNGDPALIPYDWTIYYLRTKALNKKIGKEELSWILLNFNQKRGYYQLREDQEQENENKISEYFSLKVVNVTADDAKKGKSEIWYSVHLENGWIYRRSSKVSLADWIGKTKEFIVSWELNDDNTIKKDKEGNEKRSFRAVDSEKDWIAIKKSTEERIERSKKTVGNYIYDTLLQKPSQKINGKLVRVIERKFYKKELEKILDKQKEFHQELQDEKIYSKCLEELYEFNESHRNNIIKKDFTHLFLNDIIFYQRPLKSKKSLISNCKFESRIFIKDGIKEISPIKCIAKSHPLFQEFRLWQFLKNLKIIEREKNVDGKLQFDVDVTNEFLKTEDDKVKLFEWLNEKEEIDQKSFLRYPGFKIKKNAEKFRWNYLEDKSYPMNETRSKIQSRLNKVENIPDDFLTKEVELKLWNIFYSIEDKSELKQALKNFANKNSLDDNFTDVFLNFPRFKKEYGSFSFKAIKKILPLMRLGKYWDENNIDPKTKERIQNIISAVEDETIRERVRDNSINLSKIEDFRGLPTWLISYIVYNRHSEDEISSKWKTPNDIELIKQHGIRNPIVEQVINETLMVVRDIWKKYGNSEENFFDEIHIELGREMKNPKDKRERMTKQINENENTNLRLKCLLIELLNDSKIENVRPHSPMQLEILKIYEEGALSSTNGDLPDDILKISKTAYPTSSELMKYKLWMEQKYVSPYTGQVIPLSKLFTRAYDIEHIIPQSRYFDDSFSNKVICESEINIDKGNETAYEYIKSNSGKSIELSQGGIVNLFTTDQYENFVNKFYFNSRGKLKKLLMDDIPESFIQRQLNDSRYISKVMKSLMSNIVKEKDEQESISKNVIVLTGAVTSKLKQDWELNNVWNEIIYPRFERLNELTNSNLFGDWTMKDGKKVFQTQIPIEMEKGFSKKRIDHRHHALDAITIACATRDHVNYLSNESALGKDKKDVKEKRRYDLRNNLCFKKYNDEKKQNYNWIFKKPWESFTEDAGNSISGIIVSFKQNLRVINKTINWYQKWQKNHSGEIKKTFVKQEKGENWAIRKPMHKETVSGLVNLKFTKTVSLSNAISDPETICDIELRTKIKELISEKYDKKQILSFFKELNNVWKDKDISNIDVFYFDDNYVASRKSIDESFNSSKIEQITDTGIQTILKKHLSKFNKEINGKITEQPELAFSADGIEEMNKNIFELNGNVKHKPIYKVRIFEKKNKKFIVGITGNKKDKYVEAATGTNLYFGIYQDENGIRSFETIPFNVIVEHQKQGTESVPLVDNKGNKLLFYLSPDDHVYVPKPEEIEKNFNDIIADLNNFDKNIISDRIYKVVKFTGNQCYFIQTNISSLILPYNSILKKGEFGSQNCSEKTVDNSQMVKHCCVILNFDRLGNLK

SEQ ID NO: 5580 - protein, 1447 aa, synthetic construct
  REGION 1..1447: note = Synthetic
MKRILGLDLGTNSIGWALVDGNNNAIIKAGSRIIPMDARAMSEYETGNLQSAAAARTGFRGTRRLYERAILRRERLLRVLNVLGFLPEHFKQQIDFDKHPGRFIDHCEPLLPYKKTEENKNEFIFMDSFNEMITEFAQKHPQLTENGKRIPYDWTIFYLRKKALYQPIKKEELAWLILNFNTKRGYYQLRGMEDETKTTDGEEYKILQVTSVEKTNEDKKRKGIFWYEITYENGAKQRKSGPVAPRKVGDMVEVIVTTSYDKDGKIKTDKDGNPKISISTPPADEWKLLKKRSEKAIKESGKTVGEYIYEELLANPEIKIKGKLIRVIDRPFYKDEFERILNRQTEFIPELQDRILYEKCVRELYHQNEAHVQSIMDKSFTKLFVDDIIFYQRPLKSKKSEIANCPFEHYHYIDKETGEIVNKPIKCIPKSHPLFQEFRLRQFLQNLKIFKREKVVNGMLKTDVDVTSDYLSTQEDYNALFDWLYEKEEINEKELLRNPLFNIGKNASEYRWNYVEDKSYPCNETHYTINKQLADIGYKQLTLEQEIALWHILYSIDDIIVLRKALTSFAKKNSIDTEPFVKAFEHIEPFDNNYGAYSEKAIKKLLPYMRKGIRLHDACYEVYGRFSEAANTDRWTKPEDIDRYLEYEFKQHSLRNPVVESVLGETMRVVRDIWKTYGEIAEVHVEMGRDLKKSNQERKDSTDRIRKNEQTNLRIRLLLQEFLNPEYKIEGVHPNSPSQQEIFKIYEENALANMGNDDDSEDIQMIADNLGNPTKHVSQSEIMRYRLWLEQKYKSPYTGQPIPLSKLFTSAYEIEHVIPQSRYFDDSLSNKVICESEVNKLKDRMLGYEFITKHGGEIIQGNLGTQIKLLDKVQYEDFVKQHYSGNKGKMKKLLMEDIPDSFIERQLNDSRYIARKTIAILSRLVREENEAEATSKNVIVTTGKITDRLKKEWGVNSVWNDIIAPRFQRLNSLTGTNNYGKFVSRNGKQYFQIDVPLEISRGFSKKRIDHRHHAMDAIVIACTTRNHVNYLNNKAALSSEKDLRYDLQHKLCTKVKTDDRGNYIWQFNKPWETFVQDVRSELSSIIVSFKQNLRVINKMTNFYWHYENGKKVLARQTKGDGWAIRKSLHKAGLSGAVRLQTKKTVKLVDALDCINMIVDKEIRKEIKAVVSNYGKLYEKKTILKYFKDRKYKVGKKDISRIEIYYTPDVADLSAKRVMLDTSFDEKTIKSITDTGIQKILLQHLANNGNDPKIAFTPEGIAYMNAHIKELNNGKDHKPILKVRKTESFGLKFPVGDTGNKTKKFVEADKGTNLFFAIYEDEEGNRSYESIPFNVAVERLKTGEQVAPTINEDGNKLLFVLSPGDLVYVPDEGEHVDEIRNIDNIWKFVSCSTNRSFYIPVSIANTISNGKEYGSLNKVELTDNKISIKGSCLKLQVNRLGIITKIFA

SEQ ID NO: 5581 - protein, 1492 aa, synthetic construct
  REGION 1..1492: note = Synthetic
MKKILGLDLGTNSIGWALVEQDFDAKAGKILGMGSRIIPMSQEVLGNFDVGNSVSQTAERTGFRATRRLHERHLLRRERLHRVLNILGFLPEHYVNQIDFEKRLGQFLDDKEPKIAWKEVWNEQKNKNEFVFIFQNSFNEMLNDFKVNSLEIKIPYDWTIYYLRKKALSQKITKEELAWTILNFNQKRGYYQLRGEEEEENPNKLVEFHSLKIIDVVADEKPNSKGDIWYSLYLENGWVYRRSSKTPLFDWKDKVRDFIVTTDLNDDGTVKTDKEGSEKRFFRAPSEDDWTLLKKKTENDIEKYIQKYKTINGVDGTVGTYIYEALLQNPAQKIRGKLVRTIERKFYKEELIAILKKQIELQPELFTEDLYNDCIRELYRSNKEHQTVLSKRNCFVHLFVNDIIFYQRPLRSQKSSIGNCSLEYRKHKNKDRNEVTEYLKVVSKSNPLYQEFRLWQWLFNLKIFRRDDDTDVTEQFITNVFDKEKLFDFLNNRKEIDQKALLKYFKLTEKTHRWNYVEDKIYPCNETGTQIKTRLSKVENIPADFLTPEIEQKLWHIIYSVTDKNEFEKALKTFANRHHLDEVSFVENFKKFPPFKREYGSFSEKAIKKLLPFMRVGKYWNWEIIDAKTKDRISKILTGEYDETIKNRVREKAIYLGSENDFQGLQLWLAQYIVYDRHSEANITDKWNTVADLEKYLEEFKQHSLRNPIVEQVITETLRVVRDIWKKHGDFSEIHIELGREMKNTADERKRLTNIVTENENTNLRIKALIMELKEYPDVENVRPYSPIQQEILKIYEEYAVNNIEENDTEREFIQKISKTAQPSKSELQRYKLWLEQKYRSPYTGQMIPLGKLFTDEYQIEHIIPQSRYFDDSLNNKVICEAAVNQLKDKCLGLEFIKRFHGQIVDLGLGKSVKIFEEVAYQDFVKQHYAKNYKKRNNLLLEDVPEKMIERQLNDTRYISKFVSQLLSNIVRADKDDDGVNSKNILPGNGKITTTLKQDWGLNDIWNDLILQRFERMNMLTNSTAFTAWNEQYQKFLPTIPLEFSKGFQKKRIDHRHHAMDALVIACATRDHINLLNNQSAKSEVSRYDLQNKLRNKERNETIGKDVFTEFKKPWNNFTVDARNELEKTVVSFKQNLRVINKTANKYQAYKNGKKVFNPQTKGDSWAIRKPLHKDTVFAKILLRKIKTVRLSEALKNWEMIIDKELKKEIKRLINTYGGAFKIDVINKYFKDRKYLFNEVDISKVEIYYFETENAAVRKLLDTSFTEKIIKESVTDSGIQKILLNHLWAKENKPELAFSPEGIEEMNKNIVQLNDGKFHQSINKVRVYEPIGNKFQVGTTGNKKDKYVEAAKGTNLFFAIYEDENGNRSYETIPLNIVIERLKQGLNAVPERNEKEHHLLFQLSPNDLVYVPTEDEKENICAIDWESLDKEQLKRIYKIVSFTNSRLYAISANVATTIVNKVEFTQLNKIEFIDEKKHCVKLNIDRLGNISL

SEQ ID NO: 5582 - protein, 1532 aa, synthetic construct
  REGION 1..1532: note = Synthetic
MKRILGLDLGTNSIGWALINQDFDNKEGEILGMGSRIIPMSQDILGEFGRGNSISQTAERTRLRGVRRIKERHLLRRERLHRVLNVLDFLPAHYASQIDFDRRLGKFKYETEPKLAYRPIHNEELNKTKFDFLFKESFNEMLEDFRQSQPQLLINKNGEPALVPYDWTIYYLRKKALINKISKQELAWIILNFNQKRGYYQLRGEEEEDNPNKKVEFHSLKIVDVIADEAQKGKAEIWYSLMLENGWVYRRSSKTPLFDWKDKVRDFIVTTDLNIDGSLKTDKEGNEKRSFRAPGENDWTLVKKKTEQEIDQSQKTVGAYIYDFLLLKPKQKIKGKLVSTIERKFYKDEFKQILTKQIEFHSELKSEDFYNACIRELYRNNEAHQIILGKKDFVHLFLEDIIFYQRPLKSQKSSIGNCSLEFRPMKDKNGKLLKDENGKQMLKPLKAIPKSNPYYQEFRIWQWIYNLSIYRKEDDGDNLTNEFLSSIEDWEGLFTFLNSRKEIEQKPLMKYLLERKGFKGKLLNAEAEKYRWRYVEDKKYPCNETKTLITTRLDRVEGVEDGFLTRELEQQLWHIIYSVTDKIDFEKALKSFAVKNQLDERSFVESFIKFPPFKSEYGAFSEKAIKKLLPLMRIGESWDWEAVDPKTQERIDKILTGEFDVTIKNRVREKAFNLTQESHFQGLQLWLAQYIVYGRHAEAAEIGKWSSVDDLEKYLQDFRQHSLRNPIVEQVITETMRVVKDIWSKYGNGVKDFFSEIHVELGREMKNTADDRKRITNQVTENENTNLRIKALLAEMLHDASVENVRPYSPMQHEILKIYEEGVLNSDIEIEDDILKISKTPQPSSSDLRRYKLWLEQRYCSPYTGQTIPLNKLFTPSYEIEHIIPQSRYFDDSFNNKVICESAINKVKDNQIGMEFIKNHHGEIVDLGLGKTARIFEVEAYEEFVKQHYAKNRSKRFKLLMEEIPEKMIERQLNDTRYISKFITSLLSNIVRSDSNDDGVNSKNIISVNGRITNELKHDWGLNDVWNELVLPRFERMNTLTNSTQFTSWNKKHQKFLPTVPLELSKGFSKKRLDHRHHAMDALVIACATRDHVNLLNNKHANSSKRFDLNRKLRRYERIIYSHPKTGKRIERDVPKEFIKPWGSLTIDAKYALSRIIVSFKQNLRVINKATNKYEKWVLVDGQKTKQKVEQKGVNWAIRKPMHKDTVSGLVRLRKKKRVSLNQALNTIQDIVDKPLRIELERLKSIGLDKKKISKHFREINNEFQEQSITRVEIFYWENDNVASRVSIDNTFDEKKIESITDTGIQKILLKHLDGYKGDLDKKGENTPASLLAFSPEGIEEMNKNILLLNRGKPHQPILKVRTYETKGNKFAVGQKGNKSYKFVEAAKGTNLYFAVYQDENGNRAYETVPLNIVIERQKQGLTSVPERNENDDLLLFYLSPNDLIYLSTPEKKGLSVGINKSFSENILPSEIYRVVSFTGKRLYAIPFSVSKAIVDKVEFTQLNKMESTLDGKSIKENCIKISADRIGFIIR

SEQ ID NO: 5583 - protein, 1510 aa, synthetic construct
  REGION 1..1510: note = Synthetic
MKKILGLDLGTNSIGWAVINSKLNTNGKEELVGISSSGSRIIPMDAATLSDFDKGNSKSQTAERTRLRGIRRLLERNLLRRERLLRVLACINFLPDHFAACIDRNGKFIADTEPKLAWKNDLESGYTFLFQESFQEMLDDFRMNQPNWLTEGKKIPYDWTLYYLRKKALSQKISKEELAWILLNFNQKRGYYQLRGEEEEEDVRKIVKYYALKVISVEDSGEHKGKDVWYNVHLENGWIYRRASNTPLDWVGQIKEFVVTTELDDAGNPKVNKDGEIKRSFRAPKDDDWGLLKAKTQESIDESGKTVGAYIYDSLLQNPFQKIKGKLVRTIERKYYKEEVYAILEAQKHFHPELNDKSLLVACVEELYPNNEPHRNILLAHDLTYLLVEDVLFYQRPLKSKKALIDNCPYEERIFRKKDGTLCHEPVKCAAKSHPRFQEFRLWQFITNLRIYQREKEVNGSLKTDVDVTAAFLPDEQSYEQLYEWLNTRKEIDQKSLLAYKPFKLGKKEQVAYRWNYVEDKTYPCNETRSALVSRLKKAGIDEGFLSRENEEWLWHILYSISDKQELKSALNTFAQKNALNEQFIEVFSKMPPFESSYAAYSLKAINKLLPLMRMGKYWKEEEIALETRARIEKILTGEYDETIRNRVREKTIHLSTLSSFRALPLWLACYIVYDRHSEIKEIEKWTTPQDIDNYLKSFRQHSLRNPIVEQVLTETLRVVRDIWKQEGKIDEIHVELGREMKKTSKERAKLTAQTIENEYTNLRIKALLTEFINPDFEIENVRPYSPSQQEILRIYEEGALSSVSEKEIPEDIVAILKKFREGDVRKRPSHSEVLRYKLWLEQRYRSPYTGQVIPLAKLFTSAYEIEHIIPQSRYFDDSYTNKVICESAVNKLKDNLLGYEFIKKHHGEKVPLGNGKSVQIFSVGEYEQFVKDFYNSNSQKMKKLLLEDIPDSFIERQLNDSRYISKLIKGLLSNIVRTEDEQEAISKNVIVCTGGVTDRLKKDWGVQDVWNRIILPRFIRLNQLEDTEIFTSVSASGHVIPSMPLHMQRGFNKKRIDHRHHAMDAIVIACASRNIVNYLNNSSARRGAELSRYDLRCLLCDKVKTDENSNYKWMIRKPWESFTRDVYTTLADMVVSFKQNLRVVNRTTNYFTHYDLEGKKRSVPQTKGDRWAIRKPMHKDTVFGEVNLRKEKTVSLKEALNNPVRIIDKRLKRKILELLQAENDLKAINKYFEANATEWPGLNLKKIKVYYFTKETNDHFFATRKPLDTSFNQKKIEEEVTDTGIQKILLNHLLKNGNNPEIAFSPEGIERMNQKITDLNDGREHQPIYKVRVYEKAEKFAVGETGNKRFKFVEAAKGTNLFFAVYEATQQDITSGRAMRKRSFSSIPLNNVISRQKKGLPPAPEDRNGDKLLFVLSPNDLVYLPTDEEIRDGHIIAPINKERIYKMVSCTGNRAFFVPFAVASVIVDKLEFTSQNKIELFNDKISIKEICIPLMVDRLGNVKYNNLII

SEQ ID NO: 5584 - protein, 1519 aa, synthetic construct
  REGION 1..1519: note = Synthetic
MKNIVGLDLGTNSIGWAVVNGSVNDDGSEQLVKIQASGSRIIPMDAAMIGDFNKGNSISQTAERTRLRGVRRLSERYLLRRERLHRILDILGFLPFHFAQDLDRHGKIVKGKEPKLAWRKNEAGQFEFIFQDSFKEMLEDFKLNHPNLITDDKKVPYDWTIYYLRKKGLTSKISKEELAWILLNFNQKRGYYQLRGEEEEENKNKLVEFYALKVVAVEDSGEKKGKDIWYNVHLENGWVYRRTSNMPLDWVGKTKEFIVTTDLEKDGTPKKDKEGNVKRSFRAPKEDDWSLVKKKTEADIDQTHKTVGAYIYDTLLGNPSQKIRGRLVRTIERKYYKEELKQILEKQKEFHLELQDRALYAACIEELYPINEAHRNNVGNRDFTYLFLEDILFYQRPLKSKKSLIDNCPYEENQGLDKETGEIKSFPVKCIAKSHPLFQEFRLWQFIINLRIYRKDLAQDVDVTNELLKTEEDYLSLIHISEPIALFDWLNGKKEIDQKAFLKYPLFGLKKEIENYRWNYVQDKPYPCNETRSLMLARLEKCDISIEFLTKENEEALWHILYSVEDKNEIVKALQKFADKHDLNASFVDVFQKFPPFKKEYGSYSAKAIKKLLPLMRMGKYWSENSIDKGTRERIDKIITGEYDEKIENRVREKAIHLADVSDFKGLPLWLVCYIVYGRHSEAKEITQWKSPADIDSYLRSFKQHSLRNPIVEQIIIETLRVVRDIWKQVGNIDEIHVELGREMKNPADKRKKMTQQMSENENTNLRIKYLLTEFLNPEYEVENVRPYSPSQQDILRIYEEGVLNSVSDLPEEISDILKKFTETDLKKRPSRSEILRYKLWLEQKYRSPYTGEVIPLGKLFTPAYEIEHVIPQSCYFDDSFSNKVICEAEVNKLKSNLLGHEFIVKHHGEIVELPFGKKVRIFTVDEYEQFVKDNYSRTRSKMKKLLMDDIPEEFVTRQLNDSRYISKVVKSLLSNIVREKGEEEAISKNVIPCTGGVTDRLKKDWGINEVWNKIILPRFQRLNELTGTNKFTTKNVGIQEIPTMPLELQKGFNKKRIDHRHHAMDAIIIACANRNIINYLNNESATAKAELSRYDLQKMLCDKAKTDNNGNYKWVIRKPWASFTQDTYLALENIIVSFKQNLRVINKATNRFLHYNEEGKKIFVKQGKGDNWAIRKSMHKDTVFGEVNLRRIKTVALNEAMKNPQSIVVKDFKRKLLELWNLGFDAKRIKKYFEDNRETWSDINLSKIEVYYFSKDTKDRFFATRKPLDTSFDRKKIENNITDTGIQKILLRHLELKDNNPDIAFSPDGIDEMNRNIIQLNNGKYHQPIIKIRWYEQADKFAVGQTGNKFSKFVEAAKGTNLFFAVYESNILDKKTNTIIKKRNYATIPLNVAIERQKQGLPVAPEDENGNDPIFVLSPNDLVYLPTDDELANGIIAQPLDRGRIYKMVSCTGNEGHFIPARIANPILQTIELGSNNKAQKAWTDEMIKEICMPIKVCIPIKVDRLGNVLESSSSYKK

SEQ ID NO: 5585 - protein, 1566 aa, synthetic construct
  REGION 1..1566: note = Synthetic
MKKILGLDLGTNSIGWAVVNAEEETYDNNKSCLKPVGISSAGSRIIPMSADILGDFDKGNSISQTSERTRLRMVRRLRERNLLRRERLLRTLKTMGFLPEYFALKIDETGKFIDDSEPKLAWGKTKEGNSVFLFQKSFEEMLADFAQHQPQFVADGRKVPYDWTIYYLRKKALTERITKEELAWILLQFNQKRGYYQLRGEEEEEKANETIEIISATILSVERREKDKKYDKYWYEMTLDNGMVYRATFYNDVSDWKGETKDFVLKSTILKDGSTKHDLSFLPTTDEIEGMPPQRKAKMYAKIKLRTEKEIENSKKTVGCYIYDSLLQKPDQKIIGKLVRTVERKFYKDELTRILKVQQELISELQDEALYNKCIEELYPSNEAHHHNMAKPDFVNLFVNDILFYQRPLKSKKSLIDNCPYEFHFDKDGNAHPLKCIAKSNPLFQEFRLWQFVQNLRIYQREKLVSDGQLDLFSSAPTGKLQTDVDVTDEFLKSEEDYVRLFDWLNCRASIKQDTLLNSFFKIKKERGKEKYPYRWNYVEDKEYPCNKTRADILSGLAKSNISPDFLTHEKEMALWHVLYSVEDKIEIGKAIRTFAAKNNLGEDFAEVFSKLKPFEKEYGSYSEKAIRKLLPLMRMGKYWSAGRIDTKTLDRIDKIITGEYDESIKNRVREKAIRLTETTHFKGLPVWLACYIVYDRHSEAKEIEKWEKPEDIDRYLSGFKQHSLRNPIVEQVITETLRVVRDIWKKEGHIDEIHVELGREMKNPADKRRQMTERIQQNENTNLRIKAMLMEFANPDMKIENVRPYSPSQQDILRIYEENALDNLTREDEEYDFVSKVSKMAQPSKSDIVRYKCWLEQKYQSPYTGRMIPLSKLFTSAYEIEHIIPQSRYFDDSFSNKVICEAEVNKLKDRQLGYEFIKNHAGEKVPVSLGEPVEILSVEKYERLVRERYATNRTKMKKLLMDDIPDGFIERQMNDSRYISKVVKSLLSNIVREKLDNGEYEQEAVSKNLISCNGSITDRLKKDWGMNDVWNRIILPRFQRLNQLTGKSCFTTLNREGHEIPSMPIELQKGFSKKRIDHRHHAMDAIVIACATRDHVNLLNNEAAHSKHNANRYQLQRKLRRFETIVVDGKEREVAREFILPWPSFATDAWQTLQNIIVSFKQNLRVINKTTNFYLHYDESGKKKLCKQVKGDSWAVRKSMHKDTVFGEVNLRKKKTVSLNDAIKKPTCIVNKEFKKKVIELLNDGRDAKFIKKYVDENKDVWSDINTAKIEVYYFTKDEKKRNGEPKERYFATRKPLDSSYDQKRIQESVTDTGIQKILLAHLEAKDNNPEQAFSPDGIEEMNRNIVALNNGKFHQPILKVRVYEKADKFAVGQTGNKAKKFVEAAKGTNLFWAILGSEKTNKETGDTEIVRSYLTIPLNVMVDCQKKYGAKWKDNVEAYLKEKELIESETQLLFILSPNDLVYLPTEEDPHNVSIDRQRIYKFVDPNDNKGSFVPYTFANAIFSIKFTDQKKMGLSYLIQNELGIGSQFSKSPRAYTGEMIKEICVPFKVDRLGNVIELNGLKV

SEQ ID NO: 5586 - protein, 1535 aa, synthetic construct
  REGION 1..1535: note = Synthetic
MKNVLGFDLGTNSIGWAVVQEKYNESNILIKQILGAGSRIIPMDAAQLGDFAKGNTISQTKDRTQFRGVRRLRERCLLRRERLLRILDIMGFLPQHFSNALTRYGKFKDADEEPKIAWRKDNEGKMHFLFADSFNEMIEEFRSVQPELLKRGMKVPYDWTLYYLRKKALRETVTPFELAWIILNFNQKRGYYQLRGEEEGEADNNKCEEYLAQKVVDVIDTGEKKGKSTWFDIVLENGMVYHCSAEIKPDWIGKTKEFIVTTQFDKDGNPKKDKKGNIKMSLRMPNENDWNLQKKKAEKDIDESGMTVGEYIYNALLHNPKQKIKGKLVRVVERKYYKNELQKILESQKRFIPQLSDSALYEKCIKELYQSNEAYRNSISTRNDFTYLFVDNIIFYQRPLKSKKSLIDNCPYESLTYTKDGEEHKAPVKCIAKSHPLYQEFRLWQFISNLRIYQRQKQVGDKVKLDVDVTDEFLPTDDRREALFDYLNDKTEIKQDVLLKEFFNMKKPKGKDSVYPYRWNYVEDKSYPCNVTRGKILAKLNKAGVSADFLSSNGNEESLWHILYSVEDKGELRKALARFAAKNGLDNAFTEALADIEPYKKEYGAYSAKALKKLLPLMRLGKYWNYDNIAPATKARISKIIDGEYDDNIRNRVREKAMSLTSASQFQGLPLWLACYIVYDHHSERADSGRWSSPEDIDKYLSDFKQHSLRNPIVEQVVTETLRTVRDIWKKYGEISEIHVELGREMKNPADKRSKMNRRMLENENANMRAKLLLTEFMNPEFGIENVRSYSPSQQELLRIYEDGAISNAGSEIDDEISDIMNRLSQVDVKKQPTASEVKRYILWLEQNYRSPYTGQMIPLAKLFTPAYEIEHVIPQSRYFDDSFSNKVICEAEVNKLKDRMLGYEFIKQHKGEKVSLSMGGTVEILSPEEYVRHVESQYKNNKAKMRKLLMDDIPDEFINRQLNDSRYISKLIISLLSNIVREEGEEEATSKNVISCNGSITDRLKKDWGINDVWNHIILPRFRRLNELTGTDKFTTSNKEGHEVPDMPLELQKGFNKKRIDHRHHAMDAIVIACTTRDHVNLLNNEAAMSKNNANRIQLSKKLRRYESVEIEKDGIRKQISVAKEFKKPWEGFTADVERTLRDIVVSFKQNLRVINKTTNYYQHFKDGKKVYSPQSKGDSWAIRKSMHKETVFGEINLRRIKEVSLKEAMKRTKDIADKELRSKIVELMALQYNEKKIKQYFSDNKDEWSDVNPKKIKIHYFSKETNERFFATRKPLDTSFDKKKIKTQVADTAIQKILLNHLSAHGDKAETAFSPDGIDEMNRNIIELNNGKFHQPILKVRIYVKADKFAVGLQGNKKKKFVEAAKGTNLFFAIYTEEQIDEKTGEVFFKRTYNTIPLKVVIDREKRGLSPAPEDENGASPKYVLSPNDLVYIPTEEERKTNRINLPLDKERIYRFTDGCDNTANFAPANAASLIFSLRKDEAESFCKGDIIIQNEFGLGSPQSKNQRALTGEMIKEICIPISINRIGEITLR

SEQ ID NO: 5587 - protein, 1504 aa, synthetic construct
  REGION 1..1504: note = Synthetic
MKRILGLDLGTNSIGWALIENDFNRKEGKIEALGSRIIPMSQDILGKFDSGVTVSQTAARTNYRGIRRLYQRDNLRRERLHRVLNILGFLPKHYAESIDFEDRLGQFKPETEVKLPYRKDSDDNYHFIFQESFNEMVEEFQFKNPSLFYTKANGEQSKIPYDWTLYYLRKKALSKKISKEELAWILLNFNQKRGYYQLRGEEEADSKDKLEEYHALKVSDVQATEDTNAKGTWYNVILENGWIYRRQSKDSLFDWKGKTREFIVTTSLEKGGAVKIDKEGNEKRSFRAVDSEKDWIAIKKKTENDLANAGTTVGVYIYETLLRNPDQKIRGKLIKTIERKYYLEELKAILAKQIQEHAELQNRSLYKDCIEELYQGNEAHKNNIKENGFDYLFLEDIIFYQRPLKSKKSTISNCPYESRVFIKDGKKEIQPIKCISKSNPIYQEFRLWQFIHNLKIYEKEAIDDGKTVINKDVTTEFLNTQEAYAALFEFLNDKAEISQNALLKYFKLSTNTHRWNNVEDKKYPCNETRSEFIKRLSKMDGIDLGKTLSPAFEKSLWHIIYSVKDKKQYVRALETFAMKNGLDINQFRENFEKFKPYDSAYGAYSEKALKKVLPLIRRGTYWKKDAIPAAVQERIVNIMKRIESVDFNLEKIENFADDDIPKQLLKSFAKGKDPMQGLNTYQACYAVYNRHSEVSDIQLWKSPEDITKYLDSFKQHSLRNPIVEQVVMETLRVVRDIWQYYGNGAKDFFSEIHVELGREMKNDKKTRERISKSITENENTNERIKNILKELMGDEALQGDIRPYSKGHQDILKLYEEGVFANAPETYKNIKIDDIEKIRKNNSPSKSDIVKYKLWLEQGYISPYTGSPIPLSRLFTTDYQIEHIIPRSRYFDDSMGNKIICESAVNEEKTNKTAYEFIKENAGRIIDLGQGKQVPLFDLEAYESHCRGYFKGNTKKLKFLLSEDIPEGFINRQLNDSRYISKVVTSLLSNVVREEGEQEATSKNLVPLVGTITSKLKKDWGLEAIWDDLIAPRFERMNQLTKSTDFRKEVIDGHGNRYFINTVPDDIKKGFSKKRIDHRHHALDALVIACTTKDHVNYITSLNTQRNNRSLVSKLRKIEEKTIKDKRTGQPKTIKIAKAYHKPWPNFTKETFEKLSKTVVSFKQNQRIINKTNNKTWGWEKVDGVMKKVLKKQEKRNWAIRKPIHKETYYGKVKGFDSPKGKITTATRKSLREITNERQLNTITDSGIKKILNNHLKTFIDESGKINFEPAFNQDGIDLLNKNIQQLNEGKNHQPIYKVRMYTHNTMFSVGDEGNKSTKYVIPESGTNLFFNVYWDEENNKRNFETVPLNRVIAFQKQTSHIPRKDRTDVPIDNTLGRFLFTLSPDDLVYLPTDEESESFTTFEIDSLNSKQVANIYKFVDGSGTTGNFVPAEAARVIANIKDKKVRSNFCKRNNLSDKQLIKNEFGLGSPQLKNQNSLDGRQIKSICWKLEINRLGKIIKVIK

SEQ ID NO: 5588 - protein, 1548 aa, synthetic construct
  REGION 1..1548: note = Synthetic
MKKILGLDLGTNSIGWAVVNANETIRDNNTTYLKPISISSAGSRIIPMSADILGDFDKGNSISQTAERTRLRMARRIHERCILRRERMLRTLKTMKFLPEHFAEKIDQFGKFVDDSEPKIAWLNKGNGNCNFLFQNSFKEMLEDFAVHQPQLVVDGKKVPYDWTIYYLRKKALTQQITKEELAWILLQFNQKRGYYQLRGEEEEEKSNESIEIISAKILSVERKEKDKKYEKYWYEMNLDNGMTYRATFYNDVSNWQGETKDFVLKTTVLKDGSTKNELSFLPTTDEIERMDPQRKAKMYAKIKLRTEKDIENCKETVGSYIYDHLLQEPDQKIIGKLVRTVERKFYKDELVRILKVQQELIPELKDVELYNKCIELLYPSNEAHRNNIAKPDFVNLFVNDIFFYQRPLKSKKSLIDNCPYEFHKDKDGNIYPIKCVAKSNPLFQEFRLWQFVQNLRIYQRERIVSDGQLDLFSNTATGKLQTDVDVTAEILRTEDDYVKLFDWLNNRSSIKQDTLLSSYFKIKKEKGKDKYPYRWNYVEDKEYPCNETRAAMLNGFEKCGISPEILTQDLEMALWHILYSVEDKIEISKALRTFANKKGLDDNFVEVFCKMKPYKKEYGSYSEKAVRKLLPLIRMGKYWSKDSIDAKTLERIGKVITGEYDETIKNRVREKAISFTDIEHFKGLPIWLACYIVYDRHSEAKEIEKWESPEDIDHYLKNFKQHSLHNPIVEQVITETLRTVRDIWKQEGNIDEIHVELGREMKNPADKRKRMTERILQNENTNLRIKALLMEFLNPEMGIENVRPYSPSQQDILRIYEENALDNLTKEDEEYEFVSRMSKTAQPTKADVIRYKCWLEQKYRSPYTGKMIPLSKLFTPAYEIEHIIPQSRYFDDSFSNKVICESEVNKLKDRQLGYEFIKNCAGQIVQLSQGGCVEILPLDKYEKLVKDFYAGNRTKMKKLLMEDIPDDFIERQMNDSRYISKLVKGLLSNIVREKLEGGEYEQEAISKNLISCNGSVTDRLKKDWGMNDVWNHIILPRFQRLNQLTETTNFTTLNREGHEIPNMPLELQRGFNKKRIDHRHHAMDAIVIACTTRDHVNLLNNEAAHSKHNKNRYQLQRKLRRYVTQTINGKEHEFAQEFLKPWDSFTTDARLVLQNIIVSFKQNLRVINKTTNFYLHYDENGKKRYLKQTHGDSWAIRKSMHKDTVFGEVNLRKKKTVSLNEAIQKPESIVNKDFKKKVKDLLAEGRDAKYIKKFVEDNKDAWADINTAKIEVYYFTKEEKKRNGEPKERYFATRKPLDSSFDKKKIIESVTDTGIQKILIAHLEAKDNNPEQAFSPDGIDEMNRNIIALNNGKFHQPILKVRVYEKADKFAIGQTGNKSQKFVEAADGTNLFFAVYKTGDNQRVFATIPLALSIECQKDSPNNWIKLLDERLRDKSPIERLQKYQKLEIPKDAKVLFILSPNNLIYVPTDKEIENGIKQINVDRIYKTVSFNKKQCFCVKSHVATPIVNRIEYTTSNKMERAITGEMIKETCIPIKVDRLGNIIKIG

SEQ ID NO: 5589 - protein, 1540 aa, synthetic construct
  REGION 1..1540: note = Synthetic
MKHILGLDLGTNSIGWAIVNAEQIVREDETNYLKPVSISSAGSRIIPMSADILGDFDKGNSISQTAERTRLRMARRLRERNLLRRERMLRTLKLMGFLPSHFAKEIDIFGKLFSNKEPKLAWKKNEEGKNLFIFQDSFNEMLEDFACHQPQLVAEGRKVPYDWTIYYLRKKALTQRITKEELAWILLQFNQKRGYYQLRGEDEEDDNTKRVEYLALKVERVEATDEKRGDEVWYNVYLENDMVYRRTSRYPLDWVGKVKEFIVTTDLEKDGSPKKDKEGNIKRSFRAPKEDDWTLLKKKTENDIENSQKTIGCYIYDTLLQKPNQKIIGKLVRTVERKYYKDELLRILRRQQELIPELQDTELYKKCIEELYPNNEGHRSNLAKSDFVNLFVNDILFYQRPLKSKKSQIENCPYEFHKGIDGNLYPVKCIAQSNPLFQEFRLWQFIQNLRIYQRERIITDGQLALFGSTHTGKLQTDVDVTAEFLKSEEDYVKLFDWLNNRNAIKQDTLLNSFFKIKKERGKDKYPYRWNYVEDKEYRCNETRAAMLTGLEKSGIRTDVLTHEMEMALWHILYSVEDKTEIGKALKTFAKKNNLGEMFADVFCKMKPYKKEYRSYSEKAIRKFLPLMRMGKYWNKENIDDKTLSRIEKIITGEYDKTIKNRVREKAINLTDIDHFKGLPVWLACYIVYNRHSEAREIEKWDKPEDIDRYLNSFKQHSLRNPIVEQVITETLRTVRDIWKQEGDIDEIHVELGREMKNPADKRRLMTERIQQNENTNLRIKALLMEFLNPELGIENVRPHSPSQQDILRIYEENALDNLTKEDAEYEFVTKISKMAQPSKSDIIRYKCWLEQKYRSPYTGKMIPLSKLFTPAYEIEHIIPQSRYFDDSFSNKVICEAEVNKLKDRLLGYEFIKEHAGEIVQLSQGDTVKILSVEEYEKFVKDYYGSNRTKMKKLLMDDIPDGFIERQLNDSRYISKVIKTLLSNIVREKLENGEYEQEAVSRNLISCNGSITDRLKKDWGMNDVWNHIILPRFQRLNELTGTNLFTTQNHEGHEIPAMPFELQKGFNKKRIDHRHHAMDAIVIACATRDHVNLLNNEAAHSKHNANRYQLQRKLRRFAKITIDGKEREIAQEFLKPWPTFTSDALRTIQSIIVSFKQNLRVINKTTNSYLHYDEYGKKIYHKQTQGESWAIRKSMHKDTVFGEVNLRKKKSVSIKEAIVKPEAIVNKEFKEKVKELIAQGHDAKYIKKYVEDNKDIWSDINPSKIDVYYYTRDEKKQNGEPKERYFATRKPLDTSFDQKKIKESITDTGIQKILLAHLESKGNDPEQAFSPDGIDEMNRNIVTLNKDKFHQPIIKVRVYEKADKFCIGQKGNKKKKFVEAADGTNLFFAVYETADKKRVFATISLGLSIDCQKEGSQYWIKLLDERLRDKTPTEELQPYQKMDIPTDAHLLFILSPNDLVYVPYDGKPTDLTQVDRDRIYRAVSFNKKQCFCIKCNVATPIVNKVEYTTSNKMERATTGEMIKEVCVPIKVDRLGNITKIG

SEQ ID NO: 5590 - protein, 1474 aa, synthetic construct
  REGION 1..1474: note = Synthetic
MKTVLGLDLGTNSIGWALVDVEEKKILGIGSRIIPMGQDVLDTFSGGKPLQTQTAKRTNYRGVRRIRERHLLRRERLHRVLNVLGFLPEHYSKQIDFKKHFGQFVDEAEPKLAYDNRNFIFKNSFEEMLNDFKQSQPQLFYTKSNGKETKIPYDWTIYYLRKKALSQKIAKEELAWIILNFNQKRGYYQLRGEEEEVTPNKLVEFHSLKIVDVIADEKQNGKGEIWYSLHLQNGWIYRRSSKIPLFDWKDKVRDFIVTTDLNEDGTIKTDKEGNEKRSFRAPSEDDWTLLKKKTEQEIDKSNKTVGTYIYENLLQNPSQKIRGKLVRTIERKFYKEELIAILKKQIELQPELFTDDLYNDCVRELYRNNEAQQLVLSKRNFVHLFVEDIIFYQRPLRSQKTSIGNCSLEYRIYNDKNGNQVKDYLKTIPKSHPLYQEFRVWQWLSNLKIYRKEDGVDVTTEFLKNTEDIVNLFEFLMTQKEVGHKDILKHLVIPALKEKFPTAKPAAFNKEVNKEIAKYRWNYVFDDSKDKEEDKSKKYPCNTTGYEIRRRLEKVVNIPAGFLNSKIEQHLWHIIYSVTDKKEYEAALRSFANKYKLDENSFVEEFKKFPPFPSEYGAYSEKAIKKLLPLMRLGKYWCWDAIDTKTQDRIDKIISGEYDENIKTRVREKAINLTANDHFQGLPIWVASYIIYDRHSEADIAGKWNSIGDLEQYLEEFKQHSLRNPIVEQVVTETLRVVRDIWKQYGQGAKDFFSEIHVELGRDMKNTADERKRLTEQVSNNEATNLRIKALLTELKENSDGKLSVENVRPYSQMQQEALRIYEDGVLNSKIDLPEDIIKISKSAQPSKMELQRYKLWLEQKYRSPYTGSAIPLGRLFTEDYQIEHIIPKSRYFDDSFNNKVICESAVNQLKDKQLGLEFIRNHPGEKVECGMGKVVEIFTEEAYVAFVKEHYAKSKKGQNLLLEDIPEQMIARQINDTRYISKFISSLLSNIVRADKEDDGINSKNLIPGNGKITTVLKKDWGMDAVWNDLILPRFERMNQLTHTDVFTYWNEQYQKFVPVEYSPVDSKRIEKKRIDHRHHAMDALVVACMTRDHVNLLNNQSAKSETSRYDLQNKLRNKTKESWIDKKTNEKVERDVFKEFKKPWDNFTVDARNALETIVVSFKQNLRVINKATNYYQKWVDKNGVKVKETVKQEGVNWAIRKPLHQKTVSGKVDLPWVKVPKGKLLTATRKNVDTSFDLKTINAITDSGIQKILRNYLAYKGNNPEIAFSPEGLEEMNASIKQYNNGKPHQPIRKVRIFELGSKFSLGKTGNKKNKYVEAEKGTNLFFAIYEGKDGKRSYETIPLNIVIERLKQGLPPVELKGENDFYLTPNDLVYVPTEDELINGSKIDLANFTIEQKKRLFNVNDFSGTCYFTPNHLANAIAPKEVDLNFDNKRNKLTGSFDTKTASFDGVQIKDVCIKLKVDRLGHISL

SEQ ID NO: 5591 - protein, 986 aa, synthetic construct
  REGION 1..986: note = Synthetic
VERKYYKEELKKIIDSQKRFIPELNDKDLYGRCISELYQSNDAYRQSISSCDFTYLFVDNIIFYQRPLKSKKSLIDNCPYEEHSYTDSKTGEVKTAPVKCVAKSNPLFQEFRLWQFVQNIRIFERQKKIGDSVKTDVDVTGEFIKSADDVVSLFDFLNDRKDITQSVLLGTYFKIKKPKGKDSDYPYRWNYVEDKTYPCNETRALILKGLKDAGIDEGFLDKDKEYSLWHILYSVEDKQEITKAMEKFAAKNSLGGKFAEVFSSLPPFNKNYGSYSEKAIKKLLALMRTGKYWSADAIDKHTLERIDKIINGEYDESIRTRVREKAISLTDVSHFRGLPLWLACYIVYDRHSESKDITRWNCPADIDQYLSHFKQHSLRNPIVEQVVTETLRTMRDIWRQYGKIDEIHIEMGRDMKNPADVRAKMSKRMIDNENANLRIKAMLAEFADPDFGIAGVRPYSPSQQEMLRIYEEGALESVDEVPDEINEIISKFNQTDIKKRPTHGEIIKYKLWLEQKYQSPYTGRTISLSRLFTDDYQIEHVIPQSRYFDDSMSNKVICEAEVNQLKDRMLGYEFIKAHHGEKVLLSSGETVTILTAEEYERLVQLNFRKNPVKMKKLLMDDIPDKFIERQLNDSRYISKKIKSLLSNMVRDEGEQEDISKNVIACNGAITDRLKRDWGVNDVWNHIILPRFERLNAVTGSDRFTTTSTNGHTIPDMPLNLQKGFNKKRIDHRHHAMDAIVIACTTRSHVNLLNNEAAMSKNNAVRYQLSRKLRRYEDTMVTRNGETRTISVAREFLKPWPTFNADVEKALRGIVVSFKQNLRVINKTVNKYQKFVYNEEKHIKEKKAVRQEEHNGKYLLAIRKPMHKDTVYGEVNLRRIKEVSLKDAVANPKAVVDKDLKKKLMAMIELGYDLKQITKYFEDNKDAWQDVNLKKIKVYYFTKDTGDRYFATRFGNDLVTLFSKITKADDAKKSDRADNRHGHTENF

SEQ ID NO: 5592 - protein, 1489 aa, synthetic construct
  REGION 1..1489: note = Synthetic
MAKVLGLDLGSNSIGWAVVDNERHCIESAGSRIIPMDAGRLGDFEKGNSVSFTKERTQYRGARRLRERYLLRRERLLRVLRIMGFLPEHFASQLSRYGKLPEDKEPKLAWREGKDGKLDFIFKSSFEEMVEDFRQAGSDNKIPYDWTIYYLRQKALTHPISKEELAWVLMQFNQKRGYYQLRGKADEGAADAESKNEIRSYHELTVTSVAKTEEHDKKGLTWYDITLENGWIYRRAFSVKPDWEGKTRGFIATFKLDKDGNPKEETPRLSSPSDDDWGLRKIKTENDIHESGLTIGAYIYQSLLHHPDRKIIGDFVQTIDRELYKKELLQILETQKQFIPELNDEQLYANCIEELYPSNDAYRTSIAKRDFIYLLVEDILFYQRPLKSKLSLIDDCPFEQRNSKPVKCVAKSHPIYQEFRLWQFLSNLHILLDDVDITPNLLPDGDAYADLYDYLSTIKEVDQSAMLRYFKIGKKEMPRYRWKYVPDRKYPAGETRATLLGGLSKAGIDKGFLSPEKELQLWHILYSVDDQQQYRKALRTFAHKQGWDDSQTDRFTKAFDRLTVYKEKDYGAYSAKAIGKLLPLMRRGRYWNPQDIDCQTRQRINHIITGEEDDTLTSSVREKFEGLESIEQCQGLAPWQACYLVYNRHSEAIDAQRWTKPEDIDNYLGQFRHNSLNNPVVEQVVTESLRVVRDIWKKTGHIDEIHIELGRELKKTQSERQSLSQSILEGETTNQRIRLLLTELMNPELEVENVRPQSPSQQEILKIYEEGAMQNADEIPDYIKDIQKRFSDAKKQPTPAEVKKYRIWLDQRYISPYTGRPIPLAKLFTPAYEIEHIIPQSRWFDDSMSNKVICEAEVNKLKGRELGHEFIVHHHGESVPLSLGGEVKILEVEAYEKLIKSNITNSKKRQKLMMDDIPDDFTSRQLNDSRYISRLMMHLLSNIVRSTDEDGNLENTATSKNVIVCNGSITDRLKRDWGIGDVWNRIILPRFERMNRITETTDYTATTDSGHLIPQVPLHMRQGFNKKRIDHRHHAMDAIIIACATRNHVNLLNNENAKSQQRYDLQHTLRTKETYVDGQGNTRTRPGDFIKPWPTFTEDVYHVLESIIVSFKQNQRIINKTSNHYTVIRNGKHTGCPQTKGDSWAIRKPLHKETVFGEVNLQLKKKINLKDAIKNPNTIVNRELKLKIKEQLDKGYSAKQIIDYYDKRKDVWPEAADGKVEVYYYTKDTKDRYFATRKSLIDLFKDTATQPAATKIIESITDSGIRSILYAHLANEGNNPVEAFSADGLERMNRNIRNLNGGHDHLPIKKIRVYEQANKYSVGAHGQKATKYVEAAKGTNLFFVIYTDKKGSRGYATVPLNVIIDLQKQYEKQWRAHLAERLQQDDLALMPSDSTLLYILSPGDLVYVPSEEERKNGIISLDLKRVYKCVSATGKQCLFIPCPVASLIQTGKEFEAQNKIERALTKEMIKEVCIPIQIDRLGNIIRIGQ

SEQ ID NO: 5593 - protein, 1511 aa, synthetic construct
  REGION 1..1511: note = Synthetic
MEEKHILGLDLGTNSIGWAVIRALRNEDGIETLSKILGANSRIIPMDAAVLGDFDKGNTKSQTAERTSRRTVRTLYERSQLRRERLHRVLAILGFLPEHYLARLDRYGKFIAHSEPKLPWTTDEQGRPCFLFQESFHEMLADFRQNQPDLLANGRKVPYDWTLYYLRKKALTKKIRKEELAWILLNFNQKRGYYQQRGEEEDKKSSKTRQFFDSQKVTDVIDTGRVYKGLKVITVVLADGIKGKIFKAEKPDWVGQKKDIFAVVDLDKDGKDKLDENGEPSVRFKIPTEQEWEEQWKLIKVKTENDLDDSGKTVGAYIYDTLLQMPRQKIRGKLVRTVERKYYKDELARILETQSRFHPEFQDRSLYEACINELYPQNDAHRNLISSRDLSYLLSEDILFYQRPLKSKKSLIADCPYEGYTCVDKHTGEVKSYHLKCIAKSHPLFQEFRLWQFLSNLRIYQKEKVVDGKSCFDVDVTVEFLKNEDDYVCLFDWLNNRKDIKQDAFFKYPAFGLKKDAKNYRWNYVEDKVYPCNETRAVMLARLDQAKVSEDFLTREKEEALWHILYSIADKGELRKALSTFAAKQGLGPEFVEKFQTTPPFEKDYGSYSAKAIKKLLPLMRRGKYWSADAIDAQTRERMAKILSNECDDRIRSRVREKAIHLTDMSSFRGLPLWLACYVVYNRHSEAKDIRKWETPSDIDAYLAGFKQHSLHNPIVEQVILETLRTVRDIWKQVGHIDEIHLELGREMKNPKDERAKMTRQMQENETTNLRIKSMLLEFMNPEFEMENVRPYSPGQQDLLRIYEESVLNSVENVPDDIREIISKLGESDLKKRPTTSEVLRYKLWLEQKYRSPYTGEVISLSKLFTPAYEIEHIIPQARYFDDSLSNKVICEAEVNKLKSNMLGHEFISKHYGEKVLLAGGKCVKIFSVSDYETFVKDNYARNPVKLKKLLMDDIPEQFIARQLNDSRYISKLVKSLLSNIVRKENEQEDVSKNLIVCTGGVTDRLKKDWGVNDVWNKLILPRFLRLNELTGTTDFTALNANSKMVPTVPLGLQKGFNRKRIDHRHHAMDAIVIACASRNIVNYLNNESASKNAKVTRLDLQRLLCDKQRIDDKGNYRWFIKKPWPTFTQDVSVALQNVIISFKQNLRVINKTTNYYQRYVDGKKKFVPQEKGDNWAIRKSMHTETFYGEVNLRDIKTVSLKEALKNPKAVVERDLKKKLQELLSQNLNEKQIIAYFEANKDIWHDIDLKKIQVYYFTKETTKRYFASRQSLDTSFDEKKIREKVTDTGIRKILLRHLEANGNDANLAFSPEGIERLNENMQTLNDGKYHQPIYKVRVYEKADRFAVGQTGNKKSKFVEAAKGTNLFFAIYEMEKVDKETGEKTIKRIYETIPLNVVIERQKRGLSSVPEDKDGNPLRFVLSPNDLVYVPTREEIESGHIIYPLDRTRIYKMVSCTGNEGHFIPNYIANPIVQILELGSNNKAQRAWSGEMIKEICIPIKVDRLGNLMQLL

SEQ ID NO: 5594 - protein, 1466 aa, synthetic construct
  REGION 1..1466: note = Synthetic
MAKKILGLDLGTNSIGWSLIEQEVEKGEGKILGLGSRIIPMDEAKKNDFGKGASISQTADRTGYRSARRLRERHLLRRERLHRVLNVLGFLPKHYAAEIDFEKKLGKFLIDKEPKIAWKRNEDGQFEFVFQNSFAEMAKEFEGKKIPYDWTLYYLRKKALERKIEKEELAWLLLNFNQKRGYYQLRGEEAEENENKLVEFYSLKVINVSKDEQKGKKDESWYSLELENGWVYRRSSKTPLFDWKDKVRDFIVTTELNSDKTIKKDKDGIEKRSFRAPGEDDWTLLKKKTEQDIENSNKTVGEYIYVSLLKNQNQKIKGKLVRTVERKFYKKELREILKKQIELQPELFASDKYNNCIRELYRNNESHQITLGKRDFVHLFLDDIIFYQRPLRSQKHSIANCGLEYREFKINGETKKEYLKTIPKSNPLYQEFRIWQWIKNLSIYDKIDDKNVTANFVDSIEGNEKLFEFLNSRKKIDQKSLLKYLIDQKLPKLKSKELNAEIEKYRWNFVEDKEYPCNETRNVIASRLEKVSNISSNFLTQDIEQHLWHIIYSITDKIDYEKALKSFAKKHNLDQASFVENFKKIPPFDSEYGAYSEKAIKKLLPLLRIGKYWSWEKIDSKTKERIEKMLTGEFDDFIKTQVREKAIHLTKENQFQGLPLWLASYIIYDRHSEAESISQWKSVNELEHYLKEFKQHSLRNPIVEQVITETLRVVKDIWKKYGNGTQGFFDEIHIELGREMKQTAEQRKSDTYKITENENTNLRIKALIMELRENSDNKLVVDNVRPYSPTQQEALKIYEDGVLNSNIEIPEDILKISKSAQPTKNELTRYKLWLEQKYRSPYTGESIPLSKLFTSDYEIEHIIPQSRYFDDSFNNKVICESVVNKQKDNQLGLEFIKHHSGEILTSNFGKKIKILTEEEYVSFVKEHYSKNHRKRNNLLLEDIPDKMIERQLNDTRYISKFIMSLLSNIVRENINDDGINSKNIIPCNGKITSQLKQDWGLNDVWNELILPRFERLNTLTNSQSFTSKNSNGKIIPVVPFELSKGFQKKRIDHRHHALDALVIACTTRDHVNLLNNQSAKSDTKRYDLQHKLRNKEKWLDNNYKERDKFTTFKKPWINFTEEAKNRLEKVVVSFKQNLRVINKATNFYEKIQDGKKIKVAQKGVNWAIRKQMHEATVSGIVNLPWVKLGKGEITTATRERNDLVSIFKDITTKEKAESKIKKITDTGIQKILLNYLDSKGNKPEAAFSPEGIEELNNDIAKFNKGKFHQPIFKVRLYEKGSGRFKLGVKGNNKDKYVQGAPNLFFGIYLDLGGNRSFETISLDKVVERQKQKLSPVPEKKVIEVKKKNEKEIHELKLENYLSPDDCIYIPTDDEKENIHDIDFNNLTNEQLNKIFFVNDFSGTTCYFRPNRIAKAIAPKEIDMNFEEEKNKLMGSFDTKTASFEGKQIKDRCIKLKVNRLGDISLA

SEQ ID NO: 5595 - protein, 1541 aa, synthetic construct
  REGION 1..1541: note = Synthetic
MKKILGLDLGTNSIGWAVVNEAETEDNKKELVGIECAGSRIIPMDSSIIGNFESGNSVSQTAERTQLRGNRRLRERCILRRERLLRVLNLLGFLPEHFARELNRYGKFTTDSEPKIAWRKSSNGKFEFIFQDSFNEMLEDFHKRQPELTADGKKVPYDWTIYYLRKKALTQAITKEELAWILLNFNQKRGYYQLRGEEEDEKSNKQVEFFALKVVSVEDTGEKKGTDTWYNVHLENGWIYRRPSNVPLDWVGKVKEFIVTTDVNNDGTPKIDKDGNVKRSFRAPKEDDWTLLKKKTEKDIGSSQKTVGTFIYDSILANPQQKIIGKLVRTIERKFYRDELKQILEKQKEFHVELQDKELYTACCKELYPSNDAYRNSINNRNLKDLLLDDIIFYQRPLKSKKSLIANCPYEELSYMDKETGELKHATIKCIAKSNPLFQEFRLWQFVKNLRIYQREKEVNGKLQIDVDVTAELLKSEDDYTELFDWLNTRKSIKQDTLLSSYFKFKKGKGKAEYPYRWNYVEDKEYPCNETRAELLSGLKKCGVDEKVLTSEMEMSLWHILYSVDDKIEIGKALKKFEKKHSLPETFADVFEKVKPFKKDYGSYSEKAIKKLLSLMRMGKYWNYDVIDANTKDRIQKILTGEYDENIKNKVREKAINLTQNSYFQGLPVWLACYIVYDRHSETKEISKWASPADIDSYLKTFKQHSLRNPIVEQVITETLRTVRDIWKQVRQIDEIHVELGREMKNPADKRKTMSENIKKNENTNLRIKAMLAEFANPALGIENVRPYSPSQQDILRIYEENALDNLSNDDKDFEFVQKISKSAQPTTSDIIRYKAWLEQKYCSPYTGMPIPLSKLFTPAYEIEHVIPQSRYFDDSFSNKVICEAEVNKLKDNQLGFEFIKNHPGEKVQLSEGGVVEILSVDAYEKFVKDHYSHNNAKKKKLLLEDIPEEFIARQLNDSRYISKVVKTLLSNIVREKDANGEYEQEATSKNLIVCTGNITDKLKKDWGMNDVWNRIILPRFQRLNKLTGKDCFTTQSAEKHTIPAMPLELKKGFNKKRIDHRHHAMDAIVIACTTRNHVNLLNNEAAKPQNKENRYQLSHKLRRYEKVMINGEERSVPKEFIKPWETFTQDAHAVLNNIIVSFKQNLRVINKTVNYYQHFENGKKVFKKQEKGDNWAIRKSMHKDTIFGEVNLRFKKTVSLKDALKNPKAIVNKDFKVKIIELLEAGRDAKYIKKYIDDNKDVWSDINIKKIDVYYFTKETNDHYFATRKPLDTSFNKTKIKEKITDTGIQKILLSHLAAKNNNPQLAFSPDGIDEMNHNIQKLNNGKNHQPISKVRVYEQSDKKFAIGTKGNKSKKFVEAADNTNLFLAIYESTSINPNNSRSYVTIRLNLVIDCQKEFGKDWKDKLDSLLKEKGIVANDAHLLFMLSPNDLVYLPTEEQIMNGIDIIDRTRIYKFVSCSGNMADFVPATSANTIFSMTKKEQEKKFDQEGYFNIQDEYGVGSPKSKNERAITGEMIKKTCIPLKVDRLGNIVEVNGVKL

SEQ ID NO: 5596 - protein, 1478 aa, synthetic construct
  REGION 1..1478: note = Synthetic
MKNILGLDLGTNSIGWALVDGENHKIIKSGSRIVPMDAQAMSDFQKGNLQSSASSRTGFRGARRLYQRAELRRERLLRVLGKLCFLPEHFKNEIDFEEHPGKFKNHGEPLLPYRKSGSGKNEFIFMDSFNEMLADFKESQPELVEGGKKIPYDWVIYYLRKKALSRAVKREELAWIILNFNAKRGYYQLRGDELETAAEKNEEYMMLEVARVEKMDPDKKRRGYDWYLITYENGATQRKLGKIAPRNVGDKVEVIVTTTYDKDGNVALDKDGRPKIKLRSPREDDWALMKKRTEHDLEQSQQSVGAYVYDSLLANPAGKVRGKLIRTIERKYYKDELISILNKQKEFIPELNDRSKYMDCVRELYRNNEAHVGSLSDGDFTRLFVDDIIFYQRPLKSKKSTVADCPYEQYHYVNKESGEIVNMPIKVISKSHPLYQEFRLWHFIRDLKIYQREGNINGKLKTDVDVTADYIKDENDVEALFEYLNGLKEVSNDTLLKHFGLSAKSHRWNYVESKAYPCNETRWSINRDGCLDVCGEIALWHILYSVDDPVLLRKALKAFAVKNGMDEEKFVEKYIHTKPFESDYGAYSEKALKKVLPLMRTGKRWDAGAIGMHTLDRIQAIIDGRGEQYIYESAEKNRFSLKQVDDFKALPLWFAEYVVYGKKEEYTVWKSPADIDYYLRFCFKQHSLRNPVVEAILGESLRVVRDIWSVYGKIDEVHVEMGRDLKQSADRRKDDAEKMLKNERTNQRIRTLLQEFANPDCGIENVRPHSPSQLELLKIYEADILCNEDVPEELVDVFNNLGNATKHVAHNDVMRYKLWLEQKYRSPYTGDVIPLSKLFTPAYEIEHIIPQSRYFDDSLNNKVICESEVNKLKDNSLAYEFIQNKHGQIIGGHKVLDQQQYEDFVKQHYANNRPKMRKLLMEDIPADFINRQLNDSRYIARKTIEILSNVVRQTTADGKVADNDKGAVSVNVIASNGAITDRLKKEWGITQVWDHIITPRFERLNRITGTGNFGQWMNAGGKRYFQINIPIEQSAGFSKKRIDHRHHAMDAIVIACATRDHINYLNNSAAAASAKKLRYDLQHKLCFKEKTDGNGNYVWKFNKPWDTFTQDVEAELRRVIVSFKQNLRVINKMTNHFWHYENGRKVLAKQLKGDGWAVRKSLHKATVSGAVRLQGIKKVSLKEALKDWHQIKDKNIRKAIKGLIAGYKKFDETVILRYFKDRKYMLDGKDISKVEVFVLPKEADLSAVRCELDISFDEKKIASVSDSGIRSILLNYLKEHDNDPKIAFTPEGIMDMNSNIRKYNGGKDHKPILKVRKTEALGLKFPVGECGNKKSKYVEADKGTNLFFAIYADKEGGRSYTSIPFNEAVECMKMGLPVAPEYDGNGNELLFVLSPGDLVYVPDTDGKIEPLQVDRIYKLVSSTGKCGFFVPCNISAPIMDTIELGSNNKAEKSWTGEMIKNVCVRLKVSRLGIVTKYD

SEQ ID NO: 5597 - protein, 1558 aa, synthetic construct
  REGION 1..1558: note = Synthetic
MKKILGLDLGTNSIGWALVNVDKNGNPFGIEGLGSRIIPMDQATLSDFEKGNSKSQTAERTMFRGARRLRERKHLRRERLHRILNELNFLPIHYRSCIDFVHRLGKFKANHEPKIAWRSNDQDKMEFIFQNSFLEMMSDFTKRQPELVKEGKKIPYDWTIYFLRKKALGQRIEKEELAWLLLHFNQKRGYYQLRGEDEIDATRSAKTRKYFDRKIIKSIIDTGEEYKGLKVLIVELDNGNQGKIFKQEVPDWVGQEKNIIATVDLDKDGKDRFDKGVLSQRFSIPSDSEWETEWKLIKLKTEEDLEASQKTVGTYIYDSLLKNPNQKIKGKLVRTIERKYYRDELRAILNKQREFHPELNDKKLYQHCIFSLYPQNEAFRNSIANKDFTYLFLEDIIFYQRPLKSKKSTINNCAYEVRRYMDKETKELKEVPLKCIAKSHPIFQEFRLWQFISNLRIYKKDITDIDVTNDFLHSQDDYANLFEWLNNKNEIDQKAFLKYPAFGFKKDAVNYRWNYVEDKSYPCNKTRSAILSKLDKHEQEFLTKELELKIWQLLYSVNSKEEIDKALNVNSPKINNKISIDHTGILHELKSSSLSDISIQRLKAINFEEKDYGSYSYKAIKKLLALMRQGKYFDNTAITDATKARINSIFDRLESISFDPERINSISDDDIPKQILKSFIKLNRTYGGFNTYQACYAVYGRHSEAKEIAKWEKPEDIDQYLAKFKQHSLRNPIVEQIITETLRVVRDIWKKHAYKTINKDNQGNNCESESELTEIHIELGRDMKNNKSERLRISRINSENENTNLRIRKLLIEFNDPEFGVENVRPHSPSQQEILRIYEDGVLKSGVEIPEYVDNIIKKFKETDVKKQPSKSEVLRYKLWLEQKYRSPYTNEVIPLGKLFTNDYQIEHIIPQSRYFDDSFSNKVICEAEVNQLKENELGCEFIMNNGGRIVELSFGKTVRILDFEAYEQFVQQNYAGNRPKLRNLLMTEIPNDFIDRQLNDSRYISKVVKGLLSNIVREDGEAESTSKNLISCTGGVTARLKMDWGLNDVWNNLIYPRFERLNELTNSNQFGYWDKKDGKNVFQTQVPMDIQKGFNKKRIDHRHHALDALVIACATRSHINYLNNESAKSNSKESRYDLRRKLRRLEVIQKEYTINGRKEIRNIEVAKEFYKPWNSFTQDAQSALENIVVSFKQNLRVINKTTNYFLRFNKEGKKIFETQTSGSNWAIRKPLHKDTAFGLVNLKRTKTVSLANAILDYDQIVNRKLWTKIKELISIGYDNKRILKYFTDDKENWNEIISSGIEVFYYTDNFEKQVATRKPLDTSFTESKIINSITDLGIHKILLAHLRANEGNPNIAFSPEGIETMNRHICELNGGKFHHPIYKVRVHEPLGYKFKVGDKGNRSTKYVEAAKGTNLFFGIYINSQGIRSYETIPLNVAIERQKQGLSPVPDNNELGERLLFWLSPNDLVYLPTSDEVESGICCNKLGIDRIYKMVSCTGYVGDFIPAHIANPIIQTLELGSNNKAQRAWTGEMIKEICIPVKVDRMGNIVEIFNRNKN

SEQ ID NO: 5598 - protein, 1499 aa, synthetic construct
  REGION 1..1499: note = Synthetic
MNPKRILGLDLGPNSIGWATILETDNSKTIESAGSRIIPMDAAKLGDFEKGNPQSQTNERTTFRGTRRLRERHLLRRERMLKVLHLLKWLPEHFEQGIDFSNNGAKFLQDKEPKIAWQPTTDGRYEFFFKEAFREMLADFARMQPALVEEGKKIPYDWTLYFLRKKALTEKIRLTELAWLLLNFNQKRGYYELRGETEEKTDKLEEFYSLKVVKVEKSDEKSKGNPWYNIHLENGWIYRRQSAQLLDWEGKVRDFIVTTDLNPDGTPKLDKEGNVKRSFRAPNEDDWNLKKKKTENEISISGKAVGEYIYDTLLQNPKQKINGSLVSTIERKFYKEELRRILETQSRFHSQLNDSFIYEECLKLLYPSNEAFRKNISGKNLIYLFIDNILFYQRPLKSKKSLIANCEFESYSFVKDGKTLTVPIKCIAKSNPLYQEFRLWQFLSNLRILQRTKEVDGKLSVDVDVTGEFLPDNEAWANLFDILNDRKEIDQKTLLTAVGINKKKQAEYRWNYVEDKKYPCNETRHLLLSRWNKAGLDKAMLTQKLTMELWHILYSVEAKDESKKALSTFAHKNGLPEIEFVEAFLSAAAFKKDYGAYSRKAIKRLLPLLRRGKYWSAENIDTATKTRIENIIDGVADDSINERTREKLTAFSDITQFQGLPVWLASYVAFNRHSESDQQTKWDSPDDIDTFLRNFRQHSLRNPIVEQVVTETLRTVRDIWRKYGQIDEIHIEMGRDIKQTAEERKRRSAIIQKNENTNIRIKMLLSEFFNEGNDVENVRPMSPIQQDKLRIYEEGVLNSVDGIQDNIETILKKFNESDPKKQPTKAEIRTYRQWLEQNYVSPYTGQPIPLSKLFSSEYQIEHIIPRSLYFDDSFSNKIICESAVNGRKSSMLAYNFIKECGGEVIQLSNGKSVRILKVEEYEQLVKRVFASNRKKQQNLLATDIPDDFSQRQLTDTRYISRFLLALLSNIVREKDEKGQYESTFTSKNVIPCNGSITDRLKKDWGVGDVWNRIIAPRFERLNGIYGDNRFGDWTNVDGKKFFRTQIPLELQRSVNKKRIDHRHHAMDAIVIACTSRQMVNYLNNSNAHDHDKRIDLRNAVCSKAKTDTDGNYRYLVKKPWPTFTEDMAYTLSQMLVSIKQNLRIVNRCSNRYQRYENGKKVTVRQTKGEMLAIRKPLHKDSVFGQVNLRSVKTVSLNVALENPSRIVDKQLKTLVRQLAAQQMSVKQIADYVKKQTDFDVKKVDVYIFSNETNTPLVAIRKPVDTSLTQEKILKSVTDTGIQKILLRHLEANDNKPEFAFSPEGVEEMNKNIVQLNNGRFHQPIYKVRIYEPKGLKFNIGTTGTKATKFVEAAKGTNLFFAVYLDSDGKRNYASVPLNIVVERLKQGMSPVPETNENGDRLLFHLSPNDFVYVPTEEELESGRVNMPIDNSRIYKMVSTTKSECHFIPYFIASPIVQTKELGSNNKSERSWDNVMIKSVCIPITIDRLGQLSIASTLIR

SEQ ID NO: 5599 - protein, 1538 aa, synthetic construct
  REGION 1..1538: note = Synthetic
MKKILGLDLGTNSIGWAVVNAEEKLRENETSYLQPVGISAAGSRIIPMSADILGEFDKGNSVSQTAERTGYRGVRRLLERNLLRRERLLRVLNLMNFLPEHYANQIDRYGKFINHSEPKLAWTKDETGKFRFIFEDSFNEMLADFAKNQPQLVADGKKVPYDWTIYYLRKKALWQRLTKEELAWILLQFNQKRGYYQLRGEEEEEAQDKKVEFLEQKVVRVEATEEKKGKDTWYNVYLENGMIYRRPSSVPLDWEGKVKEFIVTTDLEKDGSPKKDKEGNIKRSFRAPKEDDWTLVKKKTEFDIDNSHKTVGCYIYDALLQNPNQKIVGKLVRTIERKYYKDELRQILDIQKALMPELQDENLYKACIEELYPNNEAHRNNIAKPDFANLFVNDILFYQRPLKSKKSLISNCPYESHFDKDGKEYPIKCIAKSNPLFQEFRLWQFVQNLRIYQREKEVTGKLLTDVDVTNEVLKSEDDYVALFDWLNDRASIKQDTLLNSYFKFKKEKGKDQYPYRWNYVEDKEYPCNETRADILKGFDKCGVSANFLTKEREMQLWHILYSVEDKNEISKALEKYAEKNNLPELFADVFAKIKPFKKEYGSYSEKAIKKLLPLMRMGKYWSADAIDAKTKERIDKIITGEYDEKIRDRVREKAINLTSENHFRGLPIWLACYIVYDRHSEAKEIEKWEKPEDIDKYLKAFKQHSLRNPIVEQVVTETLRTVRDIWKQEGNIDEIHVELGREMKNPADKRKKMTENIQQNENTNLRIKAMLMEFMNPEMGIENVRPYSPSQQDILRIYEENALDNLSKDDPDFDFVNKISKLAQPSKSDIVKYKCWLEQKYRSPYTGEMISLAKLFTHAYEIEHVIPQSRYFDDSFSNKVICEAEVNKLKDRQLGFEFIKNHKGEKVQLSQGGTVEILSVEAYEKFVKDHYNNNRTKMKKLLMEDIPDGFIERQLNDSRYISKLVKGLLSNIVREKLPNGDYEQEAVSKNLISCSGSITDHLKKDWGLNDVWNSIVLPRFKRLNELTGKDVFTAVSAEGHEIPAMPLELQKGFSKKRIDHRHHAMDAITIACATRDHVNLLNNEAAHSQKHDKSYRHDLQRKLRRFEKTLINGQEREVAKEFLKPWNSFTTDAKQALENIIVSFKQNLRVINKTTNHYQHFDESGKKVMTKQEGGDSWAIRKSMHKDTGWGEVNLRFKKQVSLNEALKTPQYIVNADFKGNVVKWLKLGMDAKAIKKLVEGQKDVWSDIDVKKIWVYYFTKETNDRYFATRFMSDLVGYMSGIKEKGKAIAKIEGITDTGIQQILKAHLKAKGDNPELAFSADGIDEMNRIIVDFEKIKNYQLKKVHKPIYKVRRYECGNKYSIGQIGCKAKKFVEADKGTNLFFAIFSSEKLNKETGEMESVRSYLTIPLNVMIDCQKKFGSQWRDNIEAYLKENNLVPSDVKLLFILSPNDLVYLPTKEELKDGIKVVDKKRIYKMVSCTGNEGHFVPARIANPILQTTELGSNNKAQRAWTGEMIKEICVPLKVDRLGNIIEIGK

SEQ ID NO: 5600 - protein, 1544 aa, synthetic construct
  REGION 1..1544: note = Synthetic
MDSKKILGLDLGTNSIGWALINQDFEAKKGEILGMGSRVIPMSQDILNEFGKGNSVSQTAERTGYRGTRRLRERYLLRRERLHRVLNILGFLPHHFASSIDFKKHYGQFESNKETKLAYFNSEFIFKKSFNEMLEDFRIHQPSLLKDEKGKDKLIPYDWTIYYLRKKALTQKIEKEELAWLILNFNQKRGYYQLRGEDVDEKQNKLEELYTLKIVDVKADEPQKGKSEIWYSLILENGWVYRRSSKLPLFDWKDKTRDFIVTTDLNDDGSIKKDKEGNEKRSFRAPGPDEWKLVKKKTEDAIIKSKKTIGVYVYETLLKTPNQKINGKLIRTIERNFYKDELKAILEKQITEHKELQDKNLYNACIKELYQNNETHQTVLSKKTFLHFFLDDIIYYQRTLRSQKSSISNCNLESRTHKDKDGNMTVEPLKAISKSHPLYQEYRIWKWISDLKIYTRDKDTNVTAQFINGIEIQEDLFDFLNNRKEIKQDSLLKFFLEKSGLKGKLLNEEVKKFKWNFIDDAEKAYPCNETRHLILTRFAKIENSNTDFLTHNVIEHLWHIIYSISDKTEYEKALKTFAKKYALDELSFVDAFKKLPPFDSEYASYSLKAIKKLLPLMRLGKYWDKNSIDIKTKDRIQKIITGEVDETIKDLVRDKSLKNKLENEINFQGLPEWLAKYVVYDRHSEASSTRKWKSIADLNDYLEEFRQHSLRNPIVEQVILETLRTVKDIWIKYGNGRYNFFDEIHIELGRDMKNTAAERASKTKQILENENGNIRIKLLLAELKKDSSIENVRPYSPYQQEILKIYEEGVLNSNVEIPEEYLKISKTAQPTSGELLRYKLWLEQKYQSPYTGEMIPLTKLFTLDYEIEHIIPQSLYFDDSLSNKVICETAVNRLKDKDLGFTFIKKHEGKKISMGFNKEVSLLSPSDYEKFVREKYAKLTSKRNKLLLEEIPEKMIQRQLNDTRYISKFITSILSNIVRSETNDDGVNSKNIIPGNGKVTSRLRQDWGLNDVWNDLILPRFQRMNELKSNTDYTTYNAKYQKHLPTVPIESSKNFQKKRIDHRHHALDALIIACTTRDHVNLLSNQHAQSAERFDLQRKLRKFEKVSYTDSESGISQNKEVPKDFIKPWETITLDAKNKLDKTIVSFKQNLRIINKTINKFESYKDKDGKLILDKDGKPKKELRLQTKGNSWAIRKSMHQDTVMGLIKLRSQKTIPLAKALEDIENIVDKLLKNKIKQLIKEGLDAKKIIKLFKDEGNNWNDKNISKVDVYYWEVDENGLGLNVSSRVSLDTTFDKKKITESIADTGIKKILLNHLKNYEGKKDEKGADIAPELLAFSPEGIDEMNANIVQLNDNKFHQPIYKFKTFEPKGNKFIVGQSGNKKDKLVIAAKGTNLFFAIYKDENGKRVYETIQLNEVIEHQKWRASLTSDEQKKTPLIPIKKDKGEHLFNLSPNDLIYVSGDIANAKKLDFDNLTDEQVSNIYKVVSFSSNRLCAIPFNAATSIVDKFEFTQQNKLEFTSDKKSIKEHCIKLNIDRIGNLRIGS

SEQ ID NO: 5601 - protein, 1529 aa, synthetic construct
  REGION 1..1529: note = Synthetic
MKKILGLDLGTNSIGWAVVNSFDENQNEESLKHIECLGSRIIPMDAAILGDFDKGNSISQTAKRTEFRGVRHLRERHLLRRARLHKILRLLGFLPDHYVQDLDGHGNFLVNVEPKIAWRKDSNGTFEFIFNDSFDEMLQDFATYQPELIACNRKVPYDWTIYYLRKKALTKKLSKEELSWILLNFNQKRGYYQLRGEEDDESVKTAKTRQYFDRQKIKSIVDTNQTYKGQKVLIVELEDGVKGKIFKKEIPNWVGQEKSIIVTVDIDKDGCDKYEESGELSCRFKIPSDAEWESEWKLIKMKTQKDLDASGKTVGAYIYDAILQNPSQKIRGKLVRTIERKYYKEELKQILKKQVEFHPELRDKDLFLDCLNELYPNNDAHRNACADRDFIYLFMDDILFYQRPLKSKKSLIADCPYEKHMYRDKETGELKYSSVKCIAKSHPLFQEFRLWHFISNIRIYQKERVIDVDACQPDLSSARSALKSKLEADVDVTNEFLTCEADYVSLFEWLNNKKSVSQKDFLKYPAFGIKKSGDNYRWNYVEDKSYPCNETRALILSHLEKANIRGDIFTREQEEALWHILYSVEDRYEIVKALQSFAAKYRFNDDFVTVFSKFPPFKKEYGSYSAKAIKKLLPLMRMGKYWSESAIDIKTRERIEKIITGECDDSIRERVRLKAIRLHDIEHFRALPVWLACYVVYDRHSESGDIMKWKTPQEMDSYIQNFKQHSLRNPIVEQVITETLRVVRDIWKQVGRIDEIHVELGREMKNPADKRKEMTKRIIENENTNLRIKAMLTEFLNPEFEIENVRPYSASQQDILRIYENGVLNSVSEIPEEITGILKKFNEREQRKRPSTSEVLRYKLWLEQKYCSPYTGKMIPLGKLFTPAYEIEHVIPQSRYFDDSFNNKVICEAEVNKLKGNLLGYEFIKKHHGQRVDLGLGEIVDIFSVDEYETFVKDYYSGNQQKMKKLLMDEIPEQFIERQLNDSRYISKVVKSLLSNIVREQDEQESISKNVIVCTGGVTDRLKKDWGINDVWNKLILPRFQRLNNITETTEFTAKNMEGHEIPVVPFEYQRGFNKKRIDHRHHAMDAIVIACASRNIVNYLNNESARKKARISRYDLQKLLCDKVRTDDNGNYKWILKKPWGTLTQDVYAALDNVIVSFKQNLRVINKTKNYYVHYEAGKKTIAKQEKGSSWAIRKPMHKDTVFGEVNLRKVKTVSLNEAIKNPQCIVEKDFKKKLLSLLKQNFDAKKVKAYFEEHKDVWSDINLSKIEVYYFTKDTKERFFATRKPLDSSFDKKEIESVTDTGIQKILLRHLEQKNGDPDLAFSPDGIEEMNHNIVQLNGGRKHQPIVKVRVYEKADKFAIGQQGNKSSKYVEAAKGTNLFFAVYEEEVRDKKTNAVMLKRHYASIPLNVAIDRQKKGLSTAPEDENGNVPIFVLSPNDLVYLPTAEDIANASISFPINKNRIYKMVSCTGNRCFFIKHHVANVIVDKSEFSVLNKIEKAETDEMIKEICVPIKIDRLGNIVKIGVYK

SEQ ID NO: 5602 - protein, 1508 aa, synthetic construct
  REGION 1..1508: note = Synthetic
MKKTILGLDLGTNSIGWALIEQDFENKQGNILGMGSRIIPMSQDMMNDFGKGTSISQTAERTYYRSIRRLRERHLLRRERLHRVLNILGFLPEHYSKQIDFEKNLGQFLEETEPKIAYNNKDFIFKKSFEEMLEDFRMNQPELLNRKNKKGKDAKIPYDWTIYYLRKKGLTQKLQKEELAWLLLNFNQKRGYYQLRGEDDEDDTRSAQTRTYFDTQIISGIIDTGAIYKGLKVILIKLSNGDSGKYFSKEIPNWIGIEKNIIATIELDKDGNDKYEDDGTLKRKFSIPTEEDWEKKWKLIKIKTEREIKDSNKTVGTYIYDTLLQKPNQKIRGKLVRTIERKFYKEELKAILEKQIALQPELFTNELYNACVRELYRSNEAHQLQLSKRDFVHLFLDDIIFYQRPLRSQKSSIGNCSLEYRQYNQKDETGKEIEVKEYLKCVPKSNPYYQEFRVWQWLYNLKIYTKKEDKDVTHEFLKSNEDKENLFEFLMSKKEVNQKDILKHFFKDLKGKVQTAEIAKYRWNYVYDLGKDESKPYPMNETGYEIRKRLKEVANIPANFLTREIEQQLWHIIYSVTDKNEFETALKTFARKYQLDVNSFAENFSKFPRFKSDYGSYSEKAIKKLLPLMRIGKHWKWENIDIKTQARIDKLLTGEFDENIKDRVREKINKENLDNKEDYQGLPLWLAQYVVYNRHSEAADIGKWNSVEDLKTYLKEFKQHYLRNPIVEQVITETLRVVKDIWEKYGDGTKDFFNEIHIELGREMKNTTEDRAKITEQVSKNENTNLRIKTLLMEFAKDDSFKNQIDYSNYCKEEKNLTSYQKGNNPVRPYSQTQHDILKIYEEYALNDHTEEYLKNEKTGLTETKDGKSKEITIYDISQKSQPTKSQIEKYKLWLEQKYRSPYTGEIIPLSKLFTPAYEIEHIIPQSRYFDDSLSNKVICEEAVNKLKDNKLGLEFIKNPVLQTVEIGLGKTVNIFTEKQYREFVEEHYSKNKVKRNKLLLEEIPDKMIARQMNDTRYISKFVSAVLSNIVRADKDDDGVNSKNIVPGNGKITDRLKQDWGLNDVWNELILPRFERMNKLTNSEAFTAKNKEGHTIPAIPFELSKGFQKKRIDHRHHAMDALVIACATRDHVNLLNNQSAKSDNSRFDLQHKLQNTEKWIDKNGKERDKFTEFKKPWQNFTIDAKNELEKVVVSFKQNLRVINKSTNTYQKFENEKKVEKKQERVHWAVKKPMHEETISGIVKLSWLKVSEGEFTTATRKTLDKSFNKEKIKKITDTGIQKILLNYLREKGNDPELALSPEGIEELNKNISQYNNGKFHHPIFKVRIYEKGKGRFVLGEKGNKKSKYVQGSPNLYFAVYQEENGKRNFKSIPLNIVIERQKQGLSSVPETNEKGEKLCQECPYLSPNDLVYVPTTDELENNTKIDFKNLTNEQRKRIYNVNDFSSTCYFFPNTIAKPIAPKEIDLRYDEKENKPTGSFDTKTASLDGMQIKDVCIKLQVDRLGNISKV

SEQ ID NO: 5603 - protein, 1508 aa, synthetic construct
  REGION 1..1508: note = Synthetic
MARILGLDLGTNSIGWAVIDNEKKEIVASDSRIIPMDAGRMGDFEAGNTISQTADRTKARGARRLYERFYLRRQRLLRVLKIIGYLPEHYASTLDRYGNLPKGAEPKLAWREGKDGNPEFLFKPSFDEMVADFRREGYDGKIPYDWTIYYLRQKGLSAPLSKEELAWVLMQFNQKRGYYQLRGKTDEEDSSSTEKGEGKEYHELLVVKVENTGEKDKKGRIKYNILFENGWLWKRASNLAPDWEGKKRPIIATFKLDKDGNRKEEQPSSFSSPDEKSWGLRKIKTQHDIDQTNLTVGEYIYHLLLHNPKQKIIGEAVRTIDRSYYHNELIAILKKQTEYHPELKDRTLYKQCIQELYSSNEAYRNSIAVRDFIYLLVDDILFYQRPLKSKKNLISDCPYECYEYLDHKTNTTKSVPIKCIAKSHPLFQEFRLWQFLSNLRIFKDDQNITTQLLANDDDYANLYDYLLTIKEVDETTLLRHFNIEKKELSRYRWNYVHDKKYPMGETHAILMGGLKKANIDPHFLTSENEETLWHILYSIDDPKQYKEALHTFARKQGLTEEQRDEFVQSFQRLTIYKGKEYGSYSAKATKRLLSVMRRGRYWSVNAIDEETKQHIEHLISGEVDNVLTNRVREALSFISSIDHCKGLAPWQACYLVYGRHSEAADAQRWTSPEEIDRYLERFHHHSLNNPVVKQVITESLRTVRDIWQQYGRPDEIHIELGRELKKTAAERERLSQTIAEGEASNQRIRLLLSELKNPDFGVENVRPNSPSQQELLKIYEEGVFSQPKDIIFEDENEQKEIENIRLRFTAPKNQPTHTEVLRYKLWLDQKYRSPYTGHIIPLGKLFTEAYQIEHVIPQSRWFDDSLSNKVICESEVNQLKDRLLGHEFIVQHHGETVSLSLGGQVEILSVGDYEKLVKETFASNRHKREKLLLDEIPDSFTSRQMNDSRYISRLMMHLLSNIVRTEDEENHIEDTVISKNVIALNGSITDRLKHDWGVNDTWNRVILPRFQRLNEITSTTNYTAVTNGHLIPQMPLELRQGFNKKRIDHRHHAMDAIVIACCTRDHVNLLNNESAKSNIRYDLNHKLRRIDTYTGNDGQQHETFCEFIAPWPTFATDLYDTLQNMVVSFKQNLRVINKTSNRYFIFKDSRRILVKQEKGDSWAIRKPMHKETVFGEVNLQLKRPVKLKEAILNPSAIVDRELRAKIKEKLSLHYSAEDLISFFEKNTDTWPEVKNGKVEVYYYTKEDVDANGQPKVRYFATRKALIDVVGGCVTIADAEKAIKSITDSGIQSILRAHLAAEGGNPIEAFSADGLERMNQNIRQLNGGRYHQPIKRVRKYESSAKKRSISDKGQKATKYVEAAEGTNLFFVIYTDSKGNRGYVTPPLFDIIRLQKIYEKQWKQHIAELDSVPSNAKILYILSPGDLVYVPADGEQPTVDTLDRSRIYKVVSCDDVYISCIPHSSAQPILNKVEYESLNKMKTTLDKQQMIREFCIPIQVDRLGNIIKIG

SEQ ID NO: 5604 - protein, 1477 aa, synthetic construct
  REGION 1..1477: note = Synthetic
MKRVLGLDLGTNSIGWALVENNFEEKEGKIIGLGSRIIPMDQGILGKFGEGNSISQTADRTKYRSARRLRERQLLRRERLHRVLNVMNFLPTHYSTNIDFKNKLGQFKKNTEPKLAWRKSSEGKYDFIFKDSFKEMIEEFKSNGINTNIPYDWTLYYLRKKAINQKVSKEELAWIILNFNQKRGYYQLRGEEEEENKNKLVEFYSLKVIDVNKDDVSNKKGEAWYSMTLENGWVYKRSSKTDLSDWKGKIKDFIVTTDINDDGSIKTNKEGDEKRSFRAPKEDDWTLVKKKTEQEIKLSGKTVGQYIFDNLLKNPEIKIKGKLIRTIERKFYKAELEKILDTQIKLQPNLFNEEIYHASIRELYKSNASHQVELMKRGFKHLLINDIIFYQRPLKSQKSLIGNCTLEKRFFKDKEGNVQIQNLKVIPKSNPYYQEFRVWQWLYNLKIYTNENNKNVTESFIKNQKDLVKLFDFLMTKKEVNHIDLLKFFIEPAVKEKFPKAKPKAFKNELLKEIAKYRWNYVYDSDKNESKYYPMNETGYEIKRRLSKVIDVPKNFLTQEVELQLWHIIYSVIDKIEFKKALITFAKKHKLNEESFLDNFLKFKPFDSEYGKYSEKAIKKLLLLMRAEKYWEWERIDDKIKDRIDKIITGEYDKEIKNRVREKSINLTQKDHFQGLQLWLAQYIIYDRHSESENNDYWSTPNDIEEYLKEFKQHSLRNPIVEQVVTETLRVVKDIWKNYGNGGENYFDEIHVELGRDMKNSADSRKHLSDIISKNENTNIRIKTILNELLNDSSVENVRPYSPMQQEALKIYEDGILNSGIEIPDEIEKISKKSEPTKSEVQRYKLWLEQKYRSPYTGRPIPISKLFTSAYEIEHVIPQSRYFDDSFTNKVICEAEVNSLKDRQLGLEFIKNHFGQKVHTTFGEVEILSEGAYTDFVKENYQKNRNKRDKLLLEEIPEKMIERQLNDTRYISKFVSSLLSNLVRSTKNDEGINSKNLIPLNGKITNKLKHDWGLNDVWNELILPRFERLNKITNSNDYTSWNEKHQKFLPTVPLELARGFNKKRIDHRHHALDALVIACASRNHVNLLNNKHAKSKNERYDLQHKLRNTAVWIDDQGHKRTKFTTFKKPWNSYTSDSKSKLEEIIISFKQNLRVINKATNYYEKIIDNKKTKVKQDGLNWAIRKPMHKEMVYGKVDLPRIKVPKGKVLTAIRESLDPSFKTSRIESITDSGIQKILLNHLQTYDEPRFNFSGNKVSEQISKRKELIKNKQLKEHPELAFSPEGVQDMNNNITNLNDGKLHQPILKVRVFEVGSKFQVGYDGNKSRKYVEAAKGTNLFFAIYWDENKQKRNFETIPLNVVIERQKQGLSSVPEINERGHHLIFHLSPNDLVYVPDIDDIHSRKSIINSKNIYKMVSSTGSECHFIHANIAHLIKTYESKTKIGELGSLNKQELTLDNTIRIKEQCLKLKTNRLGEVLV

SEQ ID NO: 5605 - protein, 1510 aa, synthetic construct
  REGION 1..1510: note = Synthetic
MKRILGLDLGTNSIGWAVINKSIDENGNETFKGIEAAGSRIIPMDAAILGDFDKGNNVSQTRNRTQARGVRHLYERARLRRERLHRILSLIGFLPEHYAIQLDRYGKFLPDKEPKLAWCKNEVGKYQFLFQNSFAEMLEEFKKHNPDFVANEVKVPYDWTIYYLRKKALTQKIAKEELAWILLNFNQKRGYYQLRDEEEEQVSAKVRQYFDRQQVVDIIDTKELYKGMNIYRVVLANGIAGKVFKKEMPDWLGKEKDIIVTVDIDKEGKDKHEEDGSLSCRFKVPSEAEWETEWKLIKEKTQHDLDASGKSVGEYVFDTLLYNPMQKVRGKLVRTIERKYYKDELIQILRKQKEFHSELNDSGLYQKCLEELYANNPAHRNLMASHDLSYFLINDILFYQRPLKSKKALIDNCPYEGHEYLDKETNAKKYVPVKCISKSHPLFQEFRLWQFVSNLRIYQKEKLVGDKVKTDVDVTQEFLKNEDDYVALFEWLNNRKEIKQEQFLKYPPFGLKKEVGKYRWNYVEDKIYPCNETHSMMLTRLEKAGISANFLTSEHEEALWHVLYSVSGKEELKLALKSFAAKHGLDTPFVDAFLNTPPFEKTYGSYSAKAIKKLLPLMRMGHYWKAENIDTHTRERIDKIMTGEYDESIRNRVREKAIHLTELSSFKGLPLWLACYIVYDRHSESREINNWKSPAEIDEFLAGFKQHSLRNPIVEQVVLETLRTVRDIWKQNGQIDEIHVELGREMKNPADKRRKMSQKMQENENANLRIKALLVEFMNPELGIENVRPYSPSQQDLLRIFEEGAWNASCATDEQYDEMLAILKKFNESDAKKRPTASDIKRYRLWLEQKYRSPYTGVVIPLSKLFTPAYEIEHIIPKSRYFDDSFSNKVICESEVNKLKDNQLGYEFIKNHHGEKVQLSAGATVQILSVEAYERLVKDSYAQARAKMKKLLMDDIPEQFIERQLNDSRYISKLVISLLSGVVRTDDEQEAVSKNVVVCTGGVTDRLKKDWGINDVWNKIILPRFERMNQLTGTSDFTSSNTSGHAIPAMPLHLQKGFNKKRIDHRHHAMDAIVIACASRNIVNYLNNESASEKSKISRYDLQRLLCTKVKEGEGYQWLVNKPWNTFTQDVYDVLKQLVVSFKQNLRVINKTVNYYQRKENGKTILSKQTKGDNWAIRKPMHKDTVYGEVNLRKEATAPLKVVMANPMKVVDKDLKHKLVELLRKGWNEKQIKNYFEEHQDSWQELNLKKIPVYYFTKETKERFFASRKALDATFDEETIEGSVTDTGIQTILLRHLEAEGGKPEVAFSPEGIERMNKNITALNGGRKHQPIYKVRKYEKADKFAIGQKGNKSSKFVEAAKGTNLFFAVYEQEQVDKKSGEIVKKRTFATIPLNVAIYRLKNGLSPAPEDENGKLPAFILSPNDLVYVPTPDELRERKYPDGVNPERIYKMVSCTESEAHFVPASIASPVLQIVELGSNNKAQRAWTSEMIKEICIPLQVDRLGNISFKI

SEQ ID NO: 5606 - protein, 1266 aa, synthetic construct
  REGION 1..1266: note = Synthetic
MKHILGLDLGTNSIGWAVISSSFDETTQKEQLKGIEAAGSRIIPMDAAQLGDFNKGNTVSQTANRTQFRGVRRLYERKKLRRERLHRILQLLGFLPKHYANQLDRYGKFIANSEPKLAWTTNTHGLPYFIFQSSFQEMLNDFLQNNSQIKKVPYDWTLFYLRKKALIQKIEKEELAWVLLNFNQKRGYYQLREEETEKASSKTRQYFDSQIVTDITDTGQVYKGLKIFTITLENGEKGKFFSKNMPDWKSQKKDIIAIIDLDKNGNDKYDENGELSRRFKIPTEQEWEEQWELIKTKTQKDLDTSHKTVGAYIYDTLLQTPSQKIRGKLIRTIERKYYKDELNQILKKQEEFHPELRDSNLLEACIEELYPNNEAHRNAIAKYSIAQLLIEDILFYQRPLKSKKSLISNCPYEEYTYINKETGEICTSPLKCIAKSHPLFQEFRLWQFISNLRIYQKEGTINGKFTTDIDVTSQFLKTEDAYANLFDWLNQKKEIRQDTFLKNPAFGLKKNTANYRWNYVEDKTYPCNETHYKILSYWEKAGIEQSALTSEIEEKLWHILYSISDKNELRKALQHFADKNYLSDKFADTFQQIPPFEKDYGSYSAKAIKKLLPLMRIGRYWKAENFDSTTLDRIEKILTGEFEENIKNRTREKTIHLDNLYSFQGLPTWLACYIVYNRHSEIKDVTKWQQPSDIDAFLNAFKQHSLHNPIVEQIIMETLRTVRDIWKQTGHIDEIHVELGREMKNPAEKRRKLTQQIQENENTNLRIKALLAEFANPELGIENVRPHSPSQQDLLRIYEEEALNETKDIPEDIAVILKKFNEVDTKKRPSTSDVLRYKCWLEQKYRSPYTGAMIPLGKLFTPAYEIEHVIPQSRYFDDSFTNKVICEAEVNKLKGNMLGYEFIKNNQERIVELGFGQNVKIQTVEAYELFVKEHYSYNRTKMQKLLMEDIPDQFIERQLNDSRYISKLIKSLLSNIVRDEGEEEATSKNVIVCTGSITDRLKKDWGINDVWNKLILPRFIRLNEITESNRFTTTNACNKTIPAMPLDLQKGFNKKRIDHRHHAMDAIVIACANRNIVNYLNNESASKNAKISRQDLRQILCKKTKTDNLGNYQWLIDKPWDTFTQDVYSILGNIIVSFKQNLRIINKTTNHYIHYENGKKVSCSQKQGDSWAIRKPMHKETVYGEINLRRTTTATLKAVLENPQRIIEKDLKKKIKELLTQGLNEKQIKKYFEDNKDIWQEINLKKIPVYYLPKKLPTDSLLAVNQ

SEQ ID NO: 5607 - protein, 1515 aa, synthetic construct
  REGION 1..1515: note = Synthetic
MRNILGLDLGTNSIGWAVVGSEASENGEERLTGIKGAGSRIIPMDASILGDFAKGNTVSQTADRRIKRTARRMNERFILRRERLHRVLNLMGFLPEHYAASIDRYGKFIDDKDHKIAWRTNSDGRQEFVYQKAFNEMYEEFKAHNPEFLKNGGKIPYDWTIYYLRKKALTSPVSKEELSWILLNANQKRGYNQLMGMDEQDEQEDKSTRVEYLSSVIVEVTDSGDKRGKATWWNCKLDNGMVYKRPSEVKPDWEGKTKEFIITTDLDKDGNPKLNKFGEIQRSFRMPGENDWTLIKTRTEDQVNKSGEYVGEYIFNALLKEPTQKIRGKLVRTIDRDFYRAELKAILIKQAGFIKELTDRDLYLQCIEELYPNNDSYRNSIASKDFTYLLADDIILYQRPLKTKKNLIDNCPYESHTYSDKETGEVKTAPVKCIAKSQPLYQEFRLWQFVQNLKIYDNLSGEDETSFFIPTEAKRVAVFKYLNDIASTDQESFLKEFFGIKRPKCKDSNLPYTWNYVQDKKYPCNETRGPILSRLKKSGIPSSFLTNEIENELWLILYSSESRKELEEALRKFAGRHGLDETFVDNFKKFPAFEKDYGAYSAKAIKKLLPLMRMGEYWSEAAIPDEVKANIEDIIKGKFADSIPQKVREQLSTYKEISSFKGLPLYLACYVVYGRHSEVSDSQLWTRPEDIDVYLNNFKQHSLHNPIVEQVVTETLRTVRDIWRSFGKIDEIHIEMGRDLKNPAEKRKKDLMRSIENENTNMRIRALLMEFTNPDFKIDSVRPYSPSQQDIFRIYEETALRGENNLPDYVLDVLQNFGRGKTEQPSHAEVLKYKLWLDQKYRSPYTGQPIPLGKLFTTAYEIEHVIPQARYFDDSFNNKVICESEVNKLKSNMLGHEFIEKHGGEIVPLNMGGSVRILTKTEYEDLVKRFYANDRMKAKRKNLMLDDIPEAFINRQLNDSRYISRLMLGLMSNIVRKEGESEATSRNVITTNGSITDRLKVDWGIKDTWNRLILPRFRRMNQITGTSDYTRINRNGHEIPNVPEAVSKGFVIKRIDHRHHAMDAIVIACASRNIVNYLNNSSACKGAKISRYDLQHLLCNKLLQGDGSYSWVIKTPWPGFQNDVFNALNNIIVSFKQNLRVINKTTNYYQHYKDGKKVIVRQVNGDSWAVRKSMHKDTVFREVNLRMIRQENLKSVVEHPDDVVNRDLREKLKEFVLKGTSLSNIKDYFAQERDAWSDVDLKKIDVFYFSKDDKDPKTGLPKHRFFSTRKPIDTSFTEEKIKTQITDTAIQKIMLAHLAENGNDPKVAFNPDGIERMNDSIARLNGGHMHQPIFKVPYFEEGNKFSVGSEGAKAKKFVEADKGTNLFFAIYENEVEDKKTGEIKKVRYFSDIPLNVAIDREKQGLTPASEDENGKKPIMVLSPGDLVYVPTEEEIKAGKLEPSIDRGRIYKMVSAGQGKCYFVPQSVASVIKDKVEFESHNKSMKTIEGNTYIQKVCIPVKVDRLGHIISINDMI

SEQ ID NO: 5608 - protein, 1661 aa, synthetic construct
  REGION 1..1661: note = Synthetic
MFFNSEINTIMKKILGLDLGTNSIGWAVVNAEETIRENETSYLKPTGISAAGSRIIPMSADILGDFEAGNSVSQTKDRTDKRGARRLLERYLLRRERLLRVLKLMGFLPEHFAKQIDENGKFINHSEPKLAWRKDEQGKFEFVFKDSFEEMLEDFAQHQPQLVADSKKVPYDWTIYYLRKKALTQRLTKEELAWVLLQFNQKRGYYQLRGEDEEEKTTSKTRQYFDRQIIADIIDTGQKYKELKVLNIVLQNGDVGKIFKKEVPNWIGQEKSIIAIVDIDKDGNDKYDENGQISRKFKIPTEAEWDSEWKLIKMKTEEDLNNSHKTVGCYIYDNLLQKPNQKIIGKLVRTVERKYYKEELRQILETQVALIPELKDATLYNRCIEELYPNNEAHRNNIAKPDFANLFINDILFYQRPLKSKKSLISDCPYESHFDKDGNEHPVKCIAKSNPLFQEFRLWQFVQNLRIYQRERTVSDGQLDLFGNQSAGKLQTDVDVTNELLKTEEDYVKLFDWLNDRASIKQDTLLNSYFKFKKEKGKDQYPYRWNYVEDKDYPCNKTRAAILAKLDKTEKEKLSSELTFKIWHLLYSVSTKAEIDSVFSESKRNKQNRHKNGTTTDGVYKILLDTGFSSETINKLKNIKFDEKDYGSYSEKAIKKLLPLMRMGKYWSVEAIDDRTKERIDKILTGEYDENIKNRVREKSINLPDITHFRALPVWLACYIVYDRHSEAKEIGKWEKPEDIDRYLKDFKQHSLRNPIVEQVVTETLRTVRDIWKQEGQIDEIHLELGREMKNPADKRKKMTERILENENTNLRIKALLMEFMNDPEIENVRPYSPSQQDILRIYEENALDNLTKNDKDFDFVSKISKSAQPSKADITRYKCWLEQKYRSPYTGEMIPLAKLFTSAYEIEHVIPQSRYFDDSFSNKVICEAEVNKLKDRQLGFEFIKNHKGEKVQISQGKVVEILSVEAYEKFVKDHYSSNRAKMKKLLMDDIPDGFIERQLNDSRYISKLVKGLLSNIVREKLENGEYEQEAVSKNLISCNGSITDRLKKDWGMNDVWNSIVLPRFRRLNELTGKISDDELVAEFKRLFEEQLIVCSKSRNESINSSYTDYYKSLGEKEQKKVIDEVMKKLPIKESFLSVNNEGHIIPNMPLELQKGFNKKRIDHRHHAMDAIVIACATRSHIQYLNNESAKTENRKLQVGLAKQLCSFKEVEYKKKVKNENGVWVESEEKIKKNVPDKFLKPWDSFTTDAKHALENIVVSFKQNLRVINKTTNSYQHYDENGKKVMVKQKKGDSWAIRKSMHKDTVFGEVNLRFVKQVPLNEAIKTPKRIVNKDFKKKVIELLDAGRDAKYIKKYVEDNKDIWSDIDVKKIAIYYFSQEIKNENGNVKERYFASRFGNDLVSVFKGISDVETAKEKIKKITDTGIQKILLAHLEAKGGNPELAFSPDGIDEMNRNIVALNKGKFHQPIVKVRVYEKAEKFAVGQNGNKATKYVEAAKGTNLFFAIFGTEKTNKETGETETVRSYLTIPLNVMIDCQKKYGSQWRNCIEIYLQEQQLVTSDAKLLFILSPNDLVYLPTKVELKEGINSIDKSKIYKSVSFTGSRLYAIPFSVAKVIVDKTEFTQLNKVEFTDDKSSIKETCLPIKVDRLGNVIELNGKKIES

SEQ ID NO: 5609 - protein, 1529 aa, synthetic construct
  REGION 1..1529: note = Synthetic
MKKILGLDLGTNSIGWALVDAENNKIDGMGSRIIPMSQDVLGKFDSGVSISQTAERTGYRGVRRLRERCLLRRERLHRVLNILGFLPKHYRESIDFEMRFGQFVKDSEPKLAWKEIAPKKYDFIFKASFNEMVAEFKKLKPELFELKENGVERKIPYDWTIYYLRKKALTEKIEKEELAWLILNFNQKRGYYQLRGEEQEENKNKQEKFHTLLVTDVVEREKGKSGTWYNVVLENGWIYKRESKVSLSNWIGKTRDFIVTTELNDDGSVKLNKDNEEKRSFRSPKEEDWGLVKIRTEQTINQSGKTVGEYIYDSLLENPTQKINGKLVRTIERKFYKEELKAILEKQKEFHAELQNTELYTLCLKELYKNNESHRNSIATKDCTYLFLEDILFYQRPLKSKKSLIANCQFESVKYKGKDKEGNDIEIRQPLKCIAKSHPLFQEFRLWQFIQNLKIYERERMVDGKLKLDVDVTSEFLKTEDDNVALFDWLNDRKDIKQDTLLTSYFKIKKNRGEDKLPYRWNYVEDKEYPCNETRSLFLSKSAKIEGFDATFFNEANTEALWHILYSVTDKIEIQSAINKFAGKHDLPDEFIKQFANLPPYKSDYGSYSAKAIKKILPLMRMGKYWDDKNIDDKTKERIDKIIDGEFDEKIKDRVRDKAINLTDINHFRGLPLWLASYIVYNRHSEAKDIVKWETVKDLAWFLDNRNPEGFKQHSLRNPIVEQVITETLRTVKDIWQQYGNGAENFFDEIHVELGREMKNPADKRKAMTEQINANENTNLRIKAILEELKNAGISDVRPFSPTQQEILKIYEEGIYSYESKKEELEVIDKIRKSSKPTKSEIQRYKLWLEQGYISPYTGAMIKLSDLFTTRYEIEHIFPQSRFFDDSLSNKVICESEVNSLKGNQTAMEFIKKHHGQIVPLKGGTDVRIRDVLDYEDYVKRYFSKNKTKQRNLLSEEIPEGFINRQMNDSRYIAKVVKTYLSNIVRQTEKGELEQEATSKKVVSVTGSITSQMKQDWGLNDVWNHLITPRFERLNTLTNSSAFGQWELKGGKNGGEGKRAFQTTVPVEIAKGFSKKRIDHRHHALDALVIACITREHINYLNSINSERKNYSLVSKLRRLEEVMIKDQLRKVPKEFHKPWENFTQDAQAALENIIVSFKQNLRVINKSVNKYQRYENGEKVFAKQTKGDSWAVRKPLHAETVSGKVILGRIVEKEVAINRVLEDLDSIVDPIIKKELKNRATCYKNNIAGLKKYLKVNPIIIDGQEVVKVNIYVTESIEATATRKILDTTFDEKRIEKITDTGIQKILMKHLNQDIYQNATDEAGKKIPSHELAFSEEGLEALHKNMLTLNNGKPHQPIKKVRVFEEGRKFALGTRGNKKDKYVEAAKGTNLFFAIYIDQDGKRSYETIPLNEVIERQKQGLDVAQSTEGKTLLFTLSPNDLVYVPTDDEVENPHWVDFRKLTKEQVSRVYKMVSSTAYQCFFTPYYIATPIIQTVELGANNKSERTWNGSMIKEVGVKINVDRLGKVN

SEQ ID NO: 5610 - protein, 1604 aa, synthetic construct
  REGION 1..1604: note = Synthetic
MKSKKILGLDLGTNSIGWALVERSEASSKIIKLGTRIIPMDAATLGDFEKGNKVSQTAERTKFRSVRRLRERFLLRRERLHRVLNILGFLPRHYSKEIDFDKNFGQFINESEPKIAYYSTPNPDSLKERKTDYNFLFMDSFKEMIAEFKKTQPQLFYIKTNGKETKIPYDWTIYYLRKKALTQKIEKEELAWILLNFNQKRGYYQLRGEEVEEKVNKKVEYYSLKIIKTTLDETSSKNDEKWYHFELENGWVYKRTSKAPLDWTGKIRDFIVTTDLNDDQTEKLNADGTVKRSFRSPKEDDWGLLKIKTENEISLSGQTVGEYIYERLLVNPLQKIRGEYVRTIERNFYKAELRKILEKQVEFHSELKDPKLYKACCEELYEVNEGHRKSLSGKDFSNLFLNDLIFYQRPLKSKKSLISNCKFEKRVFLKNGEKCYEHLKCASKSHPLFQEFRIWQFLENLKIIRLSDDVDVTEQFLKSEEDWVKLFDWMNCRKDIDQKAFLKYSEFQLKKEASLYRWSYIENDKSYPCNETRSAMLSRLEKAGIDQVFLSKEKEIELWHLLYSVNDKEELSSGLKRYSEKNRLSQDFVKEFIKFPPFKSDYCAFSEKALKKLLPLMRRGSYWSESSIHAETKVRIEKIIDGEYDEKIKDRVRTKAKQLDTIEKFYGLPVWLASYVVYDRHSEDSDLIHWRIPQDIDDYLKNGFKQHFLRNPIVEQVIAETLRVVRDVWNFYGNGKEKFFDEIHVELGREMKNPADKRKSITESNIKNETTNLRIRAILMELFNDKNIENVRPYSPSQQEIMKIYEDGVLQSYSEIPEDILKISKTSEPSTAEINKYKIWLDQKYISPYTKSVIPLSKLFTSAYEIEHIIPQSRFFDDSFSNKVICESAVNKDKDNRLAFEYIKQEGGKKIDIGNGKFVTIIKENEYIEFVNKTYVANRIKKRNLLLEDIPDSFVQRQLNDTRFISKVVKNLLSNILREEDELESVSKNLISTSGMITSVLRQDWGMNEVWNELMSPRFERLNALSNSNDFGTINPKTKKFLPTVPLALRKGFNIKRLDHRHHALDALVVACVTRDHINYLNNESALGKESNDVKLKKRYDLRAKLCTKKFNEGSETHYRWVFNLPWKNIVVETKEMLENTIVSFKQNLRIISKTVNYYDKLEKDAEGKLKKVRKKQVKGENWAVRKPLHKDTVSGIISLQRKKLVNISVALENHLSIVDPSLRKQISKLFELKYDLSKVKKFFKDNNNQWDGKDVSRVEIYYFNSNLAASRTTLNDTFTETYIKECVADSAIQKILLNHLKLYENRKDEKGKLIAPESLAFCQEGIEDMNKNIKLLNDGKDHKPIFKVRTYETLGNKFSIGNTANKSKKFVEAQKGTNLFFGIYQDTNGKRIFETIPLNIVVDRTRKNLKPVPEKNIEGDELIMSLSPNDLVSLVGENIDKNLDAPGRKFIDYYKLVSFSGKQCFFIQANIASSIIDKAEFSALNKMEKSIHGIMIKEKCIKLNVDRLGNISPIHSQHDIPNNNPEKFEIESNHAKEPDSAYGQSGKISFFKDHEDRAGSEAKYNASLSMEECLSMTLGLMKQVFGERLIGKNFPGKLMIKKL

SEQ ID NO: 5611 - protein, 1503 aa, synthetic construct
  REGION 1..1503: note = Synthetic
MKRILGLDLGTNSIGWALIEQDFDNKEGSILRLGSRIIPMSQDVLGKFDSGLSHSQTEERTGYRGVRRLYQRDNLRRERLHRVLNILGFLPKHYADSIDFIRNLGQFKPGTEEKINYRQDESGKYKFLFMRSFNEMVSDFKQKQPQLFYVKPNGQETKIPYDWTIYYLRKKALSQRIDKEELAWIILNFNQKRGYYQLRGEEIDEDKDKQFIQLKVKEVLDTGEKVKGNTLYNVIFENGWEYDRQITKVEGWEGRTKEFIVTTKTLTSGEVKRTYKAVDSEKDWIAIKAKTEQDIDQSDKTIGEYIYDTLLHTPTQKIRGKLVKTIERKFYKEEFRKIIFRQIELQPELFTKELYEKCIEELYPRNEAHRTSIQDKGFEHLFTEDILFYQRPLRSQKSNIAGCQFEFREYKKKNEKTRKEEIVKEPVKAISKSHPLFQEFRLWQWLQNLRIYNKETIIDGKEKDLTADLLQTEDDWTDLFDFLTTKQTVEQKHIIDYFIKKKSLNKANKDNYRWNYVYDEEKKESKKYPCCETRVQFTSRLNKVEGIENTNYFLSEKTRVGKKENSPLISREEQLWHIIYSVKDLNEYKSALQKFAQKHSINEDSFVEHFIKFPPFDSDYGSYSKKAIEKLLPLMRVGKYWDEVFIDDNTSNRIQKLIDGEYDEKIKNRVREKTISLSERSDFRGLPLWLASYVVYDRHSEIGEIQQWEMSYDIQNYLYEFKQHSLRNPIVEQIVTETLRVVKDIWEYYAEKDNVPYEMVYDERKKKKVRSYHKFFEEIHVELGREMKNPADKRKQISQRISENENTNYRIKEILQELMNDPEVQGEVRPYSPSQQDLLKLYEEGIYQNPDVKYDKVSEDEVQKIRRNNNPSKNDIIRYKLWLEQGYISPYTGKPIQLSKLFTREYDIEHIIPQSRYFDNSLSNKIICERDVNDDKGNKTAYEYLKEKGGESINGHRLFKLEEFESHVSKYFKNNKLKLKNLLSEDIPEGFINRQMNDSRYISKLIKGLLSNIVREQNEREATSKKLIPVTGTITSKLKQDWGLNDKWNEIIAPRFKRLNVLTKSDKFGFWDKEINAFRIQVPDEISKGFNKKRIDHRHHALDALVVACTTRNHTHYLSALNAENKNYGLRDKLLIKNEKGDYTKTFQMPWVGFPVEVRKALEETVVSFKQNTRVINKTINKFWSYTGENGNFNKGKDGKPKKKLRKQTKGDSWSIRKSLHKETVSGLYNIDTPKGKIATSVRTALSEIKNEKQLAKITDQRIREVILPNHLKNYLDEKRKAQYDLAFSEEGIEDLNKNIVQLNEGKNHQPIRKVKQFEIGSKFQVGETGNNAKKYVEAAKGTNLFFAVYWDKEKQKRNFETIPLNEVIAHQKQVAHLPKEERTPIQPKPEKGEFMFTLSPNDLVYVPTDEEIENPSLVDFENLNKEQTNRVYKMEKASGNECYFIRHDIAQLIKQYDAKTKLGELSSQNKLETTMDFDKIRIKEICWKLKIDRLGNISKAKK

SEQ ID NO: 5612 - protein, 1489 aa, synthetic construct
  REGION 1..1489: note = Synthetic
MATRKILGLDLGTNSIGWAVVNQNMDSQSIASAGSRIIPMDAALMGDFESGNSVSQTANRTAARSTRRLFERRALRRERLNRVLSILGLLPPHYAQELNRYGQLNKGVEPKLAWIVEGTKPTFLFQSSFEEMMHDFAVAQPQWVANGKKIPYDWTIYHLRKKALTSPITKQELAWILLQFNQKRGYHQARGEEEEAKPNEKKELVTAKVLEVRDTGEVSKGRTWYEIVLETGDIYRRQSAYPLDWVGKTKDFIVTTKLNEDGLEAIDKEGRPKRSFSAPQEDDWGLRKIKTEHDIAQSGKTVGEFIYDSLLQNPDQKIIGQLVRVVDRQLYKEELRRILDAQKQFIPELQDPDLYRQCIEALYPQNEAYRNSIANKDFTYLLLQDIIFFQRPLKSKKSLINECPYEYHVYKAKNGDWKRQYLKCISKSHPLYEEFRLWQFVENMHIYKTDANGIGKSDCTADYIPDKAALVKWLLTQKEVTEKSLLSKFAGKKAKDLSWNYVSDKKYPAAPVTATLTAIIAEAGGTTNNEELHHIWHILYSVSDKEQLTQALMHYAEKHNLSPVFVEKLSKQKPFAADYGAYSEKAVRRLLSLMRCGEYWEETDIDPQTKQRIDHILTGEVNETISDTVREKLKDMNGMVDFQGLPLWLAEYVVYDVRKNDTKWETPEDIDRYLQSFRLHSLNNPIVEQVVMETLRTVRDIWKQEGHIDEIHIEMGRELKQNAEQRKQTLSRQSDNEKANLRARLLLQEFMNPDMNIEGIRACSPSQLEIFRIYEDGVLNNPDIDKDDDIQRIIKELSELKQPSASDVKKYRLWLEQKYISPYTGQPIPLAKLFTPAYQIEHVIPQSRFFDDSMSNKVICEAEVNARKDRMLAHEFITKCGGEKITLSGGKVVTVLTTQAYEDLVRDTYKSNPRKQEKLMLDDIPEKFIARQMNDSRYISRLMLGLLSNIVREKNAKGEYEPESTSKNVIACNGSTTTRLKKDWGINDVWNHIILPRFERLNQIQNTTIFTTTTANGHTIPNMPLELSKNFEKKRIDHRHHAMDAIVIAFTTRNHVNLLSNEAALEKDEKARYDLQMQLRKRETWTSPNGKSHTKFTDFIAPYEGFQQDVQTTLENIIVSFKQNLRIINKSNNHTVHFEDGKKKSVKQKKGDNWAIRKSLHKATVFGKVNLRFRKTAPLKYALTHLNDIVDKDLRLKLRELVAQGYDEKHIKKYFAENKDVWADINPQKIEVYYYTNDTPDNYYATRTAIGDWLDEKSIWEKVTDTGIQKILLAHLSQCNGDPKEAFSADGIEKMNQNIVALNGGVPHKPIYKVRKYEKADKFAVGEIGSKSKKFVETDKGTNLFFAIYATTNADGKEVRSYATIPLKAVIDCQKRGKKEWKSLLDQWVHDNNLVPANATLKYIISPGDLVYLPKEGAATIDKTRIYKMVSSTGNQCFCVPCSMASPIINKIEFSPLNKMERALTGEMIKETCVPIRVDRLGNIISLEP

SEQ ID NO: 5613 - protein, 991 aa, synthetic construct
  REGION 1..991: note = Synthetic
MKKTMLVLIKKITLNSVLKNNIMKTILGLDLGSNSIGWAVINSVIEKQSERIWIKMAGSRIIPMDSAVLGDFDKGSSISQTAERTHFRGVRRLRERQLLRRERLHRVLKILGFLPEHYLKEIDFEKHPGQFLTNCEPKLPWLIDERGKYTFLFQAAFNEMLADFAKHQPSLVSDGKKVPYDWTIYYLRKKALTEMISKEELAWILLNFNQKRGYYQLRGEEEEDAAGKSVEFYALKVLSVEATDEKKGRDIWYNVHLENGWIYRRSSNVPLDWENQVKEFIVTTDLNPDGTPKFDKYGEVKRSFRVPKEDDWMLIKKRTEADIANTRKTVGSYIYDTLLQKPQQKIIGKLVKTVERKLYKEELNLILQKQCAFHAELRDRDLYMRCIEALYPGNEMRRKNIVNRDFIYLLIDDILFYQRPLKTKKTLISNCPYEENEYVNRETGEIKKAPLKCIAKSHPLFQEFRLWHFLSNIRVYQKEKKVNGTLHLDVDVTAEFLRTEDDYVALFDWLNSRKEIDQKAFLKYPKFGLKKEIDNYRWNYVEDKLYPCNETRYAILSRLEKVGVSIDFLSDEKETVLWHILYSVSDKQEIEKALRTFAVKNGLNESFVEVFKKFPPFKSEYGAYSAKAIKKLLPLMRCGKYWDTSLIDDATRDRIERIITGEYDRNIAAKVREKAINLSDIYCFKRLPLWLACYVVYNRHSENKEIAKWETPADIDAYLASFKQHSLRNPIVEQVITETLRVVRDIWKQVGKIDEIHIELGREMKSPADKRKRMTAQIQENEKANLRIKTLLVEFMNPEYEVENIRPYSPSQQEILRIYEDTVLKREEPIPEDIDAILKKFNNSKLPTKSEFLRYKLWLEQKYRSPYTGELIPLGKLFTTAYEIEHIIPQSRYFDDSFSNKVICESAVNKLKDNQLGYEFIKNHHGQKVEVGFGKKVEILSVDSYERFVKEQYAKSSVKMKKLLMDDIPEQFIERQLNDSRYISKVVKGLL

SEQ ID NO: 5614 - protein, 1515 aa, synthetic construct
  REGION 1..1515: note = Synthetic
MRYNMKEKHILGLDLGTNSIGWAIVKETTDANTTDVQKSIADAGSRIIPMDAAMQSDFAKGNTVSQTHDRTQYRGVRRLRERQLLRRERLHRVLTLMGFLPKHYANALTRFGKFKPEMEVRLPWNNDLEGNPQFIFMKSYEEMLQRFWSEQPELMHNNMKVPYDWTIYYLRQKALREPITGQELAWILLNFNQKRGYYQTRGEDAETDKTKEEKYYALEVIDVVDTGEKRGKDTWYNVFLENGMIYRRTASEKPDWIGKVKEFIVTTPLDENGMPKKDKEGEIKRSFRMPNSEDWGLQKIKTENDIHQSGLTIGEYIFRALLQNPKQKIIGGLVRVVERDMYKDELRQILEKQKEFIPQLRDAQLYADCIAELYQHNEAYRLSIANRDFTYLLLNDIIFYQRPLKSKKSMIDECPYEYHEYKDENGETKKRHIKCISKSHPLYQEFRLWQFVNNLKIYTSGKDAEGREIDDIDVTSDFLPDEESRANLFDFLNDITNIKQDELLTKYFKIKKPKGKGAKLPYHWNYVQDRQYPCNTTRGEIVSRLSKAHIETSFLNDKRAELHLWHILYSVSDRIELRRALSSYATQYALDKDFVEAMAKFPPFDSEYGAYSAKAIKRLLPLMRMGHHWHLEDIDPQTVERINHIIDGEVDETISERVREKAADLTEIGQYRGQPLWMACYVVYGRHSESTDSAHWRTPADIDAYLSAFRQHSLRNPVVEQVVTETLRTVRDIWEKHHHIDEIHIEMGRELKSPADKRRKDTERMLNNENANLRIKALLTEFLNPELGIENVRPYSPIQQEILRIYEDTVLNSVDELDNDISNILKKFADAKNRPSTNEVKRYKLWLEQHYVSPYTGQPIPLARLFTPDYEIEHVIPQSRYFDDSMTNKVICESEVNKLKDNALGFEFIKQHHGETIQLSGGRHAVRILEVDSYCELIERIYHNNRTKKRKLLMDDIPAEFIERQLNDSRYISKLVKSLLSNIVREEDEQEAISKNVIVCTGSVTDRLKKDWGINDVWNHIIIPRFLRMNELTDSQNFTSNSANGHLIPAMPLELQKGFNKKRIDHRHHAMDAIVIACTTRDHVNLLSNEAASPKSNTNRYQLSRKLRRYEDIVVNRSDGPKRISVAKEFMLPWIGFQTDVERALRNIIVTFKQNLRVINKTSSHSLRIVDGKKKLVAQTSGDSWAIRKSMHKETVHGEINLRRIKTSSLKDAMQNPQRIVNSDLRAKLKELIMHGYDEKMIKKYFDTYRDSWQDVNLKKIELWYFTKETADRFFATRKSIDTSFTADAIKNKIADTAIQKIMLRHLERYNNKADLAFSPDGIDEMNRNITELNDGHFHQPIYKVRTYEKADKFAVGHTGNKKSKFVEAAKGTNLFFSIHEDDIIDKTTGDIIKKRSFKTIPLNVAIEKMKSGLPIDEEATFILSPNDLVYLPTEAERKSGKITMPIDKERVYKMVSSNKFQAFFINERVASAIQDKFEFSPLNKMERAITGEMIKETCIPLKVDRLGNIIKIGV

SEQ ID NO: 5615 - protein, 1522 aa, synthetic construct
  REGION 1..1522: note = Synthetic
MKEKDKIILGLDLGTNSIGWAIIKHNNINNGGEILAAGCRIIPMPQDVLGKFDSGVSLSQTAERTGFRSTRRLRERHLLRRERLHRVLNLLGFLPEHYKNAIDFEKRLGQFLPETEPKLAYYKTPENPKATFIFKKSFEEMIADFKQHQPQLLANERKVPYDWTIYYLRKKALYNKIEKEEIAWLLLNFNQKRGYYQLRGEDEEEAADKLVEFYSLKITDVTDSGDRKKDEIWYNVLLENGWVYRRTSRAPLDWIGKTKEFIVTTELNPDGSIKKDKEGKERRSFRAPAENDWTLVKKKTEHDIDKSKKTVGEYIYDILLQKPGQKIKGRLVRTIERKFYKEELKLILQKQKEFHLELQDNELYSICLEELYQHNSAHQESIANKDFTHLFLEDIIYYQRPLKSKKSLISKCRFEERVYIKDDKKEIKRLTCIAKSHPLYQEFRLWKFIQNLRIIQKEKQINGKLQTDVDVTVEFINSTKSFVTLFEWLNEKREITQKDFLKYPLFNLKKNADNFRWNYVEDKIYPCNETKWLIKSRLDKIRDIPPGFLTPQREEALWHILYSVEDKTDIEKALKTFASKNDVREGFVEHFKKFPRFEKDYGAYSAKAIKKLLPLMRAGKYWSEHAIDPATKERVEKIINAECDENIKNRVRDKAISLTELSHFQGLPEWLACYVIYGRHSENADTKKWKIPGQIEMLPQHSLRNPIVEQVINETLKVVGDIWKHYGCSEEGFFDEIHVELGREMKNTKADREKISKQVTENENTNLRIKALLVEMLNDGDVENVRPYSPMQQDILKIYEDGVLNAEDGKIPDEILKISKMALPTQSEIIRYKLWLQQKYRSPYTNSIIPLNKLFTPAYEIEHIIPRTRHFDDSFGNKIICEAAVNKLKDNRTAFEFILSEGGTIVETGLGKQVTILKKDVYEDFIKQNYSKSRGKMKRLLMEDIPEAFIQRQLNDNRYISKIVKNLLSKIVREEGEEETTSKNVILGNGVITATLKQDWGLNDVWNEIITPRFERLNTLTKSQNFGEWVNKEGKRVFQTQVPLEFQKGFIKKRIDHRHHALDAIIIACATRSHINYLNNESALGKKTKEEKAKKRYDLREKLCDKKYNGPENYKWVFKKPWIDFTVDSKGSLNEIVISFKQNNRVINKTINHYQKWQKGVDSGVAKQVIRQESGENWAIRKPMHKDTVSGLVKLKLNKTITIAAALDELEMIADKPFKKFIVGLKQQGLDKKKIIQLFKENDNKWNGVDISKVEVFYWDLDSNGLGNNAASRVAVNESFTKDMISYITDTGIKKIMLTHLENYNEIKDGKIIEHPELAFSPDGLDALNRNIQVLNNGKPHKPVYKVRTYEPKGNKFNVGQTGNKKHKYVEAAKGTNLFFAVYKDSNSNKSYETISLNIVIERLKQKLTPVPEKNIHGHLLFMYLSPNDLVYVPEEGEEVDWNNINSSKKRIADRIYKMVSSTSYQCFFIKHNVATSIVNKVEFLATNKMERSIDGVMIKECCIKLNIDRLGNIKPVAGILQ

SEQ ID NO: 5616 - protein, 1555 aa, synthetic construct
  REGION 1..1555: note = Synthetic
MFSQRNNPYCELLQISMANIQKKKQCTSGFSIFFVRFVVNIKISITMKRILGLDLGTNSIGWAIINMFIDKEGNESLCGIESAGSRIIPMDATILGDFAKGNKVSQTQNRTKARSTRRMYERGHLRRERLHRVLAIMGYLPVDYLSQLDRYGKFLPNREPKLAWYMDDANIPHFLFQDSFQEMLDTFKKYNPSVVAGSHKIPYDWTIYYLRKKALYQKIQKEELAWILLNFNQKRGYFQLRDEVAEQASTKTRQYFDRQQVVDIIDTQEIYKGMKVLRVVLSDGTQGKIFKKEIPDWIGQVKDIIVTVDIDKEGKDKYDEDGSLSCRLKVPSETEWETEWILVKEKTQYDLETSGKSVGEYIFDTLLHNPMQKIRGKLVRTIERKYYKEELYRILAKQKEFHSELNDRKLYERCLEELYPNNPSHRNLMAAHDLSYFLMNDILFYQRPLKSKKSLIDNCPFERHEYIDKVTNERKFAPVKCIAKSHPLFQEFRLWQFVSNLRIYQKEKEVNGRLMTDVDVTQEFLRNEEDYVALFDWLNERKEIKQEQFLKYPVFGLKKDAGQYRWNYVEDKSYCCNETRALMLVRLEKAGVSRDFLTLEREEALWHILYSVSSKQELKLALSSFAKKNDLDIKFVDAFVNTPPFEKSYGSYSAKAIKKLLPLMRMGHYWKADAIDVHTRERIDKILTGECDEGIRNRVREKTLHLVDLPSFKGLPLWLASYIVYDRHSEAEEFCRWKSSQDIDEYLKTFKQYSLRNPIVEQVVLETLRTVRDIWKQVGRIDEIHVELGREMKNPSEKRKKMAQKMLENENTNLRIKALLVEFMNPELGIENVRPYSPAQQDLLRIYEEGAWNASNADDGLRDEMLGILKKFNESDAKKRPTPSDIKRYRLWLEQKYRSPYTGAVIPLSKLFTPAYEIEHVIPKALYFDDSFSNKVICESEVNKLKDKQLGYEFIKKHHGEKVQLSLGGVVEILSVDAYEQFVKENYSQNRTKMKKLLMDEVPEQFTERQMNDSRYISKLVVSLLSNIVRDEEEQEVQSRHVVVCTGGVTDRLKKDWGVNDVWNKIVLPRFERMNQQTGTSDFTSVNTNGRMIPAMPLHLQKGFSKKRIDHRHHAMDAIVIACASRNIVNYLNNQSAGENGKASRYDLQHMLCTKTQDGDGYQWVVNKPWETFTEDVYETLKDVIVSFKQNLRVINKTSNYYQRKENGKTILSKQDKGDNWAIRKSLHKETVYGEVNLRKISNATLKAVLTNPKVIVNKDLKRKLIEFISQGYSEKQIKNYFEEHKDSWREVNLKKIPVYYFTKDTKERFFASRKPLDESFNKDAIGSITDTGIQAILLRHLEEEGDDPKIAFSPEGIERMNKNMVRLNEGHQHQPIYKVRKYEKGDKFAVGTKGNRSSKFVEAAKGTNLFFAVYEQEQFDPNNGEIVKKRTFATIPLNVVISRQKRGECSAPADGNGNLPLFVLSPNDLVYVPTWEEVKSGQLPANPHPDRIYKMVSSSGNQCFFIQYGVSGMLWDKNEFSALNKMERSITGEMIKEICIPLKVDRLGHVAYKL

SEQ ID NO: 5617 - protein, 1493 aa, synthetic construct
  REGION 1..1493: note = Synthetic
MKKILGLDLGTNSIGWALVDNNVEGEGNIIGLGSRIIPMTQDVLGDFEKGNSISQTAKRTGYRGVRRLRERHLQRRERLHRVLNILKFLPKHYSEKIDFNIKFGKFLPGTETKLSYNESNDFIFKTSFKEMLKDFEKSQPELISNQKKVPYDWTIYYLRQKALSAKIEKEELSWLLLHFNQKRGYYQLRGEDEDLNQNKLVEFHSLKIVEVKADEPIKSKTEIWYSLILENGWIYRRSSKIPLYDWKNKTKNFIVTTDLNEDKTVKTDKDGKEKRSFRAPGDDDWTLLKKKTETEIEKSHNTVGQFIYNSLLQNPNQKVKGKLIRTIERKFYKEELFLILQKQVEFHPELKNVDLYNECINALYIHNEGHKSNLSKKNFVNLFLEDILFYQRPLKSKKSLISNCPFENRTYFFEGAKKSEPIKCISKSHPLYQEFRLWQWIQNLKIYTLSEDSNVTSEFLTSEDDYINLFDFLNEKKEIKQETLLKHFKINAKKYRWNFVQDKAYPCNETHFMIKNRLEKLVELPANFLTVEIEEKLWHIIYSVNDKIEYEKALKTFAKNNKLDEDSFFESFKKFPPFANDYGAYSAKAIKKLLPLMRMGKYWNFSAIDKNTKIRIENILTGEFDENIKNRVREKAIRLNNESDFKGLMLWLASYIVYNRHSESENNSKWNSVNDLENYLEQFKQHSLRNPIVEQVVTETLRVVKDIWNKYGNGEKDFFSEIHIELGREMKNPADKRKQIAESNTLNENTNLRIKALLLEMLNDSKVENVRPYSPIQQEILKIYEEGVLNSDIDIPDEIEKISKLAQPNTSDLVRYKLWLEQKYRSPYTGAIIPLNKLFTSAFEIEHIIPQSRFFDDSFSNKVICETAVNKEKTNQTGFEFIKNHHGQIIEIGSGQKTRIFTEDEYQDFIKQHYSKNRSKRNKLLMEDIPEKMIERQMNDTRYISKFIMQLLSNIVREDSSKDDGVNSINLLANNGQTTSILKNDWGLNDIWNDLILPRFERLNEITSSEKFTTYNEKFQKYLPCVPLELQKGFQKKRIDHRHHAMDALVIACATRNHINYLNNQNALDKNKNKVQKQSAREDLRTILCFKKFNYGSEKNYQWIFKQPWKTFAADAKYKLETAVVSFKQNVRVINKSKNKYEKFVKRNGIWIKEKVYQTKGESWAIRKSMHKDTVAGHVNLRNCKTVNLSNAIDNWELLVDKNLKTKIKKLINDGFDKKKIIKFFSELEFKWMNVDITKPEQYYFSDEKEVLVASRVNLDSSFNSLKISSITDTGIQKILLKYLEIKQNNPEIAFSQEGIEEMNQNLSNLNNGKPHQPILKVRTFEPKGNKFCIGQKGNKKDKFVEAAKGTNLFFAIYNDENGKRSYDTIPLNIVIERQKQGLSPCPEVNDKGNSIAFYLSPNDLVYIAKSEEIENPKIIDFQNLKKEQFGRIYKVVSFSGNRLYGISYNVAKSIVDKVEFTMMNKLEFSIDKYSIKQFCLKLKVDRLGNISI

SEQ ID NO: 5618 - protein, 1600 aa, synthetic construct
  REGION 1..1600: note = Synthetic
MCFYAMIPQEEKALRTKKRRFRKTKPPLLMFSQRNNPYCELLQISAAKIRFFSKPHKLFKDFCTFGCKKKKIIQQMKKILGLDLGTNSIGWAVVNEAETADGEKKLVGIECAGSRIIPMDGSIIGDFEKGNSKSQSATRTAYRGTRRLLERHLLRRERLNRVLNIMGFLPSHYSKMLTRYGKFIENTEPKLPWDDGKFLFMSSFEEMCELFRASTNNPEIKVPYDWTIYYLRKKALYAALTKEELAWVLLNFNKKRGYYQLRGEETESKNQRIEYCCLNVVKVEKGEDAKDGTWYSVYLDNGMIYRRKSKYPLDWEGKSKEFIITTDLDENGNERKDKEGNVKRSFRSPKEDDWTLLKAKTDADILQSKKTVGCYIFDALLQNPSQKIVGKLVRVIERKFYKDELRQILDKQKEFISELNSKQLLERCAQELYTVNEQHRDIVSQRDFTSLFIDDIIFYQRPLKSKKSLIANCQYEYHSYKKLDKNGKYIKDENGNDLLFNSPLKCIAKSNPLFQEFRLWQFISNLRIYQKEKYDGNKLHTDVDITTQFLKTEEEITALFDWLNTLQSIDQKKFLQYPPFKLKKEASKYRWNYIEDKQYPCNETRYTILSGLKNAGITDTLNQEDENALWHILYSISDKNELKSALTKFANKHSLAMEFVEVFSKVKPFNKEYGSYSEKAIKKLLPLMRVGKYWSKDTIHEETVRRIDKLLTGEFDETIKNKIREKTINLKRIEDFKGLPIWLACYVVYGRHSETKDITKWETPEDIDNYLKKFKQHSLRNPIVEQVVTETLRTVRDIWKQVGHIDEIHLELGREIKKTAEERKRLSDTIIENENTNLRIEQILSELAEDGIKQIRPYSPSQKEIMKIYESYALNNDKKDEGKTLSKSSISKYKAWLEQKYQSPYTGETIPLSQLFTPAYEIEHIIPQSRYFDDSFSNKVICESEVNKLKDNMLGYEFIEQHGGEIVTLNGGKTVRIFTTEQYEKFVSEHYSGSKKKKLLMADIPDEFIERQLNDSRYISKHIKGLLSNIVREKDANGEYEQEAVSRNLISCTGQITDTLKKDWGMNDVWNRIIFPRFERLNTLTDTTDFTTKNTEGHDIPTIPFEIKKGFNKKRIDHRHHAMDAIVIACATRNHINLLNNEAAHSKYSSTRYQLSYKLRKREKYQKNGEERETFKEFFKPWDTFTEDAYEVLQNIVVSFKQNLRVINKTTNVFEHYNNERKKELRHQKQGDSWAIRKALHKETVFGEVNLRKRKTVSLLSAIQTPSYIVDKELKKKVFELITAGMQNKDIKKYFSENTDTWQDEIKDDKVEVYYFTKETNDRYFATRTTLDTSFDDKKIDSITDTGIQKILRKHLHSDKHQGDPQIAFSPDGIEDLNKNIQTLNRGKAHKPIYRVRIYEKADKFAVGEHGNKSKKFVEAAKGTNLFFAIYETNDKNGQLCRKYATIPLNDVINCQKEYQKNWQAEITTILKKRGDIDNNSMLLFILSPNDLVYLPNKEEQENRIYHFNKERIYKFVSCSGNKADFIPAYSANTIFSMTKKKQKEIFKDENHFPIQDEYGVGSPKSKNERAITGEMIKEICIPIKVDRLGNIVGIKQNKP

SEQ ID NO: 5619 - protein, 1531 aa, synthetic construct
  REGION 1..1531: note = Synthetic
MKQILGLDLGTNSIGWALVKQNFITKEGNIDGLGSRIIPMTQDVLDKFGSGQSISQTAERTGYRNTRHLYERSHLRRERLHRILNVLGFLPEHYQKQIDFDKHLGQFKEEVKINYKPIDEGRFEFLFIDSFNEMINEFKTNGIYKNLPYDWTIYYLRKKALSQKIDKYELAWLLLNFNQKRGYYQLRGEEETEDDNKSFEVLKVERVEDSGERIKGKGDVLYDIYFENGWRYDKQTTKPEDWLHKTKEFIVTTKTLKDGSVKRTFKNVDLEKDWIAIKKKTEQDIYQSKKTVGAFIYDTLLTKPTQKIRGKLIKTIERKFYKDELRQILQTQIKYHPELQDRELYKACVEELYPKNKAHKNNIENEGFDYLFLDDIIFYQRPLKSKKSSIGTCQFEYRIFKRINNETGEIKKEKQFLKVIPKSHPLFIEFRLWQFLRNLKIYHKQDKINVDVTQECLQNDEEWCDLFDYLNDRKEVDQKNIIDYFVKLNRLDKRKKDEYRWNFQEDKKLPMNETRAQFLSRLKKVKNFDINDLNYDFLEHLWHIIYSVKDKRQYESALKTFAYKYNIDEESFVEHFIKHPPYSSDYGSYSQKAIKRLLPLMRVGRYWNREDIDTDAIERIERIVERIKHLQIEEGSISDNKLKEAIAKVADDEIPARFIKSFLMFKDKNPLAGLNTYQAGYAVYERHSELSDITQWKTAEDIDNYLANFKQYSLRNPIVEQLVMETLRTVRDIWLYYGDGKEGFFDEIHVELGRDMKNSADKRKSISDRNSERERTNERIKELLKELQEDYKEADIRPFSPSHQEILKIYEEGIYKNPSTKYDKVSEDDIQKIRRKNTPTKKDIEKYKLWLEQGYISPYTGQIIPLSKLFTSAYQIEHIIPQSRFFDDSMNNKVICESAVNEAKSNQTAYAFLKSRGGDVVDLGNGQSVPLLRIKDYEDHCSRYFKKNRQKLNYLLSEEVPEGFIERQMNDSRYIAKVVKSLLSNIVRLDNEQEPTSKKLLPTPGSVTSRLRHDWGLNDKWNEIIAPRFKRLNTLTKSQDFGFWDNEINAFRSMVPDELAKDFNKKRIDHRHHALDALVIACTTRDHTHYLHALNAEKENYSLRDKLLIKNKHNDYTKHFQLPWKSFTEDAKSALEQIVVSFKQNLRVINRTNNRYQRWVKQGDGSYKKKLVAQEGKNFAVRKSMHKETVAGKVQVKRIRKSVITLNNALEQWHLIVDKDVKQKVKKVMSVYGHDVKKVKKYLRNNPITIDGKEITKVKVYEIVEATATRIVLTDKFTEKQLQSVTDSGIRRILKNHVEKYKDDKGKTDYSMAFSPEGIEEMNKNIQSLNGGKPHQPIYKVRVYEEGSKFAVGETGNKVSKYVEADKGTNLFFAIYWDAEQQKRQYETVPLNEVIAHQKEQSKLKNAKKTPIPVKPEKGVFMFSLSPNDLVYVPTADEIDNPALVDFSHLTVEQVKRVYKFVSCTKSEGHFVPMTISKEIIKNENGTNSKNERVQEIHLSELDEKNKPKMIKSICWKLKTDRLGNIIKVIK

SEQ ID NO: 5620 - protein, 1444 aa, synthetic construct
  REGION 1..1444: note = Synthetic
MQKNILGLDLGTNSIGWAIVAEDEDQKRILHAGSRIIPMDAALMGDFESGNSISQTANRTAARGARRLYERHALRRERLNRVLSILGFLPEHYTECLNRYGQLNKGAEPKLAWQIIDGRYTFLFQESFHEMLRDFQQTHPELLVNGRNIAYDWTIYYLRKKALTQPITKQELAWILHQFNQKRGYNQARGEEEDLKPNERKELITQKVVSVRDTGEVSKGRTWYEVTLDNGMIYRRQSAYPLEWEGKTKDFIVTTKLNDDGTDATDKEGHVKRSISAPQEDDWGLRKIKTQHDIDTSGKTIGEFIYDALLHNPDQKILGQLVRVVDRSYYIQELTRILETQKQYIPELQDTNLYRECIHALYPHNEAYRNSIAGKDFTYLLLKDIIFYQRPLKSKKSLINECPYEYHLYRDKDGTLQRQYLKCISKSHPLYEEFRMWQFVENMHIYREAANGLSKEDCTAEYISDKANLVTWLLTQKEVGESTVLTHLAGKQKKGLSWNYVSDKKYPAATVTATLTSVIQDAGGTPDYSEIEHIWHILYSVSDKAQLTAALKHYEEAKGLSSVFSEKLGKQKPFDADYGAYSEKAIRRLLSLMRSREYWNEESIDAHTKARIEHLLTGEVDDTISARVREKMATMNQLSDFQGLPLWMAEYVVYDVRKNDTKWDKPEDIDAYIQSFRLHSLNNPIVEQVVMESLRTVRDIWRQEGHIDEIHIEMGRELKQNAKQRKEALQRQQENENANLEAERKLVEFLYPKKPSVQDIKKYRLWVEQNYVSPYTGQPIPLAQLFTSAYQIEHVIPQSRFFDDSMTNKVICEAEVNARKDRMLGHEFIVQCSGEKITLTGGKVVQVLSPAAYEDGIKQNFAGNKRKQEKLMLDDIPEKFVARQMNDSRYISRLMLQLLSNIVREKISETEYEPESTSKNVIACNGATTTRLKKDWGINDVWNRIILPRFERLNRLQNTSAYTAMAANGHMKPTVPIELRNGFEKKRIDHRHHAMDAIVIAFTTRSHVALLSNESALNNDERARYDLQTKLRKRELWRSADGKEHTKFTDFIEPYEGFQKDVQTVLENIIVSFKQNLRVINKSNNRSLRFVDGKKQMVRQTQGRNWSIRKSLHKATVFGEVNLRKKKYATLSYALQHIDDIVERDVRTKLRELVQQGMDEKQIKKYFASNPTILPDVNLRRIEVYYYTNDTNDRYYAVRKPLSDAFTADYITDSITSDGVRRILLAQLERCNNDPKQAFSADGIEQMNADIVQLNRGVPHKPIYRVRTYEKADKFAVGQTGAKSKKFVEADKGTKLFTFVYERINNDGTKSRKLVALTLIDVVNAQKDFGTKWIPSLNEKLQRTGLSPSEWSFAFVISPGDLVYVPSDDEIKNGQYVFAINRIYKVVSLDGENPNFIPANIASMIVDGQEFTRHNKTSRDADGRLIKEFCIPIKTDRLGNIIKI

SEQ ID NO: 5621 - protein, 1475 aa, synthetic construct
  REGION 1..1475: note = Synthetic
MKTILGLDLGTNSIGWALIQQDFDNSEGQILGMGSRIIPMSQDILGEFGKGNSVSQTADRTGFRSTRRLRERFLLRRERLHRVLNILGFLPKHYSADIDFERRLGKFLEDKEPKIAYENNQFLFTKSFGKMLVDFRQHQPELLKDEKGKDLLIPYDWTIYFLRKEALSRKIEKEELAWIILNFNQKRGYYQLRGEEEEENANKLVEFHSLKITDVFADEKPNSKGDTWYSLHLNNGWVYRRSSKTPLFDWKDKVRDFIVTTELNDDGSVKKDKENNDKRSFRAPLENDWTLLKKKTEQDVAKSGKTIGTYIYDALLEDPKQKIKGKLVRTIERKFYKDELRQILQKQKEFHPELQNTDIYIDCIRELYRNNEAHKIQLSKKDFVHLFLDDIIFYQRPLRSQKSSIGNCTLEYRKYKDAEGVENIEYLKTVPKSNPYYQEFRIWQWINNLSIYRKDSDENVTGEFLESVDDRVILFEYLNHRKEIEQENLIKYLLGQKGVKGKALKAESEKYRWNYVENKSYPCNETKALIISKLEKVNDLPLDFLTGEVEYKLWHIIYSVNDKADYEKALKSFAEKHKLDSESFVNAFRKFPPFRSEYGAYSEKAIKKLLPLLRIGKYWSLANIDTKVKGRIGKIITGEFDEEIKNKVREKAEKHKLVEESDFQGLPLWLAQYVVYGRHSEAGLEGKWNSVDDLKKYLKEFKQHSLRNPIVEQVVTEILRVVGDIWQQYGNGVKGFFNEIHVELGRDMKKTAEERAKLTRQITENENTNLRVKALLAELLNDTSVENVRPYSPSQQEILKIYEDGVLNSDIEVPEDIQKISRIAQPTKSELQRYKLWLEQKYRSPYTGEMIPLGKLFTHEYEIEHIIPQSLFFDDSFSNKVICESAVNKLKDNQLGLEFIKNNPGRIVEIGFGKTVKVLDEVSYRHFVIHSYSNNRSKKNKLLLEEIPEKMIERQMNDTRYISKFVLSVLSNIVREEANDDGVNSKNLIPGNGKITSELKQDWGLNDVWNELILPRFERLNELTGSKDFTTWNENHQKFLPTVPLALSKGFTKKRIDHRHHALDALVIACVTRNHINFLNNEHALHKKKSKTEKQKFRHDLRTALCFKKYNDKSGKDYQWVFKKPWNDFTLDSKSALDKIIVSFKQNLRIINKATNNYEKWTDRDGSKVKELHKQDGVNWATRRHIHKDTVSGKVDLKRIKVPNGRVLTATRKSLDSSFDLKAIESITDTGIQKILKNYLRSKSNNPELAFSPEAIEDMNKNIRKYNDGKLHQPIYKVRVFELGSKFPLGQTGNKKTKYVETAKGTNLFFAVYQDKNKNRIYESIPLNEVIEHQKWKATLPVEQQKDLPPVPIKPEKGDLLFWLSPHDLVYVPTDDERENFSRIKLNKLTKDQTRRIYKMVSCTGGECHFVPFAYASPIANNECGTNNKNERLMQFFKEDDLLEVDNKGVKKPIMIKANCVKLRVDRLGNILLYS

SEQ ID NO: 5622 - protein, 1467 aa, synthetic construct
  REGION 1..1467: note = Synthetic
LKSLSSYFKISLKTALSSRGMIMKKILGLDLGTNSIGWALIQQDFDKKQGNILGMGSRIIPMSQDILSEFGKGNSVSQTAERTSYRSTRRLRERHLLRRERLHRVLNVLNFLPEHYANQIDFEKKFGKFKAESEPKLAYHNNQFIFKRSFEEMLEDFKKHQPELLTGESGKEKLVPYDWTIYYLRKKALSQQIDRQELAWIILNFNQKRGYYQLRGEEEEENPNKLVEFYSLNVVDVIPDEETNKKGENWYSLQLENGWTYRRSSKTSLNDWKGKTRDFIVTTDLNDDGTIKTDKEGNEKRSFRAPGENDWGLVKKKTEQEIEQSHKTVGAYVYDALLQNPKQKIKGKLVRTIERKFYKEELRTILKKQIELQPELFTEDAYTDCVRELYRNNDAHQLTLSKKDFLHLFLNDIIFYQRPLRSQKSSIGNCTLEYRNYKVDEIEKKEHLKAIPKSNPYYQEFRVWQWLYNLKLYKNEDDTEVTNEFIKDQTDKEKLFDFLMLQKEVDHTDILKYFFKELKGKVLTNEVGKYRWNYVYDSDKKESKKYPMNETGYEINRRLSKIETTPINFLDRETEQKLWHIIYSVTDKKEYESALKTFAQKHHLDIESFVDHFRKFPPFKSDYGTYSEKAIKKLLPLLRIGKYWSFNSIDNKTKNRIDNIINAVDDEGIKLLVREKAEKHKLETEADFQGLPLWLAQYIVYDRHSEADIAGKWNSITDLEKFLADFKQHSLRNPIVEQVVTETLRVVKDIWQHYGNGRENFFDEIHIELGREMKNTADERKRLTNIVTENENTNIRIKALLIELMNDATVENVRPHSPMQQEILKIYEDGVLNSNIEVDDEYLKISKKAEPTKSELQRYKLWLEQKYRSPYTGQIIPLNKLFTHEYEIEHIIPQSRFFDDSFSNKVICESAVNKLKDNQLGLEFIKNHYGQKVSTGVGKEIPIFNEDQYRDFIKENYSKNKSKRNKLLLEDIPEKMIERQLNDTRYISKFISNVLSNIVRSKQDDDGVNSKNVIPLNGKITSELKQDWGLNDVWNDLILPRFERMNALTNTDLYTTYNEKYQKFLPTVPFEHSKGFQKKRIDHRHHALDALIIACATRDHINLLNNQSAKSALKRYDLQNKLRSKERYFHPIENREKEAFKSFFKPWDTFTEDTKKSLETIIVSFKQNLRVINKATNKYEKWIEKNGEKKKELVEQTGVNWAIRKSMHKDTISGKVELPRIKVPKDKILTATRKHIDSSFTQKTIESITDTGIQKILQNYLLSKDGNYELAFSPEGIEDMNKNIAKYNDNKPHQPIYKVRIFEIGSKFSLGQTGSKKDKYVEAAKGTNLFFAIYQDENGKRNYATIPLNEVIERQKQGLSSVPETNDKGNKLLFSLSPNDLVYVPNEDEITSMIDFNHLTREQTERIYKMVSTTQDKLECVPVHYASPIINNEIGSNNKNQNTIYGTQVKAVCIKLKVNRLGTILKT

SEQ ID NO: 5623 - protein, 1537 aa, synthetic construct
  REGION 1..1537: note = Synthetic
MKKILGLDLGTNSIGWALTEQDFKEKSGKILGIGSRIIPMDQTSIGDFEKGNPVSQTADRTNFRGIRRLRERFLLRRERLNRVLYKLGFLPEHYSDQIDFDCHFGQFLNHAEPKIAYQLNAETGKYEFLFKDSFDEMIEDFKKIQPQLFENNKKIPYDWTIYFLRKKALTYPIAKAELAWLLLHFNQKRGYYQLRGEDEDDSKNKLVEFHTLKVVEVLDSGDRKSKEEIWYNVVLENGWIYRRTSRTPLDWVGKIKEFIVTTDLNDDGSIKTDKEGKEKRSFRSPGADDWTLVKKKTEAEIERTNHTVGTYIYDTLLQSPGQKIKGKLVRTIERRFYREELKLILDKQQTFHSELQDKKNYTACLEELYRNNQDHRNTYSQKDFTHLFINDIIFYQRPLKSKKSEISECRYESRSYLDKEGILQNDALKCIARSHPLFQEFRLWQFLQNLTIYQREKYIDGRLNTDINVTSEFLKSEEDWVALFDFLNDRKEIDQKAFLKYPAFNLKKNVELYRWNYVEDKTYPANETRSQMLTKLKTSDIAPEFLTKDIEEQLWHILSSIDDKIEIEKALTTFAGKRSLPKEFIENFKKFTPFKKEYGAYSAKAIKKLLPLMRRGKYWSDEAISIDTKKRISAIVERLDSIDYEKNRIANIADDDIPKQVLKSFIDCRNPLTALNTYQACYAVYGRHSEEGEVVKWEVPIDIEHYLNDTFKQHSLRNPIVEQVVTETLRVVTDIWKQFGNGEKDFFDEIHIELGREMKNTADQRKRLTSVVTENENTNLRIKALLAELKNDNTVQNVRPYSPSQQEILKLYEEGVLSAVADIPDEILKISKNAQPTSSELTRYKLWLDQQYRSPYTGEIIPLGKLFTSSYEIEHIIPQSRYFDDSLSNKVICESVVNKDKDNKTAYAYIKEQHGKIIELDFGKKVTLFTLDAYEDFVKNRFAKNRSKMKKLLMEDIPDDFINRQLNDTKYISKLIKNLLSNIVREEGEVETTSKNIAACNGSITSTLKQDWGLNDVWNELITPRFERLNDLTKSNNFGHWTNKDGKRVFQTEIPLELQKGFTKKRIDHRHHAMDALVIACASRSHINYLNNESAKSTSKESRYDLKQKLCFKTKPDENGNYKWSFYKPWDTFTQDARHTLSTTIVSFKQNIRVINKTSNWYQRWETQDDGSLKKVFTKQKTGDHWAIRKPMHKETVAGLVQLRFKKTVQLSAALDQWEMMVDKSLKNQIKTLVKQGFDKTKLRKFFKELEDKWDGNSISKVEIYYFEKEMVASRSSINEAYNTNFIKSITDTASQKIMLNHLEKYNETKDGKVIEHPELAFSPDGLDEMNKNIVQLNDGKFHQPIYKVRTFEPKGNKFNVGTTGNKGQKYVEAAKGTNLFFAIYQNSEGKRSYESIPLNIVIERQKQGLKPVPETNDKGEQLAFYLSPNDLVYIHPKDDTNSKFHIDFANLSLDQVNRVYKIVSFTGSRLYAIPNNISSSIVDKFEFSQLNKLEGIEGVSIKETCEKLQVNRIGQITSINNKPILNKTLKVEESLT

SEQ ID NO: 5624 - protein, 1528 aa, synthetic construct
  REGION 1..1528: note = Synthetic
MKKTILGLDLGTNSIGWALIEQDFENKQGNILGMGSRIIPMSQDMMNDFGKGNSISQTAVRTHYRGIRRLRERHLLRRERLHRVLNILGFLPEHYSKQIDFEKRLGQFYKATEPKIAYNNKDFIFKKSFEEMLEDFRMNQPELLNRKNKKGEDAKIPYDWTIYYLRKKGLTQKLQKEELAWLLLNFNQKRGYYQLRGEDDEASSNIKEYVEILKVVKIEKGNADKKKDKKFWYKITLENGWIHESTFSIEPQWLGKEKEFLISEKFDDNGNIKIIKDRKKDKEGKEDRKISPLPTFEEIDLMSKKDQDKIYKKIKVKTELMISKSGKTVGSYIYDTLLQNPNQKIRGKLIRTIERKFYKEELIAILKKQIELLPELFSRDLYNDCIRELYRNNESHQFTLSKRNFVHLFVEDILFYQRPLKSQKSSISSCNLEFRPMKDKNGALLKDTNGNQVVKPLKVISKSHPLYQEFRVWQWLYNLKIYKKEDNTDITPEFIKSIDDVENLFAFLMTKKEVNHKDILDYFITPIIKEKFPNAKPKALKDEIAKEIGKYRWNYVFDDSQEKEEDKSKKYPMNETGYEIRKRLGEVSNVPNNFLTPEIEQRLWHIIYSVTDKKQYEAVIENFVKRYNKKQNTKIEEKKFKEAFIKFPPFKNEYGAYSEKAIKKLLPLMRLGKYWKWEAIDNKTKNRIDKIITGEYDHEIKNRVREKAIHLTEKNQFQGLQLWLAQYIVYDRHSEAALTGKWKLVSDLEEYIHNFRQHSLRNPIVEQVVTETLRVVKDIWKKYGHGMENYFDEIHIELGREMKNTSEERKKITNQFTENENTNHRIKQLIIELKDNSDGKLPVENVRPYSPMQQEALKIYEDGVLNSDIEIPDDIIKISKTAQPTKAEIIRYKLWLEQKYRSPYTGEIIPLSKLFTEAYQIEHIIPQSRYFDDSLSNKVICETAINQLKDNQLGLEFIKSHHGEIVETSNQNKVKVFSEQEYKDFIKQHYSKNNGKRNKLLLEEIPDKMIERQLNDTRYISKFISNMLSNIVRADKDDDGLNSKNLIPGNGKITSILKQDWGLNDVWNELILPRFERMNELTNSKDFTTWNESHQKFLPTVPFELSRGFQKKRIDHRHHALDALVIACATRDHINLLNNIYAKSKERFDLNRKLRRFEKVQYTDKITNKLIEKEVPKNFLKPWNTITEDTREMLEKIIVSFKQNLRVINKTTNKHEKLVLQNGKKIKKLIPQKKGDSWAIRKPLHKDTVYGKVELQGIKVSRGKILTATRQGNDLLSIFKDVQTKEKAEEIILKITDTGIQKILKNYLASKNNNPELAFSPEAIEEMNKKISQYNNGKPHQPIYKVRIFKETGEQFPLGQLGNKKNKYVTTAKGTNLFFAVYADRDGRRIFDTIPLDKVIERQKQGLTSVPETKEGDNKLLFHLSPNDIVYVPTEDEKENINGIDFTNLNKQQVKRVFVVNDFSSTCYFTPNHLANNIAPKEVDLSFDTKKNKVSGSFDTKTASFEGVQIKEVCIKLKVDRLGNVYKV

SEQ ID NO: 5625 - protein, 1487 aa, synthetic construct
  REGION 1..1487: note = Synthetic
MKNILGLDLGTNSIGWALVQSDEKSNTGKIIAANSRIIPMDQGIIGDFDRGNSISQTADRTQYRGTRRIRERSLLRRERLHRVLHVLYFLPIHYANEIDFEKKLGQFKNYAEPKINYIQEQGKNIFLFRSSFEEMLNDFAKNNSLLIADNKKIPYDWTIYYLRNKALTHKIEKEELAWIILNFNQKRGYYQLRGEDDENEKEGQTEEFFSLKVVDVIDSGDRNKDNIWYDVILENDWVYRRQSKVFLDWKGKTKDFIVTTHYDKEGNIKKRSFRAPSENDWTLLKKKTEKDIENSQQTVGTYIYHSLLNNPEVKIKGNLVRTIERKFYREELKQILDKQKEFHEELKNRSLYSACIEELYPRNENHKESIKEKDFTYLFVDDILFYQRPLKSKKSSIATCALEYRIYKDKEGKYQKVPIKCIPKSHPLFQEFRLWQFIQYLKIYQREGEIDGKLTTDIDVTSQLLPTEKDWQDLYDWLCEKAEIKQDILLKYPKFGLKNKVNQYRWNYVEEKIYPCNEFHSTVHSRLQKAGIPNFNKEDELALWHILYSIDDRIDLTKALISFAKKKHLPDTFVEIFKKFPPLKKEYGAYSEHAIKKLLSLMRLGEYWSANNIDKKTMLRINKIIDGEYDENIRNRVREKAINLNTVEDFKGLPLWLASYIIYDRHSEAGEILKWNTPDDIESYLQHYKQHSLRNPIVEQVITETLRVVKDIWTYYGKGQENFFHEIHIELGREMKNTAEKRKKIADRNATNENTNLRIKTLLAEFKESGDIENVRPYSPNQLEIFKIFEEDILNSGIEIPDDIQKIARSAQPSKSEIIKYKLWLEQKYCSPYTGIVIPLSRLFTSDYEIEHVIPQSRYFDDSLSNKVICEAAVNKDKANKLGYEYIKENKGRIIDIGFGRTAKIFSPTEYEEFIKNRFSHNKAKMKKMLLEDIPESFIARQLNDSRYISKAVQGLLSAIVREKEEQELISKNIVSCNGSITSRLKQDWGINDVWNSIITLRFERLNQLTNSNQYGEWKNKDGKRVFQIQVPLLQQKGFNKKRIDHRHHIADSIIIACATRNHVNFLNNQYAKSDKKRYDLKNSLCEKGKFKKPWLSFTQETKETILSSIVSFKQNLRIINKTVNHYYKWEKDENGVYKKTLQRQIKGDSWAIRKPMHKETLYGRITLRNKKEVNLSVALDDWKSLVDKILKTEIKRLIAAYGKFDKKTILKYFKDRENKLNGKDISKVKIYIFNSENAVSRTSLNTDFNSKKIESVVNEGIQKILSKHLSTYNEIKNGKTIEHPELAFSPDGIDELNRNILELNNGKHHKPIHKVRTYEPIGNKFRVGYNGNKKNNYVEAAKGTNLFFAIYQNENGKRSYETIPLNLVIERQKQGLTSVPERNEKGATLLFSLSPNDLVYVPTVEEVEVGQIDWADKKKVAERVYKMVSCTQGEFHCIPYHIATPIIKNIELGSNNKSERAWSGEMIKQNCIPILIDRLGNIKQKL

SEQ ID NO: 5626 - protein, 1545 aa, synthetic construct
  REGION 1..1545: note = Synthetic
MKKILGLDLGTNSIGWALIESDFDAKQGKILGLGSRIIPMDASIMGDFGKGNSVSQTADRTKYRGARRLYERDNLRRERLHRVLNVLGFMPEHYANDIDFEKRLGQFLDEKEPKIAWKKVWNEQKNKKEFVFVFQNSFNEMVDDFKARGLDIKIPYDWTIYYLRKKALTQKIEKEELAWLLLNFNQKRGYYQLRGEEEEENPNKLVEFHSLKIVDVVADEMPNSKGDIWYSLHLENGWIYRRSSKTPLFDWKDKVRDFIVTSDLNDDGTVKTDKEGAEKRSFRAPSEDDWTLLKKKTEADIDKSQKTVGTYIYEALLQKPTQKIRGKLVRTIERKFYKDELIAILKKQIELQPEIFTEDLYNDCVRELYRNNQAHQTSLSKQNCFVHLFVNDIIFYQRPLKSQKSSISNCTLEYRKYKSKDGNKIKEYLKAIPKSNPLYQEFRLWQWLYNLKIYLKDDDTDVTEQFIASVSDKENLFDFLNKQKKIEQKSLLKYFFGQKGFKGKQLNAEIEKYRWNYVEDKEYPCNETGSEVIKQLNKVEDVPADFLIPEIEQKLWHIIYSVTDKNEFEKALKTFANKHNLDEKSFVENFKKFPPFKSEYGSFSEKAIKKLLPLMRLGKYWNREVIDEKTKDRINKILTGEYDETIKNRVREKAIDLTSENDFQGLQLWLAQYIVYDRHSEAGNTDKWKTVADLEKYLEKFKQHSLRNPIVEQVITETLRVVRDIWKKYGGDFSEIHIELGREMKNTAEERKRLTNIVTENENTNLRIKALIMELKESADVENVRPYSPIQQEALKIYEEYALQNEEEYDGQDEETGKDKFISAVIPEDILKISKTAQPSKSELQRYKLWLEQKYRSPYTGQMIPLGKLFTEEYQIEHIIPKSRYFDDSLSNKVICESAVNQLKDKQLGFEFIKNHRGEIVECGMGKKVEIFSEDAYQTFVKEHYSKNYKKRNNLLLEDIPEKMIERQMNDTRYISKFVSQLLSNIVREETNDDDVNSKNVLPGNGKITSTLKQDWGLNDVWNDLILPRFERMNTLTNSNAFTAWNEQHQKFLPTVPLDLSKGFQKKRIDHRHHAVDALIIACATRDHINLLNNQSAKSQTTRYDLQNKLRNVEKWIDKDGKERDKFVEFKKPWDNFTVDARNELEKIVISFKQNLRVINKATNKYQKIKDDKKIKVKQEGINWAIRKPLHKDTIYGKVYLLNETKEMTLKKALEKVEQSKDVNIIVDKNIRERVKVHFANNNIDISSALKDSELKDISKIKVFEQNVATRYLNDLVSIFNGVTTVDKAKGVIEKITDTGIQKILLNHLIAKDNKPEIAFSLEGIEGMNKNIIALNNGKFHQPIYKVRVHQALGNKFQIGSTGNKKDKYVVAEAGTNLFFIVYEENGKRNYETVPLNEVIEYQKWRGTLTKEEQKTTPIVPIKEDRGHYLFHLSPNDLVYVPTEDEKENSRAIDWKNLDKEQLKRIYKFTDSSDTTANFVPANVANLIFNMNKTEQQKRGLNFNIQNEFGVGSPQSKNQRAITGEMVKDVCIKLNTDRLGNIKPL

SEQ ID NO: 5627 - protein, 1112 aa, synthetic construct
  REGION 1..1112: note = Synthetic
MKRILGLDLGTNSIGWALTQQNFGKKKGEINGLGSRIIPMSQDILGKFDAGQSHSQTSERTGYRGVRRLIQRNLLRRERLHRVLNILDFLPQHYKNSIDFEKHFGQFKENTEEKLNYCKNEYGKYDFIFMDSFNEMVEEFEINNQSTKIPLDWTIYYLRKKALSKKITKEELAWIILNFNQKRGYYQLRGEDEETDNNKLEEFYNLKIKDVQATEDKNNKDVWYNVVLENDWIYKRQSKEPLDNWIGKNKEFIITTTINKDGIKKRSFRAPKEDDWNLLKKKTEQSIENSKKTVGQYIYETLLENPIQKIRGKLVKTIERKFYQEELTAILKEQKKHHLELQNKDLFKKCIEELYPRNEAHQNNIKDKGFSHLFITDIIFYQRPLKSKKSTISNCSYETRTYKKKSEVIENGNEITKEILVSEPLKSISKSNPIYQEFRLWQFLKNVKIYQKENIQNDKTELDVDVTKEFLKTEEDYVNLFEFLNSRKEVEQKNIIQYFISNKLIAKVDKDNYRWNYVEDKKYPCNETKAQFLSRLSMVEDINPTSFLTAEIEQKLWHIIYSVKDKKEFEQALRTFAKKHNLNINSFSDSFKKFPPFKNEYGAYSEKAIKKLLPVMRRGKYWEENAIPIEVKERVAQIIERLEFIDFDKVKIDENVTDDDIPKQLLKSFIEFKDKNPLQGLNTYQACYAVYNRHSETSNITYWKTPKDITEFLEDFKQHSLRNPIVEQVVTETLRVVKDIWEYYGQGAQNFFDEIHVELGREMKNPADRRKAMSDRIRVNQNTNERIKFLLQELKDEGIKDIKPFSPSHQEILKLYEEGVYQNSIEIVEEIEKIRKNTSPTKAEMTKYRLWLGQGYISPYTGQPIPLSKLFTTDYQIEHIIPQSRYFDDSLSNKIICESEVNQLKDNQTAYEFIKNNSETIVDLGHGKKVKLFKLEDYENHCNGYFKNNRGKLKKLLSEEIPDGFINRQLNDSRFISKLIKGLLSNIVREENEQEATSKNLIPVTGSITSKLKNDWGLNDKWNELIAPRFERLNEMTNSNNFGFWDNKIDAFRTQVPDEISKGFSKKRIDHRHHALDALVVACTQRKHTQYLNSLNSEKKNFGLRDALLIKN

SEQ ID NO: 5628 - protein, 1291 aa, synthetic construct
  REGION 1..1291: note = Synthetic
VEATDEKKGRDIWYNVHLENGWVYRRSSNVPLDWEGRVKEFIVTTDLNPDGTPKLDKYGEVKRSFRAPKEDDWMLIKKRTEADITGTHKTIGSYIYDALLQEPQQKIIGKLVKTVERKFYKEELNFILQKQCAFHAELQDRDLYMRCIEALYPGNEVQRRNIANRDFIYLLIDDVLFYQRPLKTKKSLIANCPYEENEYVNRKTGEIKTAPLKCIAKSHPLFQEFRLWYFLSNIRVYQKEREVNGTLHLDVDVTTEFLKTEDDYVALFDWLNSRKEIDQKAFLRYPAFGLKKEINNYRWNYVEDKFYPCNETRHAILSRLEKAGIGIDFLSDEKETALWHILYSVSDKQEIEKALATFAVKNGLNESFVEVFKKFPPFKSEYGAYSAKAIKKLLPLMRCGKYWDMSLIDGTTKERIERIIAGECDESIGAKVREKAMNLSDISCFKRLPLWLACYVVYNRHSEDKEITKWETPADIDAYLAAFKQHSLRNPIVEQVITETLRVVRDIWKQVGKIDEIHIELGREMKNPADKRKRMTTQILENENANLRIKALLAEFVNPEYGVENVRPYSPSQQEILRIYEDAVLKGEEQIPEDIDVILKKFNTSKLPTKSEFLRYKLWLEQKYRSPYTGELIPLAKLFTAAYEIEHVIPQSRYFDDSFSNKVICESAVNKLKDNQLGYEFIKNHHGQKVEVGFGKTVEIFSVDSYERFVKEQYAKSGIKMKKLLMDDIPEQFIERQLNDSRYISKVVKGLLSNIVREKNDSGEYEPEAVSKNILVCTGSVTDRLKKDWGMNDVWNSIVSPRFERLNALTETQCFGHWENKDGKKVFQTAVPLEYQKGFSKKRIDHRHHAMDAIVIACATRNHVNYLNNESASRNAKISRYDLQRLLCDKSRGDGNGNYRWIIKKPWTTFTQDAREALSGIIVSLKQNLRIINKTTNIYQHFDANGTRVYEKQKIGDSWAIRKPMHKDTVFGAVNLRKVKVVRLSVALDTPSMIVDKRVKNKVLELLSYKYDKKKIEKYFKENAFLWKELDIAKVAVYYFTENTTEPLVAVRKSLDSTFNEKKIASVTDTGIQKILLNHLKSKEGKAELAFSAEGIEEMNRNLLQLNDGKGHQPIYKVRVYEPRGNKFKVGVLGNKGAKWVEAAKGTNLFFAIYITEDGNRTYETIPLNWVIEREKQGLVPVPDRNEKGDKLLFWLSPNDLVYLPTEEERDFGRINEPIDRGRIYKMVSSSGNQCFFIPQSISNAIISTKELGSNNKAEKSWDGEMIKNICIPVKVDRLGRIIEVKYRVNE

SEQ ID NO: 5629 - protein, 1487 aa, synthetic construct
  REGION 1..1487: note = Synthetic
MAKIIGLDLGTNSIGWAVIDNEKQIIESAGSRIIPMDAARLGDFEKGNPVSYTSKRTQYRGMRRLRERFLLRRERLLRILNILGFLPEHFASTVSRYGKIVSDDEPKLAWKEGTEGKKKFLFQSSFNEMVSDFVRNGVDQKIPYDWTIYYLRQKALTQPISKEELAWILLQFNQKRGYYQLRGKADEGLDSTENQKEEKSYHELQIVKVENTGEKDKKGGIWYNITLENGWIYRRAFKIAPDWEGKTRGFIATFKLDKNGKHKTDTPSISSPSEDDWGLRKIKTENDIKQSGSTVGAYIYQSLLRHPDRKIIGDLVQTIDRELYVDELCRILDKQIQYIPELNDQELYNRCIAELYPSNHSYRKSIAHRGFKYLFIDNILFYQRPLKSKRGLIDDCPFEERNGKAIKCIAKSHPLYQEFRIWQFVTNLRIYQNDEDITATLLPDAEAYANLYQYLSTQKEVDQSEILHYFKIGKKELPSYRWNYVEDRKYPVGETRAILLGGLHKAGIAEDFLTQEKELQLWHILYSVDDQKQYRKALRTYAHRQSWDAEKTEAFAQAFDKLTIYKEKDYGSYSAKAIGRLLPLMRQGRYWKADNIDMKTRNRIEHIVTGEEDETIKASLRERFNYINNIDQCQGMNTWQACYLVYGRHSEAIDAQKWNTPEDINKYLSHFRHNSLNNPVVEQVVTESLRVVHDIWEQTGHIDEIHIELGRELKKTKNEREHIAKVIAEGEATNQRIRLLLNELINPEYEIEKVRPFSPSQQELLKIYEDGVFNSNIEIPDDIRDIQKRFTAIKDQPTAAEIKRYKLWLDQKYISPYTGKPIPLAKLFTPAYEIEHVIPQSLWFDDSMSNKVICEAEVNRMKGKELGHEFIANHHGEKVHLTLGGDVEILSLEAYERHVKTTFASKKKREILMMDEIPDDFTSRQMNDSRYISRLMMHLLSNIVRTEDEKGNLEESTTSKNVIPCNGSITDRLKKDWGINDVWNRIVLPRFERLNTITGTRDYTTRTENNNTIPSVPLSMRQGFNKKRIDHRHHAMDAIVIACTTRDHINLLNNEAAKSKNRYDLQNKLRTIEYHNDKNGQQQPHFGDFKKPWPTFTEEVYRTLERIIVSFKHQQRVINKTSNFYKVIHEGKHIAIKQTRGDSWAIREPLHKETVFGEVNLQLKKRIRIKDAIANPNSIVNRELKEKIKNFKSLHHTEKQIIKYFDDNKDIWSETADGKVEVYYYTKDTKERYYATRKDLIDIMKDDTTIAAAQKTIDSITDSGIRSILQAHLAAEGNNAAEAFSADGIERMNRNIMALNGGHKHQPIKKVRVYEQANKYSIGNTGQKATKFVEAAKGTNLFFVIYKNKKGTRGFATIPLNIVIELQKKYEKKWKEHLSDRLQQDDLMLMPTDADILYILSPNDLVYVPLEDERVDIDHIDPKRIYKCISFTGRQCLFLPYSTASVILQKVEFEALNKMERAITGEMIKEICIPVTVDRLGNVKQIG

SEQ ID NO: 5630 - protein, 1531 aa, synthetic construct
  REGION 1..1531: note = Synthetic
MTKKILGLDLGTNSIGWALVKQDYENNKGEIIGLGSRIIPMSQEIINDFNKGISIPQTATRTGYRGVRRLLERNLLRRERLHRTLNILGYLPEHYSNKIDFEKKLGQFIPNSEPKIAYKEVRISENKIQYEFIFKKAFKEMLEDFKIHQPNLLLNDKKVPYDWTIYYLRKKALIAKIEKEELAWLLLHFNQKRGYYQLRGEEDETPNKLVEFHALKVVDVRADEQQKGKTDIWYNVILENGWIYRRSSKTPLFDWKGKTQEFIVTIELSDDKSIKLNKDGNEKRSFKAVDSELDWIAIKKSTEEKIDKSKKTVGCYIYETLLQNPNQKIKGKLIRTIERKFYKEELKQILEKQVQEHTELQDRKLYTACIEELYENNTAHRENIKEKSFVHLFINDILFYQRPLKSKKSLISDCPFEQRTYLKDGKKEMQSIKCISKSNPLFQEFRLWQFIHNLKMYQKEKTIDGKTYNDVNVTTEFLKSEDDYTTLFDWLNERKEIDQKAFLKYPAFNLKKNAENYRWNYVEDKSYPCNETHNAIVNRLSKVQEVPSNFLTKEKEQNLWHILYSVEDKIEIEQALKSFAIKNNLSEDFSEVFKKIKPFDKDYGSYSEKAIKKLLPLMRRGKYWNEEDIHQQTKNRIEKITYGEVDDKIRDRVREKAIHLNNINDFKALPLWLASYIVYDKHSEDSNAMQWKKPEDIENYLEEFKQHSLRNPIVEQVITETLRVVKDIWKTYGNSEANFFNEIHIELGREMKNPADKRKDMTNKMSANENTNLRIKALLSEFLNDASYENVRPYSPNQQEILKIYEEGVLNSETDINEDILKISKTAQPSISELNKYKLWLEQKYRSPYTGEIIPLNKLFTPAYEIEHVIPQSRYFDDSLSNKVICEAEVNKDKDKSTAYEYIRDNHGKKIELSFGKVVTIFETKEYEDFVKRNYAKNRSKLNKLMMEEIPESFIQRQLNDSRYISKVVKNLLSSIVRENDEQESTSKHVISSNGNITSVLKQDWGLNDVWNDIISPRFERLNELTKSTNFGEWTNKNGKRVFQTQVPLELQKGFNKKRIDHRHHALDALVIACASKNHINYLNNQYAKSETTRYDLQKKLRRHELIEITDKKTGEKKKINVAKEFFKPWENFTIQAKESLENTVISFKQNLRVINKTVNYFQKWVPDRNGDLKKQIVKQEGNNWAIRKPMHKETVSGSVSLRKIKNGVSLSNAIDDPEMIVDKSLSKKINQLIKERYDKKKIHAYFKNLDNKWNEKDVTKVDMYYFDNDNVASRSKLDESFTSKFIKESVTDTGIQKILLKHLEKYNEANGSKITEHPELAFSADGIDDLNKNIINLNNGKFHHPIQKVRTYEARGNKFNVGVTGNKKDKFVEAAKGTNLFFAIYKDETGKRNYDTIPLNIVIENQKQGALQNIKPEFCSVPNKNEKGDSLLFHLSPNDLVYVPTNEEFENPSLVNFKKLSKEQQNRIMKFVSCTGSEGHFVPNYYSSPIMKNEIGTNNKSEKTFDDIQIKAVCWKLKLDRLGNIITVLK

SEQ ID NO: 5631 - protein, 1464 aa, synthetic construct
  REGION 1..1464: note = Synthetic
MTKTILGLDLGTNSIGWALIRQDFDKKEGEILGLGSRIIPMSQEILGEFGKGNSIPQTAARTNYRSMRRLRERFLLRRERLHRVLHILEFLPQHYSMQIDFEKALGKFINQSEPQISYDKSFVFMASYEEMLQDFKGSSCSRLIDENGQQHLIPHAWTLYYLRKKAISHQISKEELAWILLNFNQKRGYYQLRGEDEDENSNRSVEFHSLRVVDVTSDPERNSKGEIWYSFILDNGWIYRRSSKVSLEDWKGKIKDFIVTTDLNDDGSIKLDRDGQEKRSFRAPGPDDWTLLKKKTESEIDQSGLTVGAYIYDHLLRDPKQKIKGKLVRTIERKFYKSELRQILTKQAEFHPEFRDQDLLADCVRELYKNNEQHRQQLESKDLSNLLLNDIIFYQRPLRSQKSGIGKCNLEYKVYKTKDKYGKLLRDAEGKLIEKRVYARAIAKSNPYYQEFRLLQWISNLAFYQKDNDEPITVHLIPDTESYERLFDFLKGKKEIKQDMLIKFLLGEKGLKGKDLINESARLRWNYVEDKAYPCYETRALINTRLDKISDLPQDFLNPEKELGLWHILYSVNDKIEFEKALKTFAQKNGLNIDEFVAAFRKFPPIKSEYGSISERAIKKLLPLMRFGSYWSWDMIDEDTKNRIGKVITGEYDEKIKVRVREKAQYLSTEHDFQKLPLWLAQYIVYDRHSEAGDLQKWTSTYDIAQFLNDFKQHSLRNPIVEQIVTETLRVVKDIWSTYGSAAPDYFSEIHIELGREMKNPAEERKRLTNAMTENENTNLRIKSLLAELAYDTEIVNVRPYSPMQQEILKIYEEGALNSGVSVDEDILKISKTAQPSSSDLKRYKLWLEQKYRSPYTGQPIPLSKLFTAEYEIEHIIPQSLYFDDSMSNKVICESAVNKLKDNRMGLPFIKAHHGQVVDCGLGKLVKIFEIDDYEQFVENCYAKNRGKKNKLLLEDIPEKMIERQLNDTRYISKYITGLLSNIVRDSREIGKDDGVNSKYVLTGNGKVTTRLKKDWGLNDVWNDLILPRFERMNMITNSTSFTVWNANHQKYLPTVPIELSKGFSKKRIDHRHHAMDALVIACTTRDHLNLLNNESARNNAKRHDLSRKLRNYEKVVYTDSRNGDQIAREIPQDFLKPWNNFTTEARTALSNIVISFKQNNRVINKATNYYESFYDEDGNLRLDKNGKATKGLIAQKGVNWAIRKSLHKETVSGKINLQGVKLPKGKILTATRKTLDASFNLKSIQSITDTGIQKILINYLHVKDNKSEVAFSPEGIEELNQNIAYYNDGKKHQPIKKVRIFEQGSKFSLGESGTKKTKYVEAAKGTNLFFGVYVDNQGKRSYDTIPLNIVIERQKQGIRPVPETNEKGHRLLFSLSPNDLVTIAPEERADSEHTPFSDNIYKLVSFTGSQAFFIKHDVAISIVNKGEFSTLNKSERSIEGLMIKDICQKVNVDRLGKILKIEP

SEQ ID NO: 5632 - protein, 1419 aa, synthetic construct
  REGION 1..1419: note = Synthetic
MSQDILGEFDRGNSISQTAERTGYRSTRRLRERYLLRRERLHRVLNLIGFLPKHYADEIDFEKRLGKFKAEKEPKLAYNNKNFIFQTSFNEMLEDFRQHQPQLVTDGKKIPYDWTIYYLRKKALSQRIEKEELAWIILNFNQKRGYYQLRGEEEENPNKLVEFHSLKVVNVVADEKPNQKGETWYSLYLENGWVYRRSSKIPLDNWLGKTRDFIVTAELNDDGTLKKDKEGNEKRSFRAPDVNDWTLIKKKTEQEIVSLNKTVGTYIYDTLLKNPNQKIKGKLVRTVERKFYKEELRAILTTQKQFHPELQNEDLYNDCVRELYRNNDAQQLQLSKKDFVHLILEDIIFYQRPLKSQKSTIGHCSLEYRIYRDEKGNIQKEYLKAIPKSNPWYQEFRVWQWLHNLKIFLKENEKDVTEQFLTCPEDFERLFDFLMSQKDVDHKAVIKFLLEPKGLKGKTLNTEIGKYCWNYVYDSVKDESKSYPCNETGYEIRRRLAKVDNLPSDFLTQQREYELWHIIYSVTDKTEYEKALKSFATKNRIDETSFVENFRKFPPFKSEYGAFSEKAIRKLLPLMRVGKYWDWNLIDPKTQSRISKIITGEYDEDIKNRVREKAINLKQEIDFQGLQLWLAQYIVYDRHSEASIAGKWDSVDDLDLYLKEFKQHSLRNPIVEQVVLETLRVVRDIWVKHGNGAKDFFNEIHVELGREMKNTAEERKRLTEQVTANENTNLRIKALIAELKENSDGTLYVENVRPYSPIQQEALKIFEEGVLNSDVEIPDEILKISKTAQPTKSELQRYKLWLEQKYRSPYTGEIIPLGKLFTAEYEIEHIIPQSRFFDDGMSNKVICEAAVNKLKGNQLGLEFIKNHHGEIVEAGLDRKVRIFSEEDYTKFVKENFAKNRAKRNKLLLEEIPEKMIERQLNDTRYISKFIANVLSNIVRANENDDGINSKNLVPLNGSITAVLRQDWGLEGVWNDLILPRFERLNQLKKCEGFTFRNTSNKSIPTVPLELSKGFQKKRIDHRHHALDALVIACATRDHVNLLNNKNANSKEQRYDLNRKLRKYEKKVYTDPKTGERVEREVPSEFLKPWATFTKDAKDAIATVVVSFKQNLRVINKTTNKYEKIVERNGKKVKELVPQVKGDSWAIRKSMHKDTVSGEVILPWVKVSKDKVLTATRKSIDTSFDLKTIESITDTGIRKILNNYLSSKGNNPELAFSPEGIEEMNRNIEQYNEGRKHKPIYKARIFEEGSKFPLGQTGNKKTKFVEAAKGTNLFFAIYQNDKGERSYETIPLNIVIERQKQGLSSVPEYNKKGDKLLFHLSPNDLVYVPSHDELLSPNPANLKTIGEEQAMRVYKMVSCTGSQCMFVRNDVANPIVNKEEFSPLNKMEKSIEGVMIKDSCWKIKVDRLGNIIAVNDKLLV

SEQ ID NO: 5633 - protein, 1553 aa, synthetic construct
  REGION 1..1553: note = Synthetic
MKKILGLDLGTNSIGWALIDQDFEKKEGKILGMGSRIIPMSQDVLGEFDRGNSVSQTAERTRLRSVRRLKERHLLRRERLHRVLNVLGFLPSHYASQIDFEKRLGKFVNEAEPKLAYYPVWNASKNKNEYDFLFKESFQEMLEEFRQFQPQLLIDKKGDAALIPYDWTIFYLRKKALTQKITKKELAWIILNFNQKRGYHQLRGEEEDENPNKLIEFHSLKIVDVLADEAQKGKSDIWYSLILENGWVYRRSSKTPLIDWKNKVRDFIVTTDLEEDGSFKSDKEGNVKRSFRAPGENDWTLVKKKTEQEIDQSDKTVGAYIYDSLLQNPKQKIKGKLVRTIERKFYKGELRRILAKQAEFHSELQSQDFYYDCVRELYRNNEAHQTILGHKDFVHLIVEDVIFYQRPLRSQKSSIGNCSLEKRPMKDKKGNPLKDADGKQVFKPLKATPKSNPYYQEFRIWQWIYNLSIYRKDEDVNVTSDFLNSLKDWESLFEFLNDKKEIEQKVLLKYLLEQKGLKGKLLNAEVEKYRWKYVEDKKYPCNETRSLIGAKLEKVDGIREGFLTREIEQQLWHIIYSVTDKVDYEKALKSFAVKNQLDESSFVEAFRKFPPFKSEYGAFSEKAIKKLLPLMRAGKFWNENEILRESPVYLRNIERLLQKLEEQNSKISSSGQEIWNKDINRKLYQELGQFLDGDVATFQNLRLHIASYLVYGRHSEAAEVGKWNSVDEMEGYLREFRQHSLRNPIVEQVITETLRVVKDIWSKYGEGARDFFSEIHVELGREMKNNADERKQITNRMTDKENTNLRIKALLAELAQDVDVENVRPYSPMQQEILKVYEEGVLNSNVVIDEDILKISKTPQPSSSDLRRYKLWLEQKYCSPYTGKIIPLNRLFTPEYEIEHIIPQSRYFDDSFSNKVICETAVNKLKDNQIGLEFIKNHHGQIVELGMGKSVKIFEVAAYEEFVKQQYAKNHSKRNKLLMDEIPEKMIERQLNDTRYISRFITSVLSNIVREETNDDGVNSKNIIPGNGKITAELKQDWGLNDVWNELILPRFERMNLLTNSPHFTTWNENHQKFLPTVPLELSKGFSKKRIDHRHHAMDALVIACATRDHINLLNNLHAKSARRHDLNRKLRKYEKVAYIDPKTGERIEREVPKEFVKPWKSFTTEAKDALINIIVSFKQNLRVINRANNKYEKWTEKEGVKVKELHSQTGGNWAIRKPMHKDTVSGLVKLRGVKSVSLNQALDFIPDVVDKALRKELKRLASIGLDKKNISKHLREVDNKFNGHDISKVEIYYWMEDNVASRVLLNDSFDEKRIETITDSGIQKILLKHLEIYRGRVDEKGKEIPAELLAFSPEGIEEMNKSIRALNGGKSHQPIMKVRTYEPKGNKFVVGQKGNKGSKFVEAAKGTNLYFAIYEDENKRRSYETVPLNIVIERQKQGLSPVPERNEKGDGLLFFLSPNDLVFVSKEEGGDLQKVSQFDHSVVEVEGIYKVVSFTGNRLYGVPCHVAKAIVDKVELSQLNKLEVTLDRKSLKENCLKLSVDRLGRISGIVSL

SEQ ID NO: 5634 - protein, 1450 aa, synthetic construct
  REGION 1..1450: note = Synthetic
MKTILGLDLGTNSIGWALINQDFENKTGKILGMGSRIIPMSQDIMGEFGKGNSISQTAERTSLRGVRRLRERFLLRRERLHRVLDLINFLPKHYADKIDFEKKLGKFKNNSEPKIAYSEGKFIFLDSFQEMIDDFSVKCPEILFDKNGHNCKIPHDWTIYYLRKKALSKKISKEELSWIILNFNQKRGYYQLRGEEEDEKQNKDVDFYSLKVTEVIADEPQKGKSDIWYSIILENGWIYRRASKLPLFDWKDKTKDFIVTTELNEDGSVAKDKEGKEKRSFRAPSPDDWTLIKKKTEKEIENSSKTVGEFIFEALIENPKQKIKGKLVRTIERKFYKSELTLILQKQKEYHPELSNEDLLNDVARELYKNNESLQTILGQKGFVHLFVQDIIFYQRPLRSQKSSISNCSLEFSPMKDDKGILLRDANGAVLSKPLKCIPKSNPYFQEFRIWKWISDLAIYRNDDDQNITDTFLNSHEDLVQLFDFLNSKKEIEQKVLIKFLLENKAHKVKASTTEIEKYRWNYVKDKKYPCNETRNLIVSRLNKIQEITPSFLSHEIELKLWHLLYSVTDKIEFEKALSTFAIKHNLPETEFVEIFKKFPPFKSEYGSYSEKALKKILPLMRLGNYWSWENISEKSKDRISKIINGEFDENIKERTREKSRNLQTETDFQGLPDWLAKYIVYDRHSEASNIEKWNSVTDLEGFLLEFRQHSLRNPIVEQVVTETLRVVKDIWVKYGKGSKDFFSEIHVELGREMKNTAEDRKNLTNQITENENTNLRIKALLAELFNDNNIRNVRPFSPSQQETLKIFEEYAISNEERYDLENDSFIYDPIPEDISKISKTAQPSKNDLIRYKLWLEQRYRSPYTGNVIPLSRLFTSDFEIEHIIPQSRYFDDSFSNKVICEAAVNKLKDNQTGFEFIKNHHGTTINNKLRIYEIAEYEEFVKEHYDKTRGKRNKLLMEEIPEKMIERQMNDTRYISKFISQLLSNIVRAESKDDGINSKNVMPGNGKITDSLKQDWGLNDIWNDLILPRFERLNEITKTDSFTVWNENHQKLLPTVPIEFSKGFSKKRIDHRHHAMDALVIACATREHVNFMNNEHALRKGKNKDEKQTLRQDLRNILCVKKYNGNSKENYKWIFKKPWEEITQETRKELDKTVVSFKQNTRVINKATNKYYKWVETDGKVAKEKVSQEGMNWAVRKSMHKDTVSGLVNLPRIKVPKGKILTASRKPLDTSFDLKTIESITDTGIQKILKNYLLAKDGNPEVAFTPEGIEDMNRNIRLYNGNKNHQPIKKVRIFEMGSKFPLGQTGNKKEKYVEAAKGTNLFFAIYQDRDDKRSFETIPLNEVIQRLKNGKSSAPEVNKNNQLLKHILSPNDIVAIKNNNGNLEFYKFVSCTGGEGHFVLHSYAKEIIKNEMGTNNKSERPITLHGFDKSQTIKDKCIFLNISRLGDIL

SEQ ID NO: 5635 - protein, 1547 aa, synthetic construct
  REGION 1..1547: note = Synthetic
MKKILGLDLGTNSIGWALTNNDFDNKLGSIEGLGSRIIPMSQDVLGKFDSGVSISQTAERTKYRGTRRLVQRFLLRRERLHRILNILDFLPRHYSEAIDFDKKFGQFKPEREEKLSFYKNESGKNQFLFLESHQEMFSEFKLTHPDLKQVPYDWTIYYLRKKALTQKISKEELAWIILNFNQKRGYYQLRGEEEEVNKNKLEEFHTLVIVDVIEREKGKSGVWYNVILENGWIYKRESKIALFDWIGKQKNFIVTTELNDDGTIKLNKDNEEKRSFRSPKEDDWGLRKIRTEQTINQSEKSVGSFIYDELLKKPNQKIKGELVRTIERKFYKDELSKILKAQITFHYEILGDRNIYKKCIDELYRHNDSHKNNIKDKGFDYLFLDDIIFYQRPLKSKTSLISDCSLEFVPIKDKKGILVKDSNGKQVVKPLKCIAKSNPIFQEFRLLQFVKNLKIYKKEIINEIDVTNDYLKTEEDLVELFDWLNDKAEISQKQFLAYPKFKLKEDKYRWNFVEDKIYPCNETRNQFLNAIAKIDVNKSFFDAKNTQDLWHILYSVTDKTELFSINTETGIQSGALSTFAKRHNLSNEFVSNFSKIKPYNKDYGSYSEKAIKKLLPLMRFGSNWNKNNIDAKTLARIDKLQTGEFDETMRTRVREKAIHLSKITDFQGLPLWLASYIIYDRHSEASNISKWKTPEDIAWFLNPKNKSGFKQHSLRNPIVEQVITETLRVVKDIWQHYGEGKENFFNEIHIELGREMKNNANDRKRITETINQNENTNLRIKAILTELKNDGINDVRPYSPSQQEILKIYEEGVYNSEIRKEKLEDIDKIRKNAKPTPSEIIKYKLWLEQGYISPYTGKLIPLSDLFTTKYQIEHIIPQSRLFDDSLSNKVICESEVNDLKGNNTALEFILKNEGRIVLLTGGKTVKIFTKEAYNQHITSYYIKNKSKQKRLLTEEIPEKFIDRQLNDTKYISKIVKNLLSKIVREEDEQEVTSKHIVSLNGSITSRMKQDWGLNDVWNKIVSPRFERLNAITNSNDFGKLELKKDEFGNAGKQVFQTTVPDDIAKGFSKKRIDHRHHALDALVIACINRTHINYLNNLNAKDENDKTIKHELRNKLCFKTKPDSNGNSKWEFHKPWENFTKKVEDELNQTIISFKQNTRVINKTVNKYQVWKEEDGAMKKVTVKQTKGDNWAIRKPIHAETVSGKVFLKRIKQSHITIANAIEQIELIVDKEVRKQLKAKIKQYPNNKEGFKKHLKAFPIMINGKAIDKVQIYETIEATATRERNNLDITFDEKKIEKITDTGIQKILLNHLKQEIYQNAIDESGKKIAPHEVAFSEIGIDELNKNIKVLNNGKNHQPIKKVRIFEESKRFSLGQSGSKTDKYVETAKGTNLFYAIYEGKKGNRNYKTIPLNEVIERQKQGLNSALVTDENENRLLFTLSPNDLVYIPTNEEKKNLTTINFDKLSREQTERIYKFVSCTSGEGHFVSNNYSKEIISNENGSNNKNERMLEFNNSNTIYDEKEKPVMIKSVCWKLEVDRLGKIKRIIR

SEQ ID NO: 5636 - protein, 1513 aa, synthetic construct
  REGION 1..1513: note = Synthetic
MNKKKLVMKKILGLDLGTNSIGWAVINSSVDDEGKEKLTSISSCGSRIIPMDAATLGDFDKGNAKSSVAERTRLRGIRRLLERSLLRRERLHRVLSVMGFLPEHYASQLDRYGKFLPETEPKLAWYKDNTGSYRFLFQDSFNEMLEDFRLYHPELVAEGKKIPYDWTIYYLRKKALSQKIAKEELAWILLNFNQKRGYYQLRGEEEQEDNKKSVEYYALKVVAVEDSGERKGKDIWYNVKLENGWIYRRASSIPLDWTGKVKEFVVTTDLDDAGNPKKDKDGNVKRSFRAPKEDDWGLLKTKTQTQIDESGQTVGAYIFDSLLRMPDQKIRGKLVRTIERKYYKDELRKILLKQTEFHAALQDHNLLLSCIEELYPNNEAHRRLLSSSSFTCFLLEDILFYQRPLKSQKGLIDDCPYESHVYKKDGSLHRTPLKCISKSHPLFQEFRLWHFLSFLRIYQRERMIDGSLKLDVDVTNEFLQNEDDYVKLFDWLNGRKEIDQKTILAYKPFGLKKNEQPKYRWNYVEDKSYPCNETRADMISRLSKAGVSEGFLTEEREEALWHILYSISDKKELTKALGTFAEKNGLNEAFVELFSKMPPFESNYAAYSLKAIRKLLALMRMGKYWNEQDIDKQTRSRIEKILTGEYDETIRTRVREKAIHLTDISSFRGLPLWLACYVVYNRHSEAKELVKWETPADIDHFLSKFRQHSLRNPIVEQVIMETLRTVRDIWKQEGQIDEIHVELGREMKNPAKERARITAQVLENENTNLRIKALLTEFMNPEFEIENVRPYSPGQQEILRIYEEGVLSGVAEKDLPEDIISILKKFRENDVKKRPTTSEVLRYKLWLEQRYRSPYTGRIIPLGKLFTPAYEIEHVIPQSRYFDDSISNKVICESAVNKLKDNCLGYEFIKKHSGEIVELGNGEKATVFTSEEYEHFVKESYLGNGKKMKKLLLEDIPDNFIERQLNDSRYISKVVKSLLSNIVCEEGEQEGMSKNVIVCTGGVTDRLKKDWGVQDVWNRIILPRFLRLNKMTDSTGFTSVSTNGHLLPALPLHLQKGFNKKRIDHRHHAMDAIVIACADRNIVNYLNNASARKGSEISRYDLQHLLCDKVKTDSNGNYKWMLRKPWDTFTQDVYTALTNIVVSFKQNLRVINRTTNYHQHYNESGEKKMIPQVKGDRWAIRKPMHKDTVYGEVNLRREKTLPLKDVLNNPSIVVDKSLKSKLHELLKAQYDLKAITKYFEAHQDVWADINLKKIKVYYFTKETNERFFATRKSLDSSFNQKKIQEEVTDTGIQRILLRHLQLNDNNSDIAFSPDGIERMNQNMTILNDGKGHQPIYKVRTYEKAEKFAVGEHGNKVKKFVEAAKGTNLFFAVYESIQEDEATGKQVRKRTFATIPLNEVIKRKKQGLSVAPEDSNGNLPIFVLSPNDLVYLPTEEERNSGKVTQPLDRERIYKMVSCTGNRLFLVPYMVASPIYDKKEYTSLNKIELTDDKISIKERCIPILIDRLGNISINY

SEQ ID NO: 5637 - protein, 1512 aa, synthetic construct
  REGION 1..1512: note = Synthetic
MKQILGLDLGTNSIGWALIKQNFEEKKGQILGVGSRIIPMSQDILGKFESGQSHSQTAERTGYRSVRRLYQRDNLRRERLHRVLNILGFLPKHYVDAIDFEKKLGQFKPGKEVKLNYAINDKGKHEFIFQASFNEMLSEFKVAQPKLFYKKENGEETKIPYDWTLYYLRKKALSKPLTKEELAWVILNFNQKRGYYQLRGEEIVTDDTKKEEYHNLIVVDVQETEDKNARGTWYNVILENDWVYRRQSKEPLNSWIGKNKEFIVTTQLEKDGSLKLDKEGIVKRSFRAVDSEKDWIAIKAKTEQDIEQSNKTIGEYIYENLLDNPNQKIRGKLVKTIERKFYKDEFNKIISKQIQLQPELFTDELYQKCIEELYPNNEAHRTTIKDRGFKYLFTDDIIFYQRPLKSQKSNIAECPLEFRVHKQTNEETGEIEDVKKGIKAISKSHPLFQEFRIWQWLQNLKIYNKEQIENGTLKDVTGQLLPDEEAWVALFDFLNAKKELEQKQFIDYFVKKKLIDKKEKDYYRWNYVEDKKYPFAETRAQFISRLSKVEGLHDVEAFLDEKTKMGKKEKSPYMSRMEQLWHIIYSVTDVNEYKSALKKFALKHDLDTESFVKNFEKFPPFKSDYGSYSQKAINKLLPLMRRGKYWNEALIPDDVKARAEAIMERVYALPLKSNYSDKDIKQALETVSDDDIPKQLIKSFVPFKDKNPIQGLNTYQATYLVYGRHSEVGEIQQWRIPNDIDDYLKKFKQHSLRNPIVEQVVTETLRVVRDVWKQYGEGQPDFFDEIHVELGREMKNPADKRKKISERNNENENTNHRIKELLKELMKDSSMEGDIRAYSPSHQEILKIYEEGVYQNPKADYSKVSEDEISKIRKNNNPTLKEIQRYRLWLEQGYISPYTGKPIPLSKLFTHEYQIEHIIPQSRYFDNSMNNKIICESEVNENKGNKTAYEYLSHKGGNVVNGHKLLTLEEYESHVNQYFKNNKTKLKNLLSENVPEGFINRQLNDSRYISKLVKGLLSNIVRQDGEQEATSKNLIPVTGAVTSKLKNDWGLNDKWNEIILPRFERLNKLTQSKDFTTLNTNGKIIPTVPDELSKGFNKKRIDHRHHALDAIVVACTTRDHTHYLSALNAENKNYGLRDKLLIKSTQGDYTKTFLMPWEGFAIEAKDQLAKTVVSYKQNIRIINKTSNKFWSYKDEHGNLNLDKNGKPVKKLRQQTKGDSWAIRKSLHKETVSGLYNIKTPKGKIATSVRTALSEIKNEKHLAKITDEHIRDVILPNHLNNYLDEKGNHKYDLAFSDEGIEDLNKNIEALNNGKKHQPIYKVKMYEVGSKFSISENDKSAKSKKYVEAAKGTNLFFAVYWDDKKQKRNFETIPLHEVIAHQKQVAHLPKKERLPIQPDPKKGVFLFTLSPNDLVYVPTEEEIENGVHVDFDNLTKESINRIFNVNDFSGGTCYFTPNYLAKSICNKEVDMQYDKKKSKITGSFDIKTASFNGVSIKEVCIKLKVNRLGNISKV

SEQ ID NO: 5638 - protein, 1507 aa, synthetic construct
  REGION 1..1507: note = Synthetic
MKTVLGLDLGTNSIGWAVINSVISEQAERIWIEMAGSRIIPMDAAVLGDFDKGNSISQTAERTRFRGVRRLRERHLLRRERLHRVLKILGFLPEHYLKEIDFEKHPGKFLADAEPKLPWVKNGQGQYVFLFQTAFNEMLADFAKYQPSLVAGGKKVPYDWTIYYLRKKALTEKISKEELAWILLNFNQKRGYYQLRGEEEEENPGRVVEFYALKVVSVEATDEKKGQDVWYNVHLENGWVYRRSSRVPLDWEGQVKEFIVTTDVNLDGSPKLDKYGEVKRSFRAPKEDDWMLIKKRTEADIANTGKTVGCYIYDTLLQKPQQKIIGKLVKTVERKFYKEELRLILQKQCTFHAELRDRSLYASCVKELYPVNEMYRRNIANRDFPYLLIDDILFYQRPLKSKKSLIDNCPYEENEYTDRETGEVKKAPLKCIAKSHPLFQEFRLWHFLSNIRIYQREKEVDGGLHTDVDVTADFLKTEDDYAALFEWLNIRKDIDQKSLLKYFGLKKEVDNYRWNYVEDKSYPCNETRSAILTRLEKAGVCSDFLSCEREVALWHILYSVNDKQEIEKALNTFAGKNGLNADFVEVFKKFPPFKAEYGAYSAKTIKKLLPLMRCGIYWDVSLIDDKTKERIEKIITGEYDEKIRARVREKAVDLSDIACFKGLPLWLACYIVYDRHSEEKNIAKWETPADIDAYLASFKQHSLRNPIVEQVVTETLRVVRDIWKRVGKIDEIHVELGREMKNPADKRKRMTAQMLENENANLRIKALLAEFANPEYGVEDVRPYSPGQQEILRIYEDTVLNAEDQIPADIDAILKKFNNSRLPSKSEFLRYKLWLEQKYRSPYTGELIPLGKLFTPAYEIEHVIPQSRYFDDSFSNKVICESAVNKLKDNQLGYEFIKNHHGQKVEVGFGKVVEIFSIDNYERFVKEQYAKFGAKMKKLLLDDIPEQFIERQLNDSRYISKVVKGLLSNVVRTKDKNGEYEQEAVSKNVLVCTGSVTDRLKKDWGMNDVWNSIVFPRFERLNTLTGTQCFGHWENKGGKRVFQTELPLEYQKGFSKKRIDHRHHAMDAIVIACATRNHVNYLSNESASKKAKISRYDLQRLLCEKSRTDANGNYKWIIKKPWDTFTQDAKEALDKIVVSLKQNLRVINKTTNVYQHFDAGGNRVYEKQKAGDSWAIRKPMHKDTVFGVVNLRRVKYVRLSVALDTPAMIVDKKVKNKIFELQSYKYDKKGIERYFKENISLWKGLDIAKIAVYYFTENSSEPLFAVRKPLDSTFNEKKIKESVTDTGIQKILLEHLYSKGGNADLAFSAEGLEEMNSNLLQLNGGKKHQPIYKVRVAETRGNKFCVGTAGNKNTKYVEAAKGTNLFFAVYLTEDNKRVYETVPLNIVIEREKQGLIPVPDENENGDKLLFWLSPNDLVYLPTEEEWEMGRIDEPIDRGRIYKMVSSSGNQCFFIPQNISNAIIPTKELGANNKAEKAWSGEMIKNICIPIKVDRLGYIVEIKKVMGK

SEQ ID NO: 5639 - protein, 1571 aa, synthetic construct
  REGION 1..1571: note = Synthetic
MKKILGLDLGTNSIGWAVVNAEEIHDDKEDGKVTLKPVSIEAANSRIIPMDASILGDFDRGNSVSQTKERTGFRGARRLRERALLRRERLHRVLDLMGFLPEHYSAKLTRYGKFSDDSEPKLAWRKNDSGEYEFLFKMSFEEMVHEFKQVHPELKSIPYDWTIYYLRKKALSHALKKEELAWILLNFNQKRGYYQLRGEDDEIDLKKEVKFYSLKVTKVEETEDRKGDDIWYNVYLENGWIYRRASKIPLNWEGKEKEFIVTTDLNEDGSYKLNKDGNVKRSFRAPTEDDWNLLKVKTEADIYDSGKTVGCYIFDSLINNPQQKIIGKLVRTIERKFYKEELRLILEKQKEFISELNDKELYEKCLDELYAKNEGHRSNILNRDFTYLFIDDILFYQRPLKSKKSLISDCPYESHKDKDGKVYPVKCIAKSNPIFQEFRLWQFVQNLRIFQRERVVGDGQLDLFGNVSLRKLEENVDVTNELLRCEDDYVKLFEWLNDRDSIKQDTLLNSYFKFKKEKGKDKYPYRWNYVEDKEYPCNDTRAVMLSGLKKCGVAVSFLSKEQEYSLWHLLYSIDDKIEIEKALKSFAKKNNLSESFIDVFAKIKPFKKEYGSYSEKAIKKLLPLMRMGKYWSADAIDEKTKERIEKLIIGEYDENISNRVRNKVKDLRDISQFRGLPLWLACYVVYNRHSEAKDVVKWERPEDIDAYLKSFKQHSLRNPIVEQVVTETLRTVRDIWKQVGRIDEIHLELGREMKNSADKRKTMSENIQKNENTNLRIKAILAELKNPDYGVENVRPYSPSQQDILKIYEEYALDNLTKEDKDFEFVSKVSKSAQPTKSEIIRYKAWLEQKYRSPYTGEIIPLAKLFTPAYEIEHVIPQSRYFDDSFSNKVICESEVNKLKDNKLAYEFISSNEGRIVTLADSKTVKIFSVGEYEDFVKKHFKGTKKNKLLMSDIPDGFIERQLNDSRYISKFIKGLLSNIVREENGGGEYELEAVSKNLISCTGGVTDRLKKDWGMDDVWNRIVLPRFERLNELTGTYNFTAVNQQGHLIPNMPLELQKGFNKKRIDHRHHAMDAIVIACATRSHVNLLNNESARSMYKDECSKSDDFDKNSSYRYHLSKKLRRQEDVVIEGKNRKVFKEFIKPWDTFTSDSQRVLENMIVSFKQNLRVINKTVNKFEHYDENGKKKIVKQVKGDSWAIRKSIHKDTGWGEINLRFTKEVSLNEALKNPKSIVNKDFKRRVQELLAQGHDAKYIKKYVEDNQDVWSDIDIKKIKVYYFTKDANKRYFATRFLSDLVGYMSGIKDSEKAISKIEGITDTGIQKILKAHLQAKGNNPEIAFSADGIDEMNRNIVELNGGKPHKPIYKVRRYESGNKYSIGQKGCKAKKFVEADQGTNLFFAIFSSEKLNKESGEMESVRSYLTIPLNVMIDCQKKFGSKWQANIETFLKECKLVSDEVKLLFILSPNDLVYLPTKEDLKNGVNLIDKSKIYKFVDSSGIQANFVPFSVSKAIFSMTKDKQKKAFGEEAYCIQNEIGVGSRPSKNQVAITGEMIKEICLPLKVDRLGNIISLGY

SEQ ID NO: 5640 - protein, 1559 aa, synthetic construct
  REGION 1..1559: note = Synthetic
MKKILGLDLGTNSIGWAVVNANEMARENDTTYLKPVGISSAGSRIIPMSADILGDFDKGNSISQTAERTKQRMIRRLRERNLLRRERLLRVLSLMDFLPEHYANKINRYGKFMDDSEPKLPWRMGLGGKMEFLFQESFQEMLAEFSQCQPELIAGGRKVPYDWTVYYLRKKALTQRITKEELAWILLQFNQKRGYYQLRGEEEEEDTSKKVEFLSQKVIRVEATGERKGDDLWYNVYLENGMIYQRPSRFPLDWEGKTKEFIVTTDLEKDGSPKRNKYGEIKRSFRAPKEDDWTLLKKKTEYDIEQSNKTVGCYIYDALLQNPSQKIIGKLVRTVERKFYKEELRKILEVQQELIPELRDSNLYQRCIEELYPSNEAHRNVISKPDFVRLFVDDILFYQRPLKSKKSLIDNCPYESRFDKEGNMHPVKCIAKSNPLFQEFRLWQFVQNLRIYQREKTVSDGQLDLFSNVPTGKLQTDVDVTAEILKSEEDYVKLFNWLNDRGTIKQDTLLNSYFKIKKEKGKDRYPYRWNYVEEKEYPCNETRATILSGLAKCNVSTDFLTRENEMALWHILYSIEDKTEINKALSSFAGKHNLAANFTEVFSKTKPFKKDYGSYSEKAIKKLLPLMRMGSYWNETAFDANTHDRIEKIITGEYDERIKNRVREKAISLTDISHFRGLPVWLACYIVYNRHSEAKEIEKWKKPEDIDQYLKTFKQHSLRNPIVEQVITETLRTVRDIWKQEGQIDEIHLELGREMKNPADKRRQMTERIQQNENTNLRIKAMLMEFMNPEMGIENVRPYSPSQQDILRIYEENALDNLSRDDKEYDFVSKVSKMAQPSKSDIIRYKCWLEQKYQSPYTGKMIPLSKLFTPAYEIEHVIPQSRYFDDSFSNKVICESEVNKLKDRQLGYEFIKNHAGEIVQLSQGGTVQIQSVEAYEKFVKDYYANNRTKMKKLLMDDIPDGFIERQMNDSRYISKVVKGLLSNIVREKQANGEYEEEAVSKNLISCNGSITDRLKKDWGMNDVWNSIVLPRFQRLNQLTGKDCFTTLNREGHEIPNMPLELQKGFNKKRIDHRHHAMDAIVIACATREHVNLLNNEAAHSKHNANRYQLQRRLRRFETVTINGKEREIAQEFLKPWDTFATDAWQALSNIIVSFKQNLRVINRTINHYQHYDAKGRKGFDKQHHGDSWAVRKSMHKDTVFGEVNLRMKKTVSLNEAVKKPENIVNKEFKKKVRELLTNGYDAKFIKKYIEDNKDIWSDINLSKIEVYYFTKDEKKRNGEPKERYFATRKPLDTSFDQKKIKESVTDTGIQQILLAHLASKENNPEQAFSPDGIDEMNRNIVALNNGKFHQPILKVRVYEKAEKFAVGQTGNKGKKFVEAAKGTNLFFAFFETERENKVSNRKEVVRSYMTIPLNVMIDCQKKYGARWRNNIEAFLKDKDIVETEAKLLFILSPNDLVYLPTKDELQNGILSIDKQRIYKFIDPGMNTGNFIPYSMAKAVFSSKFTEQKKKGIVFSIQDEIGLGSQGSKSPRATTGEMIKETCIPIKVDRLGNILKIGYE

SEQ ID NO: 5641 - protein, 1177 aa, synthetic construct
  REGION 1..1177: note = Synthetic
VRTIERKYYKEELKLILDKQKEFHPELQDRALYAACVEELYTINEAHRNNIGNRDFTYLFLEDILFYQRPLKSKKSLIDNCPYEENHCLDKETGEIKFFPVKCIAKSHPLFQEFRLWQFIVNLRIYRKGLAQDVDVTNELLKTEEDYVALFDWLNGKKEIDQKAFLKYPPFGLKKEVENYRWNYVQDKSYPCNETRSLMLARLEKCDISIEFLTKENEEALWHILYSVEDKNEIVKALQKFADKHNLNASFVDVFQKFPSFKKEYGSYSAKAIKKLLPLMRMGKYWSEDSIDKGTRERMDKIITGEYDEKIENRVREKAIHLADISEFKGLPLWLVCYIVYGRHSESKEIAKWESPADIDSYLKSFKQHSLRNPIVEQIIIETLRVVRDIWKQVGNIDEIHVELGREMKNPADKRRKMTQQISENENTNLRIKYLLTEFLNPEYEVENVRPYSPSQQDILRIYEEGVLNSVSNLPEEISDILKKFTETDLKKRPSRSEVLRYKLWLEQKYRSPYTGEVIPLGKLFTPAYEIEHVIPQSRYFDDSFSNKVICEAEVNKLKSNLLGHEFIVKHHGEIVELPFGKKVKIFTVDEYEQFVKDNYSRTRGKMKKLLVDDIPEEFVARQLNDSRYISKVVKSLLSNIVREKGEEEAISKNVIPCTGGVTDRLKKDWGVNDVWNKIILPRFQRLNELTGTNKFTTMSLNNHEIPAMPLELQKGFNKKRIDHRHHAMDAIIIACANRNIINYLNNESATAKAELSRYDLQRLLCDKAKTDDNGNYKWVIRKPWASFTQDVHGVLEDIIVSFKQNLRVINKATNHFLHYNEEGKKIFVKQEKGDSWAIRKSMHKDTVFGEVNLRRIKTVALNEAMKNPQSIVVKDFKRKLLELLNLGFDAKRIKKYFEDNRETWSDINLSKITVYYFSKDTKDRFFATRKPLDTSFDRKKIENNITDTGIQKILLRHLELKDNNPDIAFSPDGIDEMNRNIIQLNNGKYHQPIIKVRWYEQADKFAVGQTGNKSSKFVEAAKGTNLFFAVYESNILDEKTNTIIKKRNYATIPLNVAIERQKQGLSVAPEEENGNDPIFVLSPNDLVYLPTTDELANGVVAQPLDKERIYKMVSCTGNEGHFIPARIANPILQTIELGSNNKAQKAWTDEMIKEICMPIKVDRLGNILESSSLHKK

SEQ ID NO: 5642 - protein, 1472 aa, synthetic construct
  REGION 1..1472: note = Synthetic
MKKILGLDLGTNSIGWALVKHDFDNKEGKIEGLGSRIIPMSQDMLGNFDAGQSISQTAERTKYRGIRRLYQRTNQRRERLHRVLNILGFLPEHYRQQIDFEKRRGQFKSKQESKLNYKPSWNEEKKKNDFHFLFQQSFQEMVNELRISQPQLFRKKKNGEDVKVPYDWTIYYLRKKALSQKISKQELAWIILNFNPKRGYYQLRGEEEEEASDKKVKTFEILQVDRLEDSDEKIKGSNAKLYDVYFKNGWKYDKQIVKTEDWKDTTKEFIVTSTTDKNGETKRTFKKVDSEKDWIAIKNKTEQDVDESGKHVGVYIFDELLKNPHQKIRGKLIRTIERKYYKKELEAILNEQAKHHPEFQNKRLYQNCLDELYPRNEDHQNNIKKRDLKYLLIEDIIFYQRPLKSQKSTISDCQYETYTYKNKDDIVSETSVKAAPKSHPLYQEFRLWQFIQNLRIYQKEGKVDGKIKLDILITENCFKTEEEWVDLYEFLALKKEVNQKHVIDYLVKKGKINKAEKDNYRWNYVEDKTYPAGETKAQILNRLYKVKGMTYAKSWLTKDKEFALWHIIYSVSDKQQFEKALKTFAQKHNDLHTDSFVEAFKKFPPFKNEYGAYSVKALNKLLPLMRREKYWSEKDIDSDILNRIDKLLSGEFDEKIRDRVREKTIQLNSLEDFKGLPVWLTCYIVYDRHSESKDISKWKSPEDIDAYLESFKQHNLRNPIVEQVVLETLRVVRDIWQHYGKGKEDFFSEIHLELGREMKNPADKRRRITQKVSENEKTNYRIKQILTELMNDGVAVRPHSPSHQEILKIYEEGVYENSPDDYKTVKIKDINEIRKNNELSKKDIECYKLWLEQGYVSPYTKRTIALSDLFSEKYQIEHIIPQSRYFDDSLSNKVICERAVNDEKDDQTAYEFIKNKAGSIIDLGQGEGVKVLSLDDYENHCTKYFLGKKLKNLLSEEVPEGFINRQMNDSRYISKFIKGLLANIVKEEDEKEAISKNLMPVAGAITDKLKKDWGLNDKWNELMAPRFKRLNELTKSDDFGYWDKEINAFRCKVPDEVAKGFSKKRIDHRHHAMDALVIACTTKDHINYITSINTERKNYSLVSKLRNQKEITTVKGKKKTAPTSYKLPWEHFTIQAKEALETTVVSFKQNLRVINKTTNKTWQWVKENGQWKKNLVSQNKGDSWAIRKPLHKETVSGKVLLMRGEQEKEIEATATRIELSDKFTRKQLNKVTDTGIQKILENHLSNYKDEDGKEQFDSAFGVKGIEEMNKNIIKLNGGKPHAPIKKVRIYEVGNKFPISEEASSSKNKKYVEAAKGTNLFFAIYWNEEKQKREYETIPLHKVIEHQKQVAHLPKSERTPIPTDHEKGVFIFSLSPNDLVYVPTDEERSNPNLVNFDKLNKVQAERIYKMVSSNGNQCFFIQVSVTKPIVNKKEFLVMNKMEKSIGDVMVKDRCWKIGVDRLGNIQNKIIIKN

SEQ ID NO: 5643 - protein, 1493 aa, synthetic construct
  REGION 1..1493: note = Synthetic
MKKVLGLDLGTNSIGWAVIDTKQNENGEEVFDKIVCADSRIIPMDQATIGDFNRGNSKSQTAERTRCRGVRRLYERGHLRRERLNRVLSVLGWLPDNYLKSLDRYGKFIAGSEPKLAWRKNSEGKYEFLFEKAFQEMLEDFKATKQQVVADGKKVPYDWTIYYLRKKALTERLSNFELAWVLLNFNQKRGYYQLRGEDEEEKSGKIEEYYSLKVVEIEDTGERKGSDTWFNIVLENGFVYRRPFHEAPDWIGKVKDFIVTTDVDVNGNPKMDKEGQVKRSFRMPKEDDWTLLKKKTECDIDNSRKTVGEYIYDALLHNPESKVRGRLVRTVERKYYRRELELILDRQVALNPDLKDEELYSKCIEALYPSNDAYRNSISGRGFKYLFVNDIIFYQRPLKSKKSLIDDCPLEERYYVLPNTGERKVEHIKCIAKSNPYFQEFRLWQFLSNLRIIERERVADGSIKENIDVTSNFIDGNESLADLFAWINDRESIDQKSLLAYPGFKLNKADQKRYRWNYVEDKSYPANETRAGLLLALDKADVSREFLTSEREYELWHVLYSVEDKNEIRKALSSFAKRYGLQGDFVNVFAKMKPYEKEYGSYSEKAIKRMLPLMRAGRYWKEDNIDEATRCRISRLLSGEFDENIHNRVREKTIALQSMHDFQGLPVWLVCYVVYDRHSEAKDIDKWSCPEDIDAYLAKFRQHSLRNPIVESVVMETLRTVRDIWKAEGRIDEIHIELGREMKNPADKRKRITEQALENENANLRVRAMLTEFMNPEFNVDNVRPNSPGQQEILRIYEDSVLGDGQDIPDDIKSILDKFNKQEPLKRPTSSEVLRYKVWLEQKYRSPYTGEIIPLGKLFTPAYEIEHIIPQSLYFDDSFSNKVICESEVNKLKDKSLGYQFIKEHQGEIVTLSGDRQVKILSVEAYEKFVRDHYSEKKNVAKKRNLLAEDIPESFIHRQLNDSRYISKVVKTLLSNVVREKDEEQDISKNVITCNGQITTRLKKDWGINDLWKQIMLPRFERLDDMSQDESFVAVNANGQKVPVIPFYRQKGFEMKRIDHRHHAMDAIVIACATRNIVNYLNNSSACRDSKEKRYDLQRVVCEKVHPDSSGNYSWVIKMPSDYFVGEVHSALTRCIVSFKQNLRIINKSSNYYEKIEKGEKVRVRQEKGDNWAIRKSMHKDTVFGEVNLRKIKSVSLNEALKNPGRIVRKDIKKLVCPCSDIKAMKMLLTKHFPELTKLDIYYYTSETNDKYFATRTTISPDFTKEFIQKSVTDTGIQNILLKHLDQCGNKPDVAFSPDGIDKMNANIIELNGGRPHKPIFSVRKYEKGDKFPVGEIGCKTKKFVEAAKGTNLFFGVYISSEGKRSYFSAPLNEVIAREKAGLSPVPEKNGEDRLLFWLSPNDLVYVPTEDELERGYVDGELDRGRIYKMVSSSGRQCFFTPASVAVSIVDKIEFSAINKMERAITGEMIKEICIPIKVDRLGRIVKFNGKLR

SEQ ID NO: 5644 - protein, 1541 aa, synthetic construct
  REGION 1..1541: note = Synthetic
LCVPEIKRKFVQRLYTLGITQKLFIMKNIIGLDLGTNSIGWSVVQERQIENDNIQKSISDSGSRIIPMDAAQLGDFAKGNTVSQTKDRTGFRGIRRLRERCLLRRERLFRVFEVMKFLPPHFASSLTRYGKFKDAGEEPKLAWDMDSSGKARFLFMESFNEMVAEFRTTHPELVANGLKVPYDWTIYYLRKKALFRAVTPFELAWIILNFNQKRGYYQLRGEEEQADKGKREEYLAQRVVDIIDTGEKKGKSTWFDVVLENGMVYHRAADIKPDWIGKVKEFIVTTPLDKDGNPKKDKEGNIKRSFRMPGNDDWNLQKKKAEKDIDNSGMTVGEYIYDALLHNPKQKIKGKLVRVVERKYYKEELMRIIETQKKFIPQLTDSSLYRECIEELYQSNEAYRQSVAVRNDFAYLFVDNIIFYQRPLKSKKSLIDNCPYETHKYIKDGEEKAAAVKCIAKSHPLFQEFRLWQFISNLRIYQRQMQVGDRVRLDVDVTDQYLPTEDSRTALFDYLNDKTEIKQDTLLKDFFSMKKPKGKDSLYPCRWNYVEEKAYPCNEARGKMLARLKRAGIAADFLSDKVAEEHLWHILYSVEDKEELRKALTKFAEGNSLGSEFVDAFADMEPYKKEYGAYSAKALKKLLPLMRMGKYWDYENIDKATRKRIENIINGEYDENIRCRVREKAISLTSASQFRGLPLWMACYIVYDRHSEASDTSRWTTPEDIDRYLGEFKQHSLRNPVVEQVVTETLRTVRDIWKKYGKIDEIHVELGREMKNPASKRSEMNRRMLDNENANMRARILLAELMNPEFGIDNVRPYSPSQQELLRIYEDGAISNGASNVDDEITAIMGKLSQTDVKKMPTQNEVRRYVLWLEQNYRSPYTGEMIPLAKLFTSAYEIEHVIPQSRYFDDSFSNKVICEAEVNKLKDRMLGYEFIKQYSGEMVQLSMGRTVRILSPEEYVRHVESQYKGNKAKMRKLLMDDIPDEFINRQLNDSRYISKLVISLLSNIVREEGEEEATSKHVICCSGSITDRLKKDWGINDVWNRIILPRFIRLNELTGTSRFTTLNTEGHHVPAMPLELQKGFSKKRIDHRHHAMDAIVIACTTRDHVNLLNNEAAMSKNNSNRIALSRKLRRYETIEVEKDGVRKQIAVAKEFMKPWDSFTADVEQALRNIVVSFKQNLRVINKTTNYYQHFRDGKKVVEPQTKGDSWAVRKPMHKETVFGEVNLRRIKEVPLKEALKRTGDIVDRELRAKLAELLDLKYTEKQMKKYFEENSDVWSDVNLKKIKIHFFTKETNERFFATRKPIDTSFTKDKIKNQIADTAIQKIMLRHLEQKGGNAEEAFSPDGIEEMNRNIVELNDGKGHQPVYKVRVYEKADKYAVGQSGSKRRKFVEAAKGTNLFFAIYEEEHIDEATGEPSVVRSYDTIPLNIVVDRQKRGLPSAPENEHRIAPKYVLSPNDLVYIPTEEERKMGQINMPLDKERIYKMVSANKKQAFFLSSDVATCIVDKYEFSPLNKQERAISGEMIKEICIPISVNRIGEITLQQ

SEQ ID NO: 5645 - protein, 913 aa, synthetic construct
  REGION 1..913: note = Synthetic
MKNILGLDLGTNSIGWSIVKSETDENGKEHLVGIEAAGSRIIPMDAAILGDFNKGNSVSQTAERTKLRGVRRLRERYLLRRDRLHRVLDILGFLPTHYAQQLDRYGKILKNHEPKLVWRKNAAGVYEFIFKDSFDEMLRIFKAQNPDQGDGKIPYDWTIYYLRKKALTEPISKEELAWILLNFNQKRGYYQLRSEEEEEETNKSVEFQALKVVNVEDSGDKKGKETWYNVRLENGLIYRRLSDVFLDWVGKVKEFVVTTELEPDGTPKRDKDGEIKYSLRAPKEDDWTLVKKRTESNIDASNKTTGAYIWDALLENPKQKIKGKLVRTIERKYYKEELKRILVKQSEYHLELQNRELYTACVNALYSHNEAHRNNILDKNFTYLFLEDILFYQRPLKSKKSLIDNCPYEERFAKDVKTGQVTNVPVKCIAKSNPLFQEFRLWQFISNLHIYRKDVIPETDVTSEFLKNEDDYTALYDWLNDRKDIDQKAFLKNPLWNLKKNAENYRWNYVEDKVYPCNEFRHVVLSRLSKCSVSANFLNKETEQALWHLLYSIEDKEELVKGLQKFAVKYNLGDAFVDVFQKVPAFKKEYGSYSAKAIKKLLPLMRMGKYWNENEINSDVKERISKITTGEYDEKIKDTVREKAKHFESISDFRGLPLWLACYVVYGRHAEAKEIVKWNSPEDIDSYLKSFRQHSLRNPIVEQVITETLRTVKDIWKQVGHIDEIHIELGREMKNPKDKRVKLTQQISENENRNLRIKYLLTEFLNPEFEIENVRPNSPSQQEILRIYEEDILNNTSELPEDIAGIMKKLVESDVKKRPSKSEVLRYKLWLEQRYRSPYTGQIIPLGKLFTPAYEIEHIIPQSRYFDDSYSNKVICESEVNKLKANLLAHEFIANHGGEVVELNYGQTVKYFH

SEQ ID NO: 5646 - protein, 1210 aa, synthetic construct
  REGION 1..1210: note = Synthetic
LIKARKLSEHTFKYDALLENPSQKIKGKLVRTIERKFYKEELKQILQKQQEFHPELQDEDLYNEAVRELYRSNESHQLALGKRDFTHLFLEDIIFYQRPLRSKKSSIGNCSLEYRKYRDKEGVEHIEYLKAAPKSNPYYQEFRLWQWLYNLTIYRRDDDTNVTQEFLNSVEDYENLFDFLDNRKEIRQDTLIKFLLEQKGFKGKMLANEASKYRWNFVDDKEKVYPCNETKALIVSRLAKVENLPDGFLKRETEQQLWHIIYSVTDKDEYEKALKSFAERHGLDVASFVENFKKFPPFKSEYGSFSEKAIKKLLPLMRTGKYWYWEKIDESTKKRIAKILTGEYDENIKERVREKAIHLTEEGHFQGLQLWLASYIVYDRHSEPGIAGKWNSVNDLEKYLHEFKQHSLRNPIVEQIVTEALRVIRDIWAHYGNGVKDFFSEIHIELGREMKLPAEDRKKLSDQMLENERTNLRIKALLAEMLHYPEVENVRPYSPMQQEALKIFEDGVLSSNIEIDDDILKISKTAQPSSSELRRYKLWLEQKYRSPYTGQVIPLNRLFTADYEIEHIIPQSRYFDDSFNNKVICESAVNKLKDNQTSFEFIKNHHSEIVEVGFGKTVRIFEEEEYQKFVKEHYAKNRSKRNKLLMDEIPEKMIERQMNDTRYISKFISSVLSNIVRSETNDDGINSKNIVPLNGKITGRLKQDWGLNDVWNDLILPRFERMNELTGSKDFTAYNERYQKYLPTVPLEFAKNFQKKRIDHRHHAMDALVIACATRDHVNFLNNQHALDKKKTKEEKDKSRFDLRNKLCFKNKGDDKGNYNWQFFKPWGNFTVDARNELEKIIVSFKQNLRVINKSVNYYQRYIDGEKVVDKQTKGDNWAIRKPLHKDTVSGLVRLRKTKTVSLNAALDNYLDIVDKSLRKHIISLVSQNYDKKKLVRYFKERENQWNGIDITKVAIYYWENDNVASRVSLDTSFNEKRIIETITDTGIQMILLNHLENYKGRLDDQGKEIVPESLAFTPEGIDEMNKNIILLNNGKFHQPIFKVRTYEPKGNKFNVGYVGNKKTKYVEAAKGTNLFFAIYVDDEGKRSYETIPLNIVIERLKQGLKEVPERNEKGHNLLFSLSPNDLVYVPGEEELTTSLNHQLDRNRIYKMVSSSGNQCFFVKSEVANPIVNKVEYSVLNKMEKSIDGIMIKQVCRKLQVDRLGNIQFA

SEQ ID NO: 5647 - protein, 1529 aa, synthetic construct
  REGION 1..1529: note = Synthetic
MSKKILGLDLGTNSIGWALVEQDFENKEGKILGMGCRIIPMTQDIKDEFGKGNSISQTAERTGFRGTRRLRERHLLRRERIHRVLNALDFLPEHYANQIDFEKNFGKFKNETEPKLAYNEADFIFKESFFEMLDDFKLHQPHLVSDGKLIPYDWTIYYLRKKALTERIQKEELAWLILNFNQKRGYYQLRGEEEEENPNKLVEFHSLKVIDVVADEKPNNKGEIWYSMYLENGWVYRRSSKTSLNDWKDKVRDFIVTTDINDDGSIKTDNEGNERRSFRAPKEDDWTLLKKKTEQDIDKSNKTVGEYIYDTLLQNPNQKIRGKLVRTIERKFYKEELEAILRKQIELQPELFTEELFNACIHELYRNNEAHRMVLSSRDFVHLFVNDIIFYQRPLRSQKSNIGRCSLEYREYKTKDKEDKEIEVKEYLKAISKSHPLYQEFRLWQWMYNLKIYEKENDKDITTLFLQSSEDWERLFEFLNSKKEVNHKDILSFLITPILKSKYPNAKQAAFNKELVKEISKYRWNYVFDDTKEKEDEKSKKYPCNETGWQITSRLEKVKDIPTNFLTKEKEIQLWHIIYSVTDKIEFGKALKTFAEKNYLDSESFVENFVKFKPFDNDYGAYSEKAIRKLLPLMRLGKYWKWDNIDEKTQDRISKIITGEYDEEIKNRVREKAIHLTEQDHFKGLQLWIAQYIVYDRHSEADIAGKWSSLNDLEDYLQEFKQHSLRNPIVEQVVTETLRVVRDIWKEYGNGAKDFFDEIHVELGREMKNTADERKRLTTIVTENENTNLRIKAMLAEFINDSNIENVRPHSPMQMEALKIYEDGVLNSGIEIPDDIAKISKSAQPTKTEFQRYKLWLDQKYKSPYTGLIIPLNKLFTEQFQIEHIIPQARYFDDSFSNKVICESAVNSLKDKQLGFEFIKNHQGETVETGFGKTVTILNETAYQEFIKENYKNNRVKRNKLLMDEIPEKMIERQLNDTRYISKFVSNLLSNIVRSEQNDDGINSKNVLPGNGKVTNTLKHDWGLNDVWNDIVLPRFIRMNELTQTEHFTAKNSNGKIIPAIPFELSKGFQKKRIDHRHHALDALVIACATRDHINLLNNQSAKSDRSRYDLQYKLREKENYYNQKEGKTKEKFTTFIKPWNTFTQDARNEIEQIVVSFKQNLRVINKTTNKYEKFVKKHDRMVKEKVAQIKGDSWAIRKPMHKDTVSGLIKLRKIKEVSLSVALDNYKEIVDRSLRKQISQLVTNNYDKKKLVKFFKDAKNQWNGKDVSRVKIYYWENDNVASRVSLDTSFTEKRIKDTITDSGIQKILLTHLENYKNKFDEKGKPVAPELLAFTPEGIDEMNKNILQLNGGKFHQPIYKVRTYEPKGNKFQVGQSGNKKDKYVEAAKGTNLFFAIYQDENGKRNYETVPLNIVIERQKQGLSSVPETNEKGDTLLFHLSPNDLVYVPTNDELDNLGGIDFGKLNKEQKNTIYKVVSFTGGRLSVIPINVATAIVNKVEYTQLNKIELTKEKEICIKLKVDRLGNILKA

SEQ ID NO: 5648 - protein, 1501 aa, synthetic construct
  REGION 1..1501: note = Synthetic
MIIMKKTILGLDLGTNSIGWSLINQNFAEKQGEILGLGSRIIPMTQDVLDNFGSGKPSTTSTADRTCYRSVRRLRERNLLRRERLHRVLNILDFMPKHYSNNIDFENRLGKFLPKTETKLVYNEDNQFIFKKSFEEMLEEFRSKHPELLSDGKKIPYDWTIYYLRKKSLSQKIEKEELAWIILNFNQKRGYYQLRGEEEEENPNKLVEFYSLKVTDVIADEARKGNDKIWYSIVLENGWVYRRESKYPLFDWKDKVRDFIVTTDLNEDGTIKTDKDGKEKRSFRAPSEDDWTLLKKKTEKEIDNSQKTVGEYIYNALLKNPSQKIKGKLVRTIERKFYKEELVKILKKQTGFHKELQDEKLLNTCIEELYPRNEERQKLLKTKDFVYLFVEDILFYQRPLKSQKHNIGKCSLESRKFKKNGVETTEFLKTISRSHTLFQEFRIWQWMQNLKIYEKLSDENVTDKFLSNEEDFANLFEFLWNRKEVDHKALLEYVVKRKYEDLKPKQVTAKAKEFRWNYVYDDVKDESKNYPVGETFSMIKSCLEKIENLPKNFLSQEILEKIWHIIYSVTDKIEYEKALRTFAKKNHLDEEQFVENFKKFPPFKSDYASLSLKAIKKLLPLMRMGKFWDASTIDEETKRRLNSIKERLESIDFDEKKLDEISDDDILKPVLKSFSKFKNRSLEKGLNTYQASYAVYNKHSEGSSTKWNSVKDLEKYLEDFKQHSLRNPIVEQLITETLRVVRDIWQEYGNGEKDFFKEIHIELGRDLKNNSDERKRITEFQTKNENTNLRIKLLLTELLNAGVENVRPFSPMQQEILKIYEENSIQNIADEDFDNENLKSENITFDEIIKISTMQQPTSSQLQRYKLWLEQKYKSPYTGQVIPLNKLFTSEYEIEHVIPQTKFFDDSFTNKIICESAVNKRKDKQLGLEFIKNCGGEIIELGLGKKVTILFEEQYKDFINTHYSKNKAKRNKLLLEEIPEKMIERQLNDTRHISKLVMNLLSNIVRSEDGKDDGVNSKNVLSLSGKITSELKHDWGLNDIWNELILPRFERLNTLTNSNDYTAFNEKHQKDLPTVPLHLEKGFQKKRIDHRHHALDALVIACSTRNHINYLNNQNALDSNYKKKFLTKEEYRERFQKAREDLRRDLCDKKVDVENLKNYQWIFKKPWQNFTKQAKDNLETTVVSFKQNQRVINKTVNYYEKYNDEGKKVMVKQTKGDNWAIRKPLHKETVSAKVDLPRIKVPKGKILTASRKSLDTSFNLKNIESITDTGIQKILRNYLKEKENPELAFLAEGIEELNENIAKYNDGVPHKHIYKVRVFETGSKFPLGETGNKKDKYVESAKGTNLFFAIYQDEKGKRNFETIAFNIVLERLKQGLKAVPETDEKGNRLLFSLSPQDLVFVPTEEEIANPNLVDFENLDKNQVNRVYKMVSTTQNKLECVPMSYSKSILENEMGSNNKNERIQNFYDGKTIFDEKQNPIQIKSVCWKLEANRLGKIIKVIK

SEQ ID NO: 5649 - protein, 1638 aa, synthetic construct
  REGION 1..1638: note = Synthetic
MKKILGLDLGTNSIGWALLEQDFEHKQGTILGMGSRIIPMDEGIKGKFEDGISVSQTAERTRYRSVRRLRERNLLRRERLHRVLNVLGFLPEHYANSIDFEKHFGKFKNETEPKLAWKKNGKKKNGKDKFEFIFQDLFDEMLADFKHNQPELLNRKNRNNEPAKIPYDWAIYYLRKKALTEKIKKEELAWLILNFNQKRGYYQLRGEVEETTSEDSKKESVLNLKVVGVKKGEVDKKNNKKTWYSITFENGWVHSFPFTAEPNWLNTEREFIVTEEYNKETGEIKIVKDNKKDTVGREKRSLSVLPSFEEIELMSKKEQDKIYKKIKARTELTISNSKKTVGSYIYETLLKNPTQKIRGKLVRTIERKFYKDELKAILEKQVELQPELFTDELYNACVRELYRSNEAHRVQLSKKDFVHLFLEDIIFYQRPLRSQKSSIGNCSLEFREHKVNVKDEKGNPIKNKFEKDINGKDILIKEYLKAIPKSNPYYQEFRVWQWLHNLKIYNRKDDTDATEEFLKSIEDKERLFEFLMTKTEVNHYDVLEYLLTPGIKERFPDAKPKAFKNELNKEISKYRWNYVFDDAKEKEGEKSKAYPMNETGYEIRKRLEKVESIPVDFLTRDIEQNLWHIIYSVTDPKEYEKALKSFADKHQLGSESFVAEFKKFPPFKSDYGTYSEKAIKKLLPLMRVGKYWDGDVIVKNSTNYFNNIQQLLEKLSKKEGAITKEQKEKWNKDINRKLYDELNLFNDADISLFQGLQLHIAQYLVYGRHSESADISQWTRSYDVQNYLYEFKQHSLRNPIVEQVITETLRVVKDIWKHFGKGEENFFDEIHVELGREMKNTAEERKRLTNIVSENEATNQRIKLLLMELKNDSSIENVREYSPSQQEILKIYEDGVLSYFTEQKLKEEVFQDAGKEEAKNVYEISRKAQPNKSELIRYKLWLEQKYQSPYTGEIIPLSKLFTPAYEIEHIIPQSRYFDDSLSNKIICEAEVNKLKDNQLGLEFIQNHFGEKVQIGEKEVSVFTVEKYKQFVEEHYTNNRNKRTKLLLDDIPEKFIARQLNDTRYISKYVSQILSNIVRADENDDGVNSKNLILCNGQITDRLKQDWGLNDIWNSLILPRFERMNQLTHSTKFTTKNKEGHTIPQIPFELSKGFQKKRIDHRHHAMDALVIACATRDHVNLLNNQSAKSENIRIDLQNKLRNKEKWTDRNGREHDKFTTFKKPWENFTVDTKNELEKIVVSFKQNLRVINKATNYYQKFKNGKKVEEEQKGTNWAIRKPLHKATVFGKVYLLNKTRKLSIKKALIKVNELKDMKIIVNEKQRVAISKYFNENNVDIENALKDPFLNKFKEIEIYEVQSATRQGNDLVSIFKDVKTKNKAEGVINNITDTGIQKILLKHLLSKENNPEIAYSPEGIEEMNKNIVSLNNNTFHQPIIKVRMYETIGNKFPVGESGNKQDKYVEADKGTNLFFAVYEYEEFDKKKERTIKKRSFETLPLNEVIERQKQGLSPVPDMNKEGHSLIFYLSPNDLVYVPTKEELESNTKIDIRNLTKEQRSRIYRFTDGSGKMANFIPVNIANVLFNMNKDKQKKTFGKELFAIQNEIGVGSQGSKNENATTGEQIKSICIKLSIDRLGNISKTQ

SEQ ID NO: 5650 - protein, 1456 aa, synthetic construct
  REGION 1..1456: note = Synthetic
MKNILGLDLGTNSIGWALVDKENQKILGMGSRIIPMSQDILGDFGKGNSVSQTAERTRFRSVRRLRERHLLRRERLHRVLNVLGFLPNHYSDQIDFEKRLGKFKEEAEPKLAYQPICNRENGKNDFNFIFKKSFNEMLDDFRKHQPQLLVNDKKIPYDWTLYYLRKKALTQKIEKEELSWILLNFNQKRGYYQLRGEEEEENPKKQVDFHSLKVTDVQADEKKKGATDIWYAIILENGWVYRRSSKTPLFNWKDKIKDFIVTTDLNEDGTIKTDKEGNEKRSFRAPGEDDWTLLKKKTESEIEFSGKTVGRFIYDNLLQDPKQKIKGKLVRTIERKYYKKELEQILQKQKEFHSELQSEDLYIDCIRELYRNNESHQLLLSKKDLIHLFLDDIIFYQRPLKSKKSSIGNCSFEYKKYTLNNEEKIEYLKAIPKSHPFYQEFRLWQWIYNLRIHRKDDDSNVTSEFLNSAESYASLFEYLNDRKEIDQKALLKYFKIKDTSHRWNFVEEKKYPCNETRTLIRTRLSKVDDNILTKEIEEQLWHIIYSVTDKIQYEKALKTFANKYNLDATSFVDNFKKFPPFKSEFGSYSAKALKKLLPLMRAGKYWSYDNIDEKTKSRINKIITGEFDEEIKNRVRENAINLTDENHFQGLQLWLVSYIVYDRHSEAAMINKWDSVAHLEEYLNEFKQHSLRNPIVEQVVTETLRVVKDIWQQYGKGTKDFFDEIHIELGREMKNTADERKRITAQVNDNENTNLRIKALLAELKNDSNIENVRPYSPQQQEILKIYEDGILSSDIEIPEDIFKISKTSQPSSSELQRYKLWLEQKYRSPYTGQMIPLNKLFTTDYEIEHIIPQSRYFDDSFNNKIICESAINKLKDNQIGLEFIKNHHGEIVQTGFGNIVKIFEVSDYEDFVKTHYLKNRFKRNKLLMEEIPEKMIERQINDTRYISKFISFVLSNIVRADKNDDGVNSKNVIPGNGKITNTLKQDWGLNDVWNDLVLPRFERMNQLTKSKVFTAYNDKYQKYLPAVPLELSKNFQKKRIDHRHHALDALVVACATRDHVNLLNNKYAKSNERFDLNRKLRKFEKVVYNHPKTGVRIEKEVPKDFKKPWDNFTVDARNQLETIVVSFKQNLRVINKATNHPEKWVEINGQKIKKEVEQKGINWSIRKPMHKETVSGKIDLKRIKVPKGKILTATRKNIDSSFDIKNIESITDTGIQKILKNYLSAKNNDPELAFSPEGIEDMNKNIVLYNNGKPHQQIRKVRIFELGSKFPLGQKGNKSTKYVEAAKGTNLFFAVYKNEEGNRSFETIPLNEVIEHQKWRATLSKTEQKNTPLIPINIAKGKFLFCLSPNDLVYVPDEEEIINQTPIDFYNLSKEQRKRLFNVNDFSSTCYFTPNIVAKAIAPKEIDLNYDKQKNKITGSFDTKTTSLNGVQIKDVCIKLKVDRLGKIKPIINYQ

SEQ ID NO: 5651 - protein, 1612 aa, synthetic construct
  REGION 1..1612: note = Synthetic
MKKILGLDLGTNSIGWAVVNAEETLRENETTYLKPTGISAAGSRIIPMSADILGDFEAGNSVSQTKDRTDKRGARRLLERYLLRRERLLRVLKLMGFLPEHFAKQIDENGKFINHSEPKLAWRKDEQGKFEFVFKDSFEEMLEDFALHQPQLVADGKKVPYDWTIYYLRKKALTQRLTKEELAWVLLQFNQKRGYYQLRGEDDDEQQDKLVEYIAQKVVRVEATDDKKGDEIWYNVHLENGMVYRRTSKTPLDWAGKIKEFIVTTDLEKDGTPKKDKEGNIKRSFRAPKEDDWTLLKKKTEFDIDNSHKTVGCYIYDNLLQKPNQKIIGKLVRTVERKYYKEELRQILETQVALIPELKDATLYNRCIEELYPNNEAHRNNIAKPDFANLFINDILFYQRPLKSKKSLISDCPYESHFDKDGNEHPVKCIAKSNPLFQEFRLWQFVQNLRIYQRERIVSDGQLDLFGNQSAGKLQTDVDVTNELLKTEEDYVKLFDWLKDRASIKQDTLLNSYFKFKKEKGKDQYPYRWNYVEDKDYPCNETRATMLGGLTKCSLDAGFLTRENEMSLWHILYSVEDKTEIGKALKKYAEKNNLPESFAEVFAKVKPFKKDYGSYSEKAIKKLLPLMRMGKYWDAEAIDNRTKERIDKILTGEYDENIKNRVREKSINLTDINHFRALPVWLVCYIVYDRHSEAKEIGKWEKPEDIDRYLKDFKQHSLRNPIVEQVVTETLRTVRDIWKQEGQIDEIHLELGREMKNPADKRKKMTERILDNENTNLRIKALLMEFMNDPEIENVRPYSPSQQDILRIYEENALDNLTKDDKDFDFVSKISKSAQPSKADITRYKCWLEQKYRSPYTGQMIPLAKLFTSAYEIEHVIPQSRYFDDSFSNKVICEAEVNKLKDRQLGFEFIKNHKGEKVQISQGKVVEILSVEAYEKFVRDHYSSNRAKMKKLLMDDIPDGFIERQLNDSRYISKLVKGLLSNIVREKLDNGEYEQEAVSKNLISCNGSITDRLKKDWGMNDVWNSIVLPRFRRLNELTGKISDDELVAEFKRLFEEQLIVCSKSRNESINSSYTDYYKSLGEKEQKKVIDEVMKKLPIKESFLSVNNEGHIIPNMPLELQKGFNKKRIDHRHHAMDAIVIACATRDHVNLLNNEAAHSKHNANRYQLQRKLRRFEKMTIDGKEKEIAKEFLKPWDSFTTDAKQALENIIVSFKQNLRVINKTSNHYQHYDENGKKVLVKQEKGDSWAIRKSMHKATIWGEINLRFKKEISLEKALENPQTIVNKEFKQKVRELLNEGRDAKFIKKYVENNKDVWSDIDISKIEVYYFTQNVKDKNGKIKDRYFATRFLSDLVTYMAGVKEYDKAIKKIEGITDTGIQKILRAHLKAKDNNPEIAFSPDGIDEMNRNIVELNNGKFHHPIYKVRRFEKGNKFPIGKTGNKGVKFAEADDGTNLFFAIFGTEKTNKKTGETETVRSYLTIPLNVMIDCQKKYGSQWRNCIEIYLQEQQLVTSDAKLLFILSPNDLVYLPTKEEIRNGISTIDRKRIYKFVSCTGNEGHFIPEIIATPIVQTTELGSNNKAQKAWTGEMIKETCLPIKVDRLGNIIEFNGKKIES

SEQ ID NO: 5652 - protein, 1501 aa, synthetic construct
  REGION 1..1501: note = Synthetic
MKKILGLDLGTNSIGWAVINKAENEGKDVLCGIEAAGSRIIPMDATIMGDFEKGNSVSQTKDRREHRSTRRLYERGKLRRERLNRVLSVMGFLPDHYVSQLDRYGKFLSNTEPKLAWVRNADCKYHFLFMDSFSEMLQEFKTNSPQYISEESKVPYDWTLYYLRKKALTHKVTKEELAWILLNFNQKRGYFQLRDESEEEKKPSKIRQYFEHQKVVDIIDTNEVYKGLKVLIVILANGISGKIFKKEIPDWIGVEKDIIVKVDIDKDGKDKFNEDGSLSCRFNIPTEAEWDTEWELIKQKTQNDLDASGKTVGEYIFDTLLRNPEQKIRGKLVRTIERRYYKEEINAILKKQKEFHPELSDRALYEKCVEELYPNNPAHRNMMLIHDLSYFLVNDILFYQRPLKSKKSLIDECPYESHLYIDKKSGERKPVAVKCIAKSHPLYQEFRLWQFISNLRIYQKTKEVGNSLKVDVDVTNEFLKGENDYVELFDWLNTKKEIKQEDFLKYKPFGFTKGNINNYRWNYVEDKIYPCNKTHYTILKGLEKADITFDEFISHDSLAEENLWHILYSVSSKEELKHALESFADKRGLSIKFVDAFINTPAFEKSYGAYSAKAIKKLLPLMRMGKYWKEENICDSTRERIDKIITGEYDENIRDRVREKSINLTDITLFRGLPLWLACYVVYDRHSEAGNTERWTSPSDIDHYIRKFKQHSLRNPIVEQIVLETLRTVRDVWTEVGGIDEIHVELGREMKNPSDKRRKMSLQMQENENTNLRIKALLAEFINPELGIENVRPYSPSQQDLLRLYEEGAWNSPEIDEKQVDEMLAILKKFNETDSSKRPTKSEIKRYRLWLEQKYRSPYTGTPIPLSKLFTTAYEIEHVIPRSRFFDDSLTNKVICESEVNKLKGNMLGYEFIKSHYGEKVQLSSGSEVQIFSVNDYEKFVKDHYSKNKAKMKKLLMDDIPEKFTERQMNDSRYISRLIVSLLSNIVREKGEQESISKNVLVCTGGVTDRLKNDWGVNDVWNKIILPRFKRMNEITDSTDYTSVNTSGHIIPAMPLHLQKGFNKKRIDHRHHAMDAIVIACAGRNIVNYLNNQSSKSDVSRHDLRNLLCEKDKSDRKELIIKPWDTFTQDVYSVLSSIIVSIKQNLRVINKTKNIYQRKEDGKVIISKQENNINWWAIRKPLHKETVSGEVNLRKETTISLKEAIDNPARIIDKDFKKKLRELILMGYNEKLIKKYFYDNNESWQDVNLKKIPAYYFTKDTNDRYFASRSLLDENFDKKKIENKVTDTGIRTILLRHLEVEGGDSKVAFSPEGLERMNKNIEILNGGKKHKPIYKVREYEKAEKFAVGMRGNKASKFVEAAKGTNLFFAVYDNGKKRSFATVPLNEVIRLQKEGLPSAPANEEGLLPKFVLSPNDLVYVPTEDELRSGLLPENPAPERIYKMVSCTGYQCFFIHFSVSGVLCDKKEFSSLNKMERAISGEMIKEICIPLKVNRLGKIMYNL

SEQ ID NO: 5653 - protein, 1510 aa, synthetic construct
  REGION 1..1510: note = Synthetic
MRKILGLDIGTNSIGWAVIDSVINSENKEELRGISSAGSRIIPMDAAALSDFDKGNTKSQTSERTSFRGKRRLLQRKVLRRERLHRVLARMGFLPEHYLKHIDRFGKFIDSQEPKMVWRKDDSGKQSFLFMDAFNEMLSDFRQNNPDLIENGKKVPYDWTLYYLRKKALRTKVSKEELAWILLSFNQKRGYNQLRGEEEEEDNKKDVKYYALKVISVEDSGERKGKDIWYNVYLENGFVYRRASSVPLDWVGKIKEFVVTTELDDNGQPKRDKNGEVKRSFRAPAPDEWALIKVRTQEQIDKSGKTVGEYIYDSLLGNPMQKVRGKLVHTIDRRYYKDELYIILEEQRKHHEELRDASLLAECVAELYQHNESHRNILLSKGFTNFLLNDILFYQRPLKSKKSLIDDCQYEYRVYKKDGKLCREYLKCVPKSHPLYQEFRIWQFISSLRIYKREMKVGDALKTDVDVTHDFLSCEDDYVKLYDILSDMETIEQKTFLGLKFLGISKKEQSSFRWNYVEDKKYPCGSTRAQIISRLKKAGVNHDFLTKDAEIELWHILYSVSDRTELYKALKKFASKNSLDEAFAEALSKMPAFDSEYGAYSLKALKKLLPLMRMGKYWSEDAIDQHTRERIEKIITGEYDESIRNRVREKSVHLTDVTSFRGLPLWLACYVVYDRHSESGEDVRWKQPSDIDDYLKKFKQHSLRNPVVEQVIMETLRVVRDIWQKEGQIDEIHVELGREMKNPSDKRKKMTAQMLENEYTNLRIKAMLLEFMNPEFGIENVRPNSPSQQDILRIYEEGAIQSCDDKDMPEDIVAIIKKFRENDFSKRPTRTEVMRYKLWLEQRYLSPYTGKPIPLAKLFTPAYQIEHVIPRSRYFDDSLSNKVICEAAVNREKGNMLAYEFIKNCHGKKIELGGGDSPVNVFEVEEYEKFVKDHYAKNNAKLKKLLLEDIPDAFIERQMNDTRYISKVVKSLLSNIVREEGEQEATSKNLVVCTGGITDRLKKDWGVNDVWNRIILPRFQRLNAMTGTSEFTAENQSGHLIPVVPLRFQKGFSKKRIDHRHHAMDAIVIACADRNIVNYLNNLSACSNAKLKRQDLQQMLCDKVKTSENSGYTRLLRKPWATFTQDVYSVLSNIIVSFKQNLRVINRTSNKYQHYDDLYLKKIMKLQSANENCWAIRKSLHKDTYYGQVNLRRKKSVPLKVAIENIDAIVEKSLKKKLKELITKQYGMKDIMRYFEENADVWQDINLKKIDIYYFANDSDERFFATRKPLDTSFGKSKIEDEITDTGIQKILLKHLQNSGGNPQVAFSPDGIERMNQNLSALNDGKPHLPIYKVRVFEKADKYAVGQKGRKGSKYVEAAKGTNLFFAVYEKTIEDVKTGNVIKKRMFESISLVDAIRQQKEIALNGSRNTSNKNEPLFILSPNDLVYLQTKEEMESGKIIKPIDTQRVYKVVSFTGGRMFVIPYGVASVIVDKVEYCSLNKIELTDDKVSIKERCVPLDVDRLGNVVIKS

SEQ ID NO: 5654 - protein, 1606 aa, synthetic construct
  REGION 1..1606: note = Synthetic
MKKILGLDLGTNSIGWAVVNADEKNRDDGSTYLKPYGISAAGSRIIPMSADILGDFEKGNTVSQTAERTRLRMARRLHERALLRRERLIRVLNLMGFLPKHFSDKVNRYGKFIDDSEPKLAWRKNAEGKYEFVFQESFNEMLEDFKKIQPELVAGGNKIPYDWTVYFLRKKALTQRISKEEFSWLLLQFNQKRGYYQLRGEEEEEKANETVEIIAAKVLSVERKEKDKKYDKYWYEMPLDNGLTYRASFYNDVSSWKNETKEFVLKTTILKDGSKKEELSFLPTPEEIELMDAPKKGKMYAKIKLRTEKNIENSHKTVGCYIYDSLLNNPKQKIIGKLVRTVERKFYKDELTKILRKQVEFIPEFQDENLYKKCIEELYPINEAHRNNIAKPDFVNLFINDILFYQRPLKSKKSQIDNCPYENHIYIYKNQEKNIEEKRIAPVKCIAKSNPLFQEFRLWQFVQNLRIYQREKEKDGKLLTDIDITSECLKSEYDYVKLFEWLNDREIIDQEELLKHLFNTKKSKNKELPYRWNYVEDKTYPCNETRAAILKGFSKCCIDISVLSPELEYALWHILYSVEDKNEVEKALTHFAQKQGWNENFAKIFSKIKPFQKDYGSYSEKAIKKLLPLMRMGKFWSQDNIDKNTLDRIDKIINGEYDKEISNRVRDNAINLRDVNDFRGLPVWLACYIVYDRHSEAKNCYKWNSPEDIDAYLKDFKQHSLRNPIVEQVVTETLRTVRDIWKQEGQIDEIHLELGRDLKNPADKRKKMSENILKNENTNLRIKAMLMEFMNPSMGVENVRPYSPSQQDILRIYEENALDNLTKEDEDFDFISKISKQAQPSKSDIVRYKCWLEQKYRSPYTGKTISLSKLFTSAYEIEHIIPQSRYFDDSFSNKVICEAEVNKLKDRQLGYEFIAEHHGEKIQLSQGEVVEIFSVNAYEKFVKENYASNRLKMKKLLMENIPDEFIERQLNDSRYISKIVKDLLSNIVREKIDEENYEQEAVSKNLISCNGTITDRLKKDWGMNDVWNSIVLPRFIRMNNLTKRISNVELANEFKRLFESELSCFAKAEGVVISESFPDFYKTLKTNQQRTIIDNVVKQLPITDSFLSVNNEGHIIPNMPLKLQKGFNKKRIDHRHHAMDAIVIACATRDHVNLLNNEAAHSRYNVNRFQLQRKLRRFEKTVIDGEERNVAKEFLKPWDSFAKDAKSVIENIIVSFKQNQRVINKTTNVYQHFDQDCKKIFVKQEKGDSWAIRKSMHKATFYGEINLRKIKSVSLTEAIKSHERILNKIIRDKVSELKKNNVKIQNIKKFIEDNHIGGFGLNKSKIDIYFYTKETKERFFATRKSLDMSFDKNKIENSLADSGIQKILLAHLERKNGNAEQAFSPDGIDEMNKNIVELNKGKFHQPILKVRVYEKAEKFVVGQNGNKKFKFVEAAKGTNMFFAVFEKNGKRSYLTIPLNVMIDCQKKYGNQWKNNIESYLKENKLTENDVKLLFILSPNDLVYLPTAEELKEKVKSVNKDRIYKFIDPNSDKGNFVPYSSANVIFSINFSDQKKRGVSYPIQDEFGVGSQGSKNSRAITGEMIKETCVPIKVDRLGNITELDGRRL

SEQ ID NO: 5655 - protein, 1538 aa, synthetic construct
  REGION 1..1538: note = Synthetic
MKKILGLDLGTNSIGWALVAQNFQKKEGNIKGLGSRIIPMSQDILGKFDAGQSHSQTSERTSYRGVRRLRQRTLLRRERLHRVLNILNFLPEHYQKAIDFEKHFGKFKHNSEVKLNYKENSDGKHEFLFMESFNEMVSDFKALHQETNIPLDWTLYYLRKKALTHKITKHELAWILLNFNQKRGYYQLRGEEEDDDSGKQITFERLLVTEVKDTGEVLKKTNEPLYEIFFENGWKYDKQTTKPHNWLNKYKEFIVTISTLKSGEEKITYKAVDSEKDWIAIKKKTEQEIEQRNVTVGKFIYETLLKNPSQKIRGKLVKTIERKFYKEELKKNIETQIQFHPALQDEKIYTACVNELYPKNVAHQNAIKNKDFAYLFLEDIIFYQRPLKSKKSTISNCPYEQRYFIKDGIKNIQPLKCIPKSHPLFQEFRLWQFLQNLKIYLIDDIENNKKDVDVTPTFFNTEQDWVALFDYLNTKKDIDQKQLIAYLVKLGKIKKLEKENYRWNYVEDKKYPANETKASFLSKLNKVEGLDAVAFLTTDVELHLWHIIYSVNDITAYEKALKTFANKHHIREDAFVAAFLKFSPFKNEYGAYSEKAIKKLLLLMRMGSYWNENHISNEVKLRVESIKERLESIQYDEAVFKKDSNNLLQRIADDEVPKQLLKSFLSFKGKNHLKGLNTYQACYAVYERHSELGTIQQWHSPQDITNYLNEFKQHSLRNPIVEQVVTETLRVVRDIWVQLGESKKGFFNQIHLELGREMKNSAKKRETISKRNAENEKTNTRIKALLEELKAETNADIRSFSPSHQEILKIYEEGVSQNPNVSYANLSEDDVNKIRKNSAPTKAEINKYKLWLTQGYLSPYTGEIIPLSKLFSVDYQIEHIIPQSRYFDNSMSNKIICESDVNQLKGSKTAYEFLKSEKGRIVSLSNGKQVKLFNLEQYENHCNQYFKGNRTKLKNLLAEEIPEGFINRQLNDSRYISKFIKSLLSNIVREENEKEATVKNLLPVSGAVTSKLKQDWGLNDKWNEIVAPRFMRLNELTKTNDYGEWDSKINAFRSKVPNEIASCFSKKRIDHRHHALDALVIACCTREHSNYLNSLNAQKENYGLKDQLLIKNKEGHYTKHFKLPWSNFTTDAKNNLEKTVISFKQNLRIINKTNNKTWQWQPQENGTFKKVLVKQKGPGQSNNKTNWAIRKPMHKETVSGAVQIKRLKKGEHNIANYVTTPNLIVNKAIRNKLLRVIEVFNNDIKKVKKHIKDNPIQLQGKKVTKVKVYEWTQNATATRVALTEKFTRKQLNAVTDSGVRTILNNHVKMYVNEKQEEQFNLAFNTDGNEALNNNIVRLNNGKKHQPIYKVRLYEEGSKFKVGETGNKTSKYVEAAKGTNLFFAIYYNEEKQKRVYETIPLDKVIAHQKQTANIPQNEKLLIQPDYTKGKFLFSLSPNDLVYVPTEEEILNNNLVDFSNLSPEQVGRIYKMVSSTGAECHFINNHISKLIKSYDSKTKIGEFGSLNKSELSYDDSRIKERCWKLEVNRLGKVVKVLAND

SEQ ID NO: 5656 - protein, 1467 aa, synthetic construct
  REGION 1..1467: note = Synthetic
MKYIKYILGLDIGSNSIGWALIQLFIEEKQGKIIATGSRIIPMDQGILGNFEKGNTVSQTADRTFYRSARKLRARHLLRRERLHRVLHILGFLPTHYDKQIDFSKRYGKFVDNTEPKIAYNEGKFLFMDSFQEMLADFKSHQPDLFYTKKNGEESKIPYDWTIYYLRKKALSQKISKEELAWIILNFNQKRGYYQLRGEEEAENPNKEVAYYSLMVTDVTVEAPNKKGEIWYSIQLENGWVYRRTSKIPLDDWKGKVRDFIVTTELEEDGSVKRDKDGKEKRSFRAPSEDDWNLLKKKTEQDINTSRKTVGCYIYDHILQNPNEKIKGKLVRTIERKYYKEELRAILEKQIVLQPELFTDQLFTDCIRELYSKNEAQQRNLAARDFVHLLVEDIIFYQRPLRSQKSTLANCSLESRSYIDKDSHTRKEVPLKVCPKSNPYYQEFRVLQWLQNLKIYKIDTDQEVTHEFIKTLEDKQQLFDFLMNQKEIDCEELLKYFLNQTYPNAKEKALKSELKKWKDTYRWNYVYDIGEKSSKKYPMNETRYELKRHLEKVANLPDDFLSSEVEYLLWHLIYSVTDKVAYEKGLKKFAQKHHLDKDSFVESFKKFKPYPSEYGSFSEKAIRKLLPLMRFGSYWDFNHIDKNTQKRIEDLITGVENEEIRTILREKAEKYQLERETDFQDLPLWLAQYIVYNRHAEASSLEKWTSVNDLETYLNEFKQHSLRNPIVEQVVTETLRVVRDIWQQYGQGQADFFDEIHIELGRELKKTAKEREELSKQNQKNEDINLRIKALLAELGEDNTIENVRPYSLMQQELLKIYEEGVFSSSMEIEEEIEKIHKKASPSKTELQRYKLWLEQKYKSPYTGQIISLKRLFTEDYEIEHIIPQSRYYDDSLSNKVICESAVNKLKGNQLGLEFIKNHYGEKVHAAGKEVSILTEEQYKEFAKNHYANNSGKMKKLLLEDIPEKMVARQMNDTRYISKYISEILSRIVRSDERDEGVNSKNVILCTGKITSALKQDWGVNDVWNDLILPRFERMNALTQSTLFTTYNERYQKYLPTVPMEYSNGFQKKRIDHRHHAMDAIIIACATREHINYINNQHALEKGKDKKEKQKEHDKLREKLCIKKYNKGSEENYSWIFKKPWAHFTQEVRTALEGIVVSFKQNLRVINKATNYYECWVEENGRYIKKMVKQEGTNWAIRKPLHEETISGKIYLDREKITKNDILTATRKTVDSSFDEKRIKKITDTGIQKILLNYLKYKGSPEIAFSPEGLEELNKNLSIYNDGKPHKPIYKVRIYEKGSGRFALGEKGRKYKKYVQGAPNLYFGIYQGANKRSFATIPLNEVIERQKQGRSSVPEYNEKGDPLLFSLSPNDLVYVPIEGENIENIDFQNFSKEQKERIYNVNDFSSTCYFTPNRIAKAIFPKEVDLQRKGDKLSGSYDTKTASLEGIQIKEVCIKLKVDRLGNLSKA

SEQ ID NO: 5657 - protein, 1551 aa, synthetic construct
  REGION 1..1551: note = Synthetic
MKKILGLDLGTNSIGWAVVNADETNRENETKYLKPTEISAAGSRIIPMSADILGEFEKGNSVSQTAERTGFRGTRRLLERNLLRRERLLRVLNLMNFLPEHYATHINRYGKFTDDSEPKLPWCKNEQGKLEFIFTDSFYEMLADFAKYQPQIVANGKKVPYDWTIYYLRKKALTDAITKEELAWILLQFNQKRGYYQLRGEEEEENKDKLVEFLAQKVIKVEATDEKKGDDIWYNVYLENGMIYRRTSRIPLDWEGKIKEFIVTTDLEKDGTPKKDKEGNIKRSFRAPKEDDWTLVKKKTEYDIENSNKTVGYYIYDNLLQNPNQKIIGKLVRTIERKFYKEELRLILEKQKEFIPELRDENLYLECINELYPINEAHRNNIAKPDFTNLFINDILFYQRPLKSKKSLISDCPYESRFDKDGTEHPVKCIAKSNPLFQEFRLWQFVQNLKIYEREKELNGKLQTDVDVTAEFLTTEDDYVKLFEWLNDRAGIKQDTLLNSYFKIKKAKGQEKYPYRWNYVEDKDNYPCNETRATILSGLAKCNISSDFLTHEQEMALWHILYSVEDKIEIGKALKKYAEKNNLPESFAEVFARIKPFPKEYGSYSEKAIKKLLPLMRMGKYWNADEIEDSTKKRIEKILSGEFDENIMNRVREKAINLTELNQFKGLPTWLACYIVYDRHSEAKEIEKWEKPEDIDKYLKHFKQHSLRNPIVEQVITETLRTVRDIWKQEGQIDEIHIELGRDMKNPADKRKKMTERIQQNENTNMRIKALLMEFASPEMEIDNVRPHSPSQQDILRIYEENALDNLSKDDKDYDFISKISKTAQPSKSDIIRYKCWLEQKYHSPYTGEPISLGKLFTSAYEIEHVIPQSRYFDDSFSNKVICEAEINKLKDRQLGYEFIKNHHGEKVQLSLGKTVEILSVDAYERFVKDKYSNNPPKMKKLLMDDIPDGFIERQLNDSRYISKVVKGLLSNIVREKLANGEYEQEAVSKNLISCNGTITDYLKKDWGINDVWNRIILPRFERMNKITGKDCFTTTTTEGHLIPNMPFELSKGFNKKRIDHRHHAMDAIVIACTTRDHVNLLNNEAAHSKNNANRYQLSRKLRRYEKITINGKEEREVPKEFIKPWDSFTTDVQKSLENIIVSFKQNLRVINKTTNHSEHFEDGKKVLVKQEKGDSWAIRKPMHKDTVYGEINLRKIKTVSLNEALKTPTNIVNKDFKQKIRELLAEGNDAKFIKKYLEENKDVWSDINPAKIEVFYFSQDEKKKNGEPKERYFATRKNLDTSFDKKTIVENIADTGIQKILLAHLASKGNNPELAFSPDGIEEMNRNIIALNNGKFHQPIIKVRKYEKADKFAVGQNGNKSKKFVEAAKGTNLFFAIFVSEKENKETGETEKVRSYYTIPLNVMIDCQKKYGSKWNDNIETYLKEKEIVSNDVKLLFILSPNDLVYLPTKEDLNKEIKVIDKNRLYKFIDPNDNKGSFVPLSTANVIFSIKFSDQNKIGISYPIQNEFGVGSQHSKSPRAITGEMIKETCVPIKVDRLGNIIEINGKSIK

SEQ ID NO: 5658 - protein, 1500 aa, synthetic construct
  REGION 1..1500: note = Synthetic
MRKILGLDLGTNSIGWSVVKAESNEDGKEVLRGIEAAGSRIIPMDASVLADFDKGVSKSQTAERTRLRGIRRLYERSILRRERLHRVLDLLGFLPTHYAESLTRYGKFKQPDGCKLAWKKNDDGSYEFIFQESFDEMVAEFKAHHPELLQNGKKIPYDWTIYYLRTKALKEKIKKEELAWILLNFNQKRGYHQLREEEEENSNKRMEYYALKVINVEDSGEKKGKDTIYKVYLENGMTYQRASKTPLDWIGKTKEFIVTTELNPDGTEKQNKDGEIKRSFRQPNENDWNLVKIRTEENIAKSHYTIGEYIYRSLLNNPKQKIRGRLVRTVERKFYKDELKQILETQVKFHAELQDSELYKACLQELYPSNESHRNYISARNFVYLFLEDILFYQRPLKSKKSLIDNCPYEEHSYIDKSTGEIIPVPIKCIAKSHPLFQEFRLWQFIKNLRIYKRDAFVNGKPVSNLDVTQEFLPDENAYANLFKWINDKENIKQNELLTAPCIGISKKESANYRWNFVEDKTYPGNETRGKILKYLAKADIKESFLTSEKEEALWHILYSVEDKTEIRSALEHFATRNELPSTFVDVFCKFPPFEKEYGSYSAKAIKKLLPLMRMGEYWNPDNICAEVKLRINEFIKGNADEKLIKRISEKIQLTDISQCHGLPLWIACYLVYGRHSEAKETEKWSSPEDIDIYLKTFKQHSLRNPIVEQVILETLRTVRDIWKQVGQIDEIHIELGREMKNPAEKRARITRQVLENENTNLRIKALLSEFINPEFQIENVRPYSASQQEILRIYEEDILRCNEMPEDLEPIFKKLSETEANKRPSKSDVLRYKCWLEQKYRSPYTGEPIPLGKLFTPAYEIEHIIPQSRYFDDSLSNKVICEAEVNKLKDKMLGYEFIADKHGTIVSLGFGKQVRILEVEAYQTFVNEHYSSNPVKKAKLLMSDIPEQFIARQLNDSRYISKKIKSLLSNIVREENEMEETSKNVISCTGGITDRLKNDWGINDVWNKIILPRFIRLNEMKKCNLFTSTTENGHLIPSLPLEYQKGFSKKRIDHRHHAMDAIIIACASRNIVNYLNNESACAGASISRGDLKKLLCTDPKTRRESKYINKPWDTFTTDVYDILSNIIVSFKQNLRIINKTSNRYLHYEDGKKVRYTQNKGNLLSIRKPMHKETYYGEINLRLIKTVTLTKALECIDNIVNKDLRKKLRELLQMGHNEKTIKKYFKENKDTWSDVNLSKIEIYYFSKESSERFFASRKPLDESFTKDKIKDEIADTAIQKILLRHLENKDGDPSIAFSSDGIDEMNANIMSLNDGVFHQPIYKVRIYEKSSKYAVGLKGNKTTKFVEAAQGTNLFYVVYEKTETTESGNTVIERTYTTLPLNECIDRKKKGLPIASPNEFGEMPKFILSPNDLVYVPTSEEIKNRQIKHPINRDRIYKLVSINKKQSFFIQANVASCIINKFEYTTSNKMERAVTDEIIKEICLPIKTDRLGNIVNDITF

SEQ ID NO: 5659 - protein, 1525 aa, synthetic construct
  REGION 1..1525: note = Synthetic
MSTKHILGLDLGTNSIGWAVVKSNDTETQQYVLSGIVDAGSRIIPMDAAMQSDFAKGNTISQTKDRTQYRGTRRLRERYLLRRERLHRVLLQMGFLPLHYANSLTRYGKFKDGAECKLPWEKIEGGEIQRFLFKRSYDEMLQMFWTAQPELMAKGMKVPYDWTLYYLRQKALHEPITGYELAWILLNFNQKRGYYQTRGEENDVDNTKDEKYHALKVVSVVDSGEKKGKGIWYNVFLENGMVYHRLASEAPDWVGKVKDFIVTTNLNEDGTPKTDKDGHIKRLISMPKETDWGLIKIKTENDIRTSGLSVGEYIFNALLHNPKQKIKGQLVRTIERNFYKEELRQILNKQKEFIPQLCDANLYADCINELYSQNEAFRHSIATKDFTYLLLDNIIFYQRPLKSKKSTIAECPYEYHECLDTNGVRVKKYVKCISKSQPLYQEFRLWQFVGNLCIYKSGYDQEGRLVDSIDVTSDFLPDEESRAQLFDWLNDRPSIKADEMFKRYFGIGKLGSKTVGMSYSWNYVRDKAYPCNETRGGILVSLSKAGVDTSFLNDKVLEHQLWHILYSVSDRTELRTALGRFANKHALGSAFVEVMTKYPPFEADYGAYSAKAIKRLLPLMRMGHHWCANNIDSGTKERIQKIIDGEVDETISKRTREKALILDSIDHFRALPLWLACYVVYNRHSESGDIRKWHSPNDIDDYLAHFKQHSLRNPVVEQVVTETLRVVRDVWRAQGHIDEIHVELGRDMKASADKRAQMTERALRNEMANLRVKALLAELKNPEFGIQNVRPYSPSQQELLRIYEDTALNSVGEPDDYIREILKKFSDAKNAPTTSDIKRYILWLEQHYISPYTGQHIPLSRLFTTDYEIEHVIPQSRYFDDSMTNKVICEAEVNKLKSNALGYEFIKQHHGQRVVLNGGRIVSVLEPDSYCELVQKMYGKNNRAKLRKLLLDELPAEFIERQMNDSRYISKLVKTLLSNIVRDEDEQEATSKHVIVCTGAVTDRLKREWGVNDVWNRLILPRFQRMNSLTNSSKFTAISATGHLIPAMPLELQKGFNKKRIDHRHHAMDAIIIACATRNHVNLLSNEAALPKNQSTRHQLSHKLRRYETIVVNRDGKLQQLSVAREFLLPWATFPADVEHVLSQIIVSFKQNLRVVNKTSNHALRIVNGRKQLVPQTSGDCWAIRKSMHKETVFGEINLKRQKAFALKEALLRPQRIVNRDLRAKIIELLSKHYTEKQIKVYFANNADAWQDVNIKKVEMYYFTSETADRYFATRKSIDTTFDRKCIKEKVADTAIQKIMLRHLERYADNPKLAFSPDGIDEMNRHIVVLNNGKHHQPIYKVRVYEKADKFAVGQTGNKRFKFVEAAKGTNLFFAIYENEVINKQTGHLVRKRTYRTIPLNEAIGKLKQRLPLDSQAAFILSPNDLVYVPTEEERITGKVNKPLDKSRVYKLVSISGSVADFVPCSAASIIFSVSKIESANYSGVQNEFGLGSPKSKNERATTNEMIKEVCIPIKVDRLGHIVEN

SEQ ID NO: 5660 - protein, 1545 aa, synthetic construct
  REGION 1..1545: note = Synthetic
MKTILGLDLGSNSIGWALIQLDSEQREGKILGMNSRIIPLDAAKLGDFEKGNPVSATAITRSFRSTRRLYERDTLRRERLHRVLNILGFLPEHYTEEIDFEYKLGQFKKDKEPKLPYKKISPYKYDFIFKDSFEEMVADFKVNQPQLFYIKSNGKETKIPYDWTIYYLRKKALNQKISKEELAWILLNFNQKRGYYQLRGEDIEVDDNKDTSFEVLKVEKVVDSGDKIKKTGQPLYDIYFQNGWKYDKQITRPDDWTVKTKEYIVTTSKLASGEIKRTYKSVDSEKDWIAIKQKAEQDIATSGKMVGEYIYDTLLQKPYQKIRGKLIRTIERKFYKKELERILETQIEFHPELRDCNLYTSCIEGLYPNNEPHRNNIANRDFLYLFVDDIIFYQRPLKSKKYLIDECPLEFREYTAEDGTIKKKGIKCITKSNPLFQEFRLLQWIKNLRIYRKDERQEVDVTEELLPTIADRELLFEWLNEKPNIDQKAFLKYKPFELEEKIKKMLGNEGYSIFKKDKERGLHTYYRWNYVEDKSYQLNETRGGILSYLKKAEIDPDFLDSETEMHLWHILYSVEDSEEITKALIKFANKHSLPESFIESFKKYPRIKKEYGSYSVKAIKKLLPLMRFGKWWNWDTIDSDTRTRIDKLLTGEYDEKIRYRVREKAINLQKEEDFQDLPLWLTSYIIYDRHSESSTLNYWKEANDITLLKQHSLRNPIVEMVVNETLQTVKDIWKYYGEGKENFFDEIHVELGREMKNPKEQREKISKRIAENEKTNIRMKSLLVELFNDGETENVRPYSPIQQEMLKIYEEGIYLNPDSVYSTVSEAEIDSIRKKNTPTPSDLKRYKLWLEQGYKSPYTGEIIPLSKLFTPAYEIEHIIPQTRFFDDSFSNKVICEAEVNSLKGNQLAYEFITNNKELKIELNYGKSVTLLHPEVYERNVKRYFGNNKTKMNKLLLEEIPDKFIERQMNDTRYISKTITSLLSNIVREESEQESISKNVIPTSGKVTSSLKRDWGLNDVWNELITPRFVRLNHMAGFEKYGSWENKEGKRVFQINTMEPELYQLEKKRIDHRHHALDALVVACSTRDHINYLNNINANGKDKDKPLRYDLREKLRRTEEIEVKKAVNGEVVRKKMRVAKEFYKPWNTFTKEAKEHLNKMVVSFKKNNRVINKTVNHYQKWVEQSDGTMKKMFVKQVKGDHWAIRKPLHKETISALVNLQDKKQVSLRAALSNVDNITNRSLRKKVRELADMGYNTNKIISFFNNLNFEWQGENIEKVDIFFYTNDQESTKVAASRVDLDDSFTENIIEKITDSGIRKILLAHIESYKYIVDEQGKPVSAEKLAFSPEGIEKLNCNIVELNGGKKHTPIYKVRTFEKFGNKFNVGNEGNNKFKYVEAAKGTNLFFAIYEDDKRVRSYETIPLNIVIERQKQGLPSCPENNEQGNRLLFSLSPNDLVYVPTPEEQDNPKTVDFSDLSKEQVKRVYKFVSCTGNRAYFINSTVATTIVNKYEFSALNKIEKCDDDVQIKSTCWKLEIDRLGNIKRVTT

SEQ ID NO: 5661 - protein, 1497 aa, synthetic construct
  REGION 1..1497: note = Synthetic
MAKIIGLDLGSNSIGWAVVDNEKNKIEAAGSRIIPMDAGRLGDFEKGNSVSFTADRTKYRGMRRLHERFLLRRERLLRVLNILGFLPEHYASQISRYGKFPRNEEPKLAWHEGKDGKMEFLFKTSFDEMVADFRMAGFDKKIPYDWTIYYLRQKALTYPISKEELAWLLLQFNQKRGYYQLRGKVDEGMGDAEEKGEEKSYQELKVLKVENTGEPDKKGGTWFNITLENGWVYRRAFRIAPDWEGKTRGFIATFRLDKNGQHRTDTPSISSPSEEDWGLHKIKTEHDIQQSGTTIGAYIYQSLRNNPDRKIIGDLVQTVDRNLYKEELHRILDTQQRYIPELNNKELYTYCIEELYPANEAYRNSIANKDFNYLLTDDILFYQRPLKTKKQLIADCPFEQRNGRPVKCIAKSHPLYQEFRLWQFVTNLRILKEGIDITTTLLPDNNSYVSLYDYLSSIKEVDQASILHYFKIGKKESSQYRWNYVQERKYPVGETHSILLGGLSKAGIDKDFLTPEKELHLWHIMYSIDDQCQYEKALHTFANHQRWDENKCSLFVKAFKRLTVYKDKDYGAYSAKAISRLLPLMRQGKYWNVNAIDEQTRSRIEHIITGEEDSTLTASVREKFKYLENINQCQRLNTWQACYLVYNRHSEAIDAQKWNKPEDIDTYLSHFRHNSLNNPVVEQVVTESLRVVRDIWKQVGTIDEIHIELGRDLKKTKAERERLTKAISEGEATNQRIRLLLTELMNPECQVENVRPNSPSQQEILKIYEDGVFHQGLEIPDDIKDIQKRFTAAKNQPSRAEVMRYKLWLDQKYISPYTGKAIPLAKLFTPAYQIEHIIPQSRWFDDSMSNKVICEAEVNQLKDRELGHEFISTHAGESVTLSMGETVEILTISQYEALTKKLFADNPGKMRRLLMDEIPDDFTQRQMVDSRYISRLMMHLLSNIVRAKDEMEQLEESTTSKNVIPCNGTTTDRLKHDWGINDVWNRIILPRFERLNKITQTSNFTAITAEGHTIPHVPLDMRQGFNKKRIDHRHHAMDAIVIACTTRSHINLLNNKSAESNERYDLQHKLRTKDYYLDKKGNRQLHFGDFIKPWPTFTEDVYHTLENIIVSFKQNLRIINKTSNHYSVLRNGKHVIQSQEKGDSWAIRKPLHKETVFGEVNLQLKKKVRTKEAIANPGNIVDSELKEKVKYFKSLHHSDRQIIEYFDKHKDIWSEAADGKIEVYYYTKDTNDRYFATRYNNELTNYLGKCSNGNEALKRIEKITDTGIQKILISHLFNENKDPQKAFSPEGIDRMNANIIQLNEGKKHQPIKKVRVYTKGDKFNLTDTGLKSYKYYNGDDGKNLHYIIYTTEDSPKRNFLVVELQVSVECQKKYGKHWQKHLEYFLKNYGKEREHHCGLLPENAIIKQILSAGDIIYMPPTQEQSIPDHINPSNLYRVRSFDDGHFYCIPINVANIVLEGKEFGSPNKTQKDYNDKMIRDFCIPIQVDRLGNIIQIG

SEQ ID NO: 5662 - protein, 1491 aa, synthetic construct
  REGION 1..1491: note = Synthetic
MKKIIGLDIGTNSIGWATIYGETNEEGKLILKEIANAGSRIIPMDAGILGNFDKGNSVSQTKERTEYRCARHLRERYILRRERLHRILTLMGFLPKHFAECLTRYGKFTDSSEPKLAWRKDDNGKMQFLFKQSFNEMLKELYEHNPQLTEEDKKIPYDWTLYYLRKKALTAPIQKEELAWILLNFNQKRGYYQLRGEDEEDTQNKIEEYQSLKIIRVEATGEKKGDDTWHNVYLENGMVYRRTSKTFLDWEGKTKDFIITTLLDDKGQPKVDKDGQIRRSLRQPKEEDWGLLKKKTEASIDKSAKTVGCYIYDNLLSDPTQKIKGRLVRTIERKYYKSELKAILEKQKLFIPELNAKELYDRCVEELYPNNDAHRNNIIHRDFTYLLAEDILFYQRPLKSKKSLIADCQYETRAYKNPETGETKHIGIKCVSKSHPRFQEFRLWQFISNLRIYERTKNVNGKIMIDMDVTDYFLKDETDHERLFEFLNSRKSIKQDTLLSSFFKLKKQNGKHLYRWNYVEDREYPCNETRELILSRLKKAGISASFLATETEEALWHILYSVSDKQELRTALATFARKNTLDETTFTEHFIKTPPFKKDYGAYSLKAINKLLPLIRMGKYWSEGSIDTKTRERINRIIDGEVDEHIKNTVREKAIDLNDISHFKGLPLWLACYVVYNRHSEASDSKRWERPEDIDDYLHHFHQHSLNNPIVEQVVMETLRTVRDIWKTEGHIDEIHIELGREMKSPAAKRAQMAKNMTENENTNIRIKQLLREFACPDMKIDNVHPYSPSQQELLRIYEEGVLSSTKELEPGITELIGKLNDKSKQPSHSDVLRYKLWLDQKYHSPYTGLAIPLARLFTPDYEIEHVIPQSRYFDNSFTNKVICESEVNKLKDNQLGYEFIVRHHGEKVSLSRGRTATILEPKEYEQLVKKIYSTNPQKLKKLMMDDIPDGFINRQLNDSRYISKLVKGLMSKIVREEGEDEATSKNVIVCTGSVTNRLKKDWGVNDVWNRIVLPRFERLNQMCGQQLYTTVNTSGHVIPDMPIEQQRGFSKKRIDHRHHAMDAIVIACATKSIVNYLNNESAKHDAKTTRYDLQRALCHKQHTDANSNYRWTVNMPWDTFPADVNTALSQIIVSFKQNLRIINKTTNKIHKLENNKRVVEQQTKGDNWAIRKPLHKETVHGEVNLRLHKEVKLKEAITRPDDIIDRDLKKKIKAMLELGYNLKKIKACFEDNAEVWSDINLNKIPIYYFTSETADRYFATRKPIDQSFSRKKIINEITDTGIQKIMLRHLENNGEDPDVAFSPEGIEDMNRNIRTLNNGKWHQPILKVRVYEKGNKFAVGKSGNKAKKFVEAAKGTNLFFAVYVDENGKRSYSSIPLNVIINRMKAGMPVADEDGIIPTFVLSPGDLVYLPKEGETLSVETIDKSRIYKMVSCNDNRCCFIGNTIANPIIDKYEFNSHNKIEIALTGENIKEKCIPIKVDRLGQIVKLGY

SEQ ID NO: 5663 - protein, 1225 aa, synthetic construct
  REGION 1..1225: note = Synthetic
MEKKQKDKMYFKIKLKTEADIDQAHKTVGTYIYDTLLGNPSQKIRGRLVRTIERKYYKEELKLILDKQKEFHPELQDRALYAACVEELYTINEAHRNNIGNRDFTYLFLEDILFYQRPLKSKKSLIDNCPYEENQGLDKETGEIKSFPVKCIAKSHPLFQEFRLWQFIINLRIYRKDLAQDVDVTNELLKTEEDYVALFDWLNGKKEIDQKAFLKYPVFGLKKEIENYRWNYVQDKPYPCNETRSLMLARLEKCDISIEFLTKENEEALWHILYSVEDKNEIVKALQKFADKHDLNASFVDVFQKFPPFKNEYGSYSAKAIKKLLPLMRMGKYWSENSIDKGTRERIDKIITGEYDEKIENRVREKAIHLADVSDFKGLPLWLVCYIVYGRHSEAKEITQWKSPADIDSYLKSFKQHSLRNPIVEQIIIETLRVVRDIWKQVGNIDEIHVELGREMKNPADKRKKMTQQMSENENTNLRIKYLLTEFLNPEYEVENVRPYSPSQQDILRIYEEGVLNSVSDLPEEISDILKKFTETDLKKGPSRSEILRYKLWLEQKYRSPYTGEVIPLGKLFTPAYEIEHVIPQSCYFDDSFSNKVICEAEVNKLKSNLLGHEFIVKHHGEIVELPFGKKVRIFTVDEYEQFVKDNYSRTRSKMKKLLMDDIPEEFVTRQLNDSRYISKVVKSLLSNIVREKGEEEAISKNVIPCTGGVTDRLKKDWGINEVWNKIILPRFQRLNELTGTNKFTTKNVGIQEIPTMPLELQKGFNKKRIDHRHHAMDAIIIACANRNIINYLNNESATAKAELSRYDLQKMLCDKAKTDNNGNYKWVIRKPWASFTQDTYLALENIIVSFKQNLRVINKATNRFLHYNEEGKKIFVKQGKGDNWAIRKSMHKDTVFGEVNLRRIKTVALNEAMKNPQSIVVKDFKRKLLELWNLGFDAKRIKKYFEDNRETWSDINLSKIEVYYFSKDTKDRFFATRKPLDTSFDRKKIENNITDTGIQKILLRHLELKDNNPDIAFSPDGIDEMNRNIIQLNNGKYHQPIIKIRWYEQADKFAVGQTGNKFSKFVEAAKGTNLFFAVYESNILDKKTNTIIKKRNYATIPLNVAIERQKQGLPVAPEDENGNDPIFVLSPNDLVYLPTDDELANGIIAQPLDRGRIYKMVSCTGNEGHFIPARIANPILQTIELGSNNKAQKAWTDEMIKEICMPIKVDRLGNVLESSSSYKK

SEQ ID NO: 5664 - protein, 1453 aa, synthetic construct
  REGION 1..1453: note = Synthetic
MKKILGLDLGTNSIGWALIDQNFESKEGQILGMGSRIIPMSQDVLGDFGKGNSISQTSERTGYRGVRRLRERHLLRRERLHRVLHILGFLPKHYEDSIDFTKRFGKFKAETEPKLSFDKEFLFKDSFLEMMKDFKLNQPDFLIDKNDDACLVPYDWTIYYLRKKALTEKIHKEELAWLILNFNQKRGYYQLRGEEEDENPNKKIEFHSLKVVEVVADAEVNKKGETWYSVHLENDWIYRRSSKISLDDWKDKTRDFIVTTDINEDGSDKLDKEGQVKRSFRAPSADDWTLLKKKTEQDITQTKKTVGSYIYDNLLLNPKQKIKGKLVRTIERKFYKEELELILRKQQEYHTELQSKQLLHDCVRELYKNNEQHQQSLEAKDFVHLFLNDIIFYQRPLKSQKSSISNCTLESRQSKDGVVFPIKVISKSNPYYQEFRLLQWLQNLEIYTTDDDTRVTTNFITSLEDKEALLNFLNSKKEVEQKHVIEFLIKHKNGGKKLAKGEIEKYRWNYVQDKKYPMNETRYLIQSKLYKVADIPIDFLTTESEFSLWHIIYSVNDKIEYEKALKSFANKHNLDVESFVESFKKFPPFKSDYGNFSEKAIKKLLPLMRFGKNWNYETILTTSKERIDKIITGEYDEAIKNRIREKAAQFNLNKEENFQNLPLWLSQYIVYGRHSEAAVVGKWNSISDLENYLKEFKQHSLRNPIVEQVVTETLRVVKDIWQQYGNGAKDFFDEIHIELGREMKNTADERKRLSSIVTDNENTNLRIKALLVELALDNSVENVRPYSPVQQDILKIYEEGVLNSVSEIEDDILKISKSAQPSSSDLKRYKLWLEQKYQSPYTGQIIPLNKLFTYEYEIEHIIPQSRYFDDSMSNKVICEASVNQLKGNQIGLAFIKNHHGEKVNLGNGKVVQIFEVEAYENFVKRVYDKNRGKRNKLLAEDIPEKMIERQLNDTRYISKYISQLLSNIVRDDKPDSKDDGLNSINIVPGNGKITTRLKQDWGLNDVWNGLILPRFERMNQLTNSTDFTSVNTHGKLIPTVPIDLSKGFNKKRIDHRHHALDALVIACATKDHINLLNNESALPKKGRSKEDKKSYRFDLQNKLRNKESYIDPQTGKSKEKFADFKKPWNTLTEDSRSALKKIVVSFKQNTRVINKATNYYESYKDENGNLRLSKDGKPKKDFVEQKGTNWAVRKALHKETVSGQVRLDRVKVAKGKILTATRKSLDSSFNEKTISSITDTGIQKILLNFLKAKGNNSEVAFSPEGIEEMNKDIKLYNEGKNHQPILKVRVFEQGSKFALGETGNKTQKFVEAAKGTNLFFGIYQDKTGKRSYDTIPLNLVIERQKQGLSPVPETNEKGHALLFYLSPNDLVSIPNENNEIESENVYKMVSSTGSECHFIKANISTLIKNYDAKSKIGELGSLNKLEVTIDSKYRIKEVCVKLKLDRLGNITKV

SEQ ID NO: 5665 - protein, 1451 aa, synthetic construct
  REGION 1..1451: note = Synthetic
MKRILGLDLGTNSIGWSLIEQDFDKKEGRILGMGTRVIPMSQDILGKFDSGNSISQTAERTGYRGMRRLNERYLLRRQRIHRVLNVLGFLPHHYAEAIDFHNKLGQFLPGKEIKLNYRLNGGPKHHFIFQDSFEEMAREFKSKHPGLKIPYDWTIYYLRQKALRKKISKEELAWVILNFNQKRGYYQLRGEEEEADKNQEYVLLKVKELIDTGEAVKGKPLYKVVFENGWEYDRDITKTEDWENQEREFIVTTKTNKDGGVIRTFKKVDSEQDWIAIKKKTEQNIEESNKTVGQFIYETLLDRPSQKIRGSLIKTIDRKYYKNELIKILEAQKDFHAELQSEDLYQECLNELYPRNESHQANIKDKDFTYLFVEDIIFYQRPLKTKKSTISNCAYEKRYFKKDGEIQEKPLKGIPKSNPLYQEFRLWQFIQNLKIYKKIANGKEKAKIDEDVTRSLLPDSDSVVRLFNFLNNRKEIDQTQLLKYFSDLKLISKQKKDASDYRWNYVEDKKYPCNSTRSDFLSRLKKVKGIPEDFLCKKVEKELWHIVYSVKDKKDFEKALETFSKKRNLPEEDFVENFKKIQPYPNDYGAYSEKAIKKLLPVMRMGNYWKENSVTPEVKQRVDDILERLETIHFEKDKIETVADDAYKKQVLKSFIRFEDKANPYEGLNTYQACYAVYERHSEVTEIINWKSPKDIDQYLNETFKQHLLRNPIVEQVVTETLRVVRDIWKHYGNSQKDFFSEIHLELGREMKNSADKRQRLSKQNTERENTNQRIKALLEELQNEGLEAVKPYSPNQQEILKLYEEGVYLNARYDMVSEDEIEAIRKKNAPSKKDILRYKLWLEQGYRSPYTGEIIPMSKLFTTDYQIEHIIPQSRFFDDSFNNKVICESAINPYPYKDNQTAYEFIKNSRGCVVPELTKNGKECTIFSVEEYENHCKSYFRKNRTKLKYLLSEDIPEGFINRQLNDSRYISKFIKGLLSNILRESDEREATVKNLVPVSGAITSDLKQDWGLNDKWNELVAPRFKRMNEITNSRDYGYWDNKINAFRTQVPKDIEAGFSKKRIDHRHHALDALVIACTTKDHINYITSINTERKNHRLVKKLRETKKITLGGKERIVAKSFKKPWEGFTIDAKNALEDIVISFKKNIRVINRTNNKTWQWEKKNGQWKKVLQPQKGKNFAIRKSLHKETVSGLIDIPTPKGKVATATRANISNIKNHKHIDKITDKSIQKILRNHVKNYFDEKGKEDFEAAFSPKGITDLNRNIKSLNNGKKHQPIYKVRQYEVGSKFSVGEQGNKTDKYVEAAKGTNLYFAVYWDEKKNKRNFETIPLNEVVEHQKQMAHIPMKQKQPIPIDRTKGKFLFYLSPNDLVYAPSQEDIASDIISENLNKEYIYKIVSFTNKRLYGVPVTVAKSIANKTEFTQLNKIEFIQEKNLCWKLKVDRLGNIQEVIK

SEQ ID NO: 5666 - protein, 1523 aa, synthetic construct
  REGION 1..1523: note = Synthetic
MRKILGLDLGTNSIGWAVVNEAENENGEPKLVGIECAGSRIIPMDGSIIGDFEKGNSISQTATRTQYRSIRRVITRHVLRRERLHRVLKVMGFLPEHYAGMLDKYGKFIDNSEPKLAWNENKFLFMSSYKEMRERFRTTSDNPLMNVPYDWTIYYLREKALTEPLTKEELAWVIMQFNQKRGYYHLRSIKDKEGKIDKKEEFIPLKVIKVEKDETNTSKGQWYNIHLENGMVYRRKSEEPLDWEGKIKEFIISFDIDENGNQKTDKDGKPKYSMRSPKEDDWGLIKIKTDTDIEKSGTTVGSYIFNALLNNPSQKIIGQLIRVIDRKFYAEELKQILDKQKEFISELNDRELFNKCIQELYPLNDAHRNELSNKDFTYLFVNDIVFYQRPLKSKKSLIANCQYESRIYKKLDNDGEYIKDENGQDKLFTAPLKCIAKSNPYFQEFRLWQFISNLRIYQKEYRDKQGKLIIDKDVTDTFLKTEDDKAALFDWLNTLQDIDQTKFLKYPSFNLKKQQLEQYRWNYVEDKKYPCNETRYIITNGLKKAGISTSLSQEQEFALWHILYSISDSKELTSALTKFAQKHSLDNIFVEVFSKVKPFNKDYGSYSEKAIKKLLSLMRLGKYWSREAIDNGTLQRIDKLLSGEFDESINDRTREMVQNFNNVEDFRGLPVWLACYVVYDRHSEANNVTKWEKPEDIDSYLKTFKQHSLRNPIVEQVITETLRTVRDIWKQVGQIDEIHLELGRELKNPADKRKSISERNKKNEETNSRIEELLKELFDCGVQDVRPHSPSQKDILKIYEGYALSNDKEDNGRQLISKGEISKYKAWLEQKYQSPYTGETIPLSELFTSKYEIEHIIPQSRYFDDSFSNKVICEAEVNKLKDNMLGYEFIKKHGGEEVQLCGGKRVKIFTVGEYEQFVSDHYHDSKKKKLLLEDIPDEFIKRQLNDSRYISKVVKGLLSNIVREKNEKGEYEQEAVSKNLISCTGEITTRLKEDWGLKDVWDRIILPRFERLNTLTHSNNFTTEDTSGHTKPIAPPKVKKKRIDHRHHAMDAIVIACASRSHVNLLNNEAACSDNKATRYQLSYKLRKREKYLKDGKEREAFKEFYKPWDTFTEDVFQKLQNIIVSFKQNLRVITPTQNVFEHYNDQGKKELIHQEKGDHLAIRKPLHKETVFGEVNLRKKKTCTLDNALKAPQNIVDKELKKKILELSAQGMNAKQIKAYFSDNSDIWQDEIKGGKVEIYYFTKDTKERYFATRKALDISFKKEEIKNITDTGIQKILITHLNSEKYDGKPENAFSPDGIDELNQNIQALNGGKPHQPIYKVRKYEKADKFSVGTTGNKPKKFVEAAKNTNLYFAVFEKQKNDKTTVRCYATIPLNIVIDCQKKHKSKWKEEATNILKQRGDIDKEAQLLFIISPNDLVYLPTQEELISKHYSFDKERIYKFVSCSGNMADFVPAYVANIIFSMTKKQQKEAFNNEEHFHIQDEYGVGSPKSKNERAITGEMIKEICIPIKVDRLGNIIGEY

SEQ ID NO: 5667 - protein, 1509 aa, synthetic construct
  REGION 1..1509: note = Synthetic
MKNILGLDLGTNSIGWAVISTSEDTNISPKIKSAGSRIIPMDAATLSDFDKGNTKSQTAERTAFRGVRRIRERHLLRRERLLRVLHQLHFLPSHFEADINFIDHSGQIKTNKEPKLAWNKNTAGQYEFFFKQSFEEMVADFVKHQSYITLENKGIPYDWTIYYLRKKALSEKISNEELAWILLNFNQKRGYYQLRGEDEEDKTNKLVEFYALKAIKVEPTDEKKGNEVWYNIYLENDWIYRRTSKTPLNLAGKTLELIVTTDLNDDGTPKLNKDGEIKRSFRIPKEDDWTLRKKKTESEIEKSGKTVGCFIYDELLNNPKQKIRGEFIRTIERKFYKSELKQILRKQTEFHPELRDKNIYYNCINELYPHNEAYRQNIQNRDFVYLFVDDIIFYQRPLKSKKSSIADCPYEEYQYVDKETGEIIHVPLKCIAKSSPLYQEFRLWQFLYNIHIYQKERIFDGKSQTDVDVTNEFLKTESDYVALFEWLNDLGAVDQKTFLKYPPFGLKKQLNNYRWNYVEDKFYPCNETRYGILVKWKKAGIETALFNTEIEKSLWHILYSVNDKIELEKALQKFGDKYQLGDSFVQVFKKYPPFVKDYGAYSTKAIKKLLSLMRMGKYWKENEIDETTKKNVINILNRGIDESMPMKANDKAIHLVNISDFKGLPLWQACYIVYKRFSEIKDITKWKSPEDLDCYIKSFRQHSLRNPIVEQIILESLRVVRDVWMREGHIDEIHIELGREMKNSADKRKRMSEQISANENTNLRIKALMSEFINSEYGIENIRPYSPSQQELFRIYEEGALNTASSVPEEILDIIKKFEGPKQPTKSEFMRYKLWLEQKYRSPYTGEIIPLSKLFTPAYEIEHVIPQSRYFDDSLSNKVICESEVNKKKGNLLGYEFIKAHYGEIIPIGFGKSVKILSVDDYEIFVKENYARNNIKAQKLMMEEIPEKFILRQLNDTRYISKVVKTLLSNIVREKRADGNYEPEAISKNVIVCTGGITDRLKTDWGIKDVWNEIVYPRFERMNSITNSSCYGHWENKEGKRYFQTEMPLEYQKGFNKKRIDHRHHAMDALVIACASRNIVNYLNNESASANAKIGRHYLQRLLCEKKKNDENGNYKWIIRKPWDTYTQDVSNTLTNIIVSFKQNLRVINKTNNNYSHYNIEGKKVICRQTKGDNWAIRKPLHKATVFGRVNLRFIKEVRLSVAISNPNSIVDKKLKNKIKELYKAQYTTKQIEAYFKSNISQWENLNPVKVKIYYYTDDTTQPVVAVRKSLDSSFTSKVISESITDTGIQKILLKHLQQKNNDPAFAFSPESIDEMNVNIEKLNDGKKHQPIRKVRVYEVLGNKFAIGEKGNKTNKFVEAEKGTNLFFAIYQNEIGKRSYETIPLNVVIEREKQGALPVPEQNDNGDKLLFWLSPNDLVYLPTPEELETAIDYSIKRKERIFKIISFTDKRLYGIPYNVASSIVDKLEYSLLNKIELTDSKESIRAICVPLKVNRLGEIIEINNRKVNI

SEQ ID NO: 5668 - protein, 1505 aa, synthetic construct
  REGION 1..1505: note = Synthetic
MNKKILGLDLGTNSIGWALVKQDLENKYGEIIGCGSRIIPMSQDVLGKFDAGISISQTAERTNYRSVRKLIQRNTLRRERLHRVLHQLDFLPKHYNDSIDFEKKLGQFKTDKETKLNYFVNQHGKHEFLFKDSFNEMVKEFKEEQPELFYIKNNGKETKIPYDWTIYYLRKKALSKKISKEELSWLVLNFNQKRGYYQLRGEIDEEKEKNKRYEKLYVSEVVKTNNTIKKTGEYLYDIYFDNGWKYEKQTTKPQDWLHKHKEFIITTTTLKNGETKRTFKTVDSEKDWIAIKSKTEQDIKESNKTVGAFIYDTLLKNPTQKIRGSLVKTIERKFYREEFEKILKEQIKHRPEINVNTAIGKENYTKCVTELYPRNEAHANNILTNDFNYLFTKDILFYQRPLKSKKSEIANCQYEYRTYIKKKEKTGKEERVKQPLKATPKSHPLFQEFRLWQFIHNLKIYIRETTVGNKPLFDVDITDTFFTSENDWATLFEYLNNKKEIEQKHVLEYLVSKKIISKSEKTDYRWNYVEDKKYPGNETRVDFINRLKKVENLNVDEFLTSELEFKLWHIIYSVTDKNEYEKALENFAIRQNIDKDSFVNSFKKFPPFKSDYGAYSTKAIKKLLPLMRLGKFWDGSEIPKVVVEKITDIKTRLTSVNYDESLFKKDEKKILETIVDDITPKQLLKSFVKLKGKNHLAGLNTYQACYLVYERHSESSDITQWENPDDIDSFLNHFKQHSLRNPIVEQVVTETLRTVRDIWKYYGNGSPNYFNEIHIELGREMKNPADKRKQMSAKINENENTNQRIKGILQELMNDGVQDIKPYSPSQQEILKIYEEGISQNPNVDYSKVSEDEITKIKKSNNPTLKEIQRYKLWLEQKYISPYTGKPIPLSELFTPAYQIEHIIPQSRYFDNSLSNKIICESEVNEDKSNKTAYEYLKTNGGSIVHGHHLLSLKEYEDHCQHYFKKNRTKLKNLLSEEIPEGFINRQLNDSRYISKLIKGLLSNIVREENEQEATSKNIVPVTGSITSKLKQDWGLNDKWNEIIAPRFKRLNKMTNSNDFGYFDEKINTFRIQVPDAISRGFNKKRIDHRHHTLDALVIACCTKKHIQYLNSLNNEIIKHELKPSILIKNAQGDYTKHFMLPWNNFPIDCKNAIENTIVSFKQNLRVINKTSNKYQSYKDENGNLRLGKDGKPKKGLTKQTKGNNWAVRKAMHEDTFYGEIVDGENKGKLKIKTLLDTSFDVKKIEDKVLDKSIRTILINYLKQDKYKNLSKPHEEAFSPNGIIEMNKNIISLNNNIPHKPIKRVTLKHEKGKKFSIKTLLDKKTKFAKSATGTNVFFCIYKNINGKIKYHTPSFEEIIEIQKQEFEIKYKSKLNVPETLFDKKESFELLFYLQPNDLVYLPNDEELKNRQLIDFNNLNKKQIKRIYKFTDGSGTTANFIPYQVAKVIFNLNKKEQAKSSFKYPIQNEFGVGSPQSKNQKSIEGILIKERCIKLKIDRLGNISKA

SEQ ID NO: 5669 - protein, 1501 aa, synthetic construct
  REGION 1..1501: note = Synthetic
MKNILGLDIGTNSIGWSVICTETNENGKEVFKGIRIAGSRIIPMDAAVLGDFDKGNTKSQTSERTTKRLIRRLLERNKLRRERLHRVLAVLDFLPVHYAKQLDRYGKFLANTEPKLAWHLNEEGNYSFLFQTSFEEMLADFRRNKPDLLANSKKIPYDWTIYYLRKKALKEKIGKEELAWILLNFNQKRGYYQLRGEEQEEDNTKREEYFALKVIAVEDSGEKSKGNSWYNVKLENGWVYRRASKIPLDWVGKVKEFIVTTELEKDHTEKRDKNGNIKRSFRAPKEDDWGLLKAKTEADILESEKTVGAYIYDALLSNPDGKIRGKLVRTIERKYYKDELYQILRKQQEFYTELQDRDMYKACIEELYPNNEAHRMLIADRDFAYLFVEDILFYQRPLKSKKSLIANCTYESYTYIDKKTGENLNMPLKCIAKSHPLFQEFRLWQFINNLRIYQKEGIVNGKLTNDIDVTHKFLKKEEDYVALFEWLNDKKEIKQDLFLKFPLFKLKKSELNNFSWNYAEDRTYPCNETRAMILPRLEKVGISKLSLTREQEEALWHLLYSVSDKEELVKALRSFATKQGWAEDSFVESFRNIPPFKKDYGAYSAKAIKKLLPLMRMGKYWKWENLDIQTRDRINKILTGEYDENIKMRVRDKAIHLVEPASFRGLPVWLACYIVYNRFSEVKEIIKWKNPSDIDVFLQHFKQHSLRNPIVEQVILETLRTVRDIWKQIGHIDEIHVELGREMKNPADKRKKIAQQIQENENTNLRIKALLTEFMNPEFEIENVRPYSPNQQNLLRIYEEGVLNSVQELPDDIALILKKFNESDVKKRPSTSDILRYKLWLEQKYRSPYTGSIIPLSKLFTPAYEIEHVIPQSRYFDDSFSNKVICEAEVNSLKGNMLGYEFIKRRYGERVLLAGGKMVSIFTVADYERFVKDNYARNINKMKKLLMDEIPEQFIARQLNDSRYISKVIKFLLSNVVREEGEEEATSKNLIVCTGSITDRLKKDWGMNDVWNKLILLRFIRLNELTGTSHFTSLNSNGKLIPSMPLELQKGFNKKRIDHRHHAMDAIAIACASRNIVNYLNNESASKNAKLSRDDLQRLLCRKDENGNRLIKKPWDTFTQDVFVVLEGIIVSFKQNLRVINKTTNHYQHYEAGKKVISKQSKGDSWAIRKPMHKDTVFGEINLRRIKTVSLKEAIKNPRLVVEKDFKRKLISLLAQRYDEKQIRKYFDDNQDVWRDIDLKKIKVYYFTKETRDRFFAVRKPLDMSFDRKRIEESIADTGIQKILLRHLEQSQNNSELAFSPEGIEEMNRNIVALNDGKGHQPIYRVRVYEKADKFAIGQSGNKNAKFVEAAKGTNLFFAVYETMLEDKQTGQMVRKRSFATIPLNVVIERQKQGLSSASEDTNGNLPKFVLSPNDLVYVPTSEETKAGKLEFPLDNKRIYKMVSCTGSEGYFVPIYIANPIVQIVELGSNNKSQRAWSGEMIKEVCIPIKVDRLGNIISNI

SEQ ID NO: 5670 - protein, 1515 aa, synthetic construct
  REGION 1..1515: note = Synthetic
MKRILGLDLGTNSIGWALVESDEEQKSGKIQGIGSRIIPMDQNELDNFNKGNTVSQTAERTRLRMVRRLRERHLLRRERLHRVLKEIGFLPEHYLEQIDFTEKPGGFLPGKEPKIAYKPDNFKDKYDFLFQDSYHEMLSDFQDKNPEFIQKRKKVPQDWTIYYLRKKALTAKITKEELAWIILNFNQKRGYYQLRGEDEDVAKNTKKEEFHALKVVKVKEREDSEGASGKWYDIELENGWVYPRQSNIRPDWEGKILELIVTYNLDKDGNIKTDKEGNEKRSFRMPNKDDWTLRKKRTENEIEKSGKTVGEYIYDNLLDAPDLKIRGKLVSTIERKYYRSELEQILTAQKKYHPELSNSELFNKCISNLYPNNDIHRKALLSKDFVHLIINDIIFYQRPLKSKRSTVSNCPLEYRVYVDKVTGEKKKVPLKCIPKSHPLYQEFRLWQYVKNLRLFEKERFENGRLLTNVDVTEQFLPDEDKYVELFEFLNGRKTFKQDDILKFAGIKSAKDRVKYYWNYPQEKEYPGNETRYLIESRLKKIENVPDEWLNYEKIEELWHLLYSVTDKVEIEKGLQSFAAKYQLPDLFVEVFKGFPRMEREYGAFSKKAIKKLLPLMRMGKYWKLENINPDLIEKVQKIIDGEADDNINDGIRERFSEINEMSDLRGMPLWKASYLVYGRHSEAAEVIRWRTSADLDQYIKDFKQHALRNPIVEQVVLEALRVVKDVWNYFGEGREKFFDEIHVEIGRDLKNPADKRQKIANQIQENENTNLRIKALLVELFNDPEVQNVRPYSPVQQQLLKIYEDGVLNAERDIPDDIQKISRMANPTRNQLIRYKLWLEQKYRSPYTGEIIPLNKLFTSEYEVEHIIPRARYFDDSFSNKIISEAEVNRKKDRMLAFEFIKKLGGSTIDLNYGKKVSVLTVEEYQQFVKDHYGINPHSRLKMQKLLMDEIPESFIERQLNDSRYISKMVRNLLSNIVREENENSPVAKQLITCSGSITNTLKQEWGLNDVWNTIITPRFERLNKMGEQKYGEWVNKEGKPVFQIQMPLELQKGFNKKRIDHRHHALDALIVASATRSHVNYLSNEAAKTNAKDTRFDLRNRLCYKEKRGQNRNFTWRFYKPWNTFTEDAKNALNDIVVSFKSNHRVINKSTNRYFKWENLPGGMKKKRLVRQEKGDNWAIRQSLHKDTVLGKVSLRKVKPVSLSVALDSWNNIVDKALKKKIRSLKDQGYDKKLMLKYFKDRRNEYNGENISRVNVYYFDEEMAARRVDLDTSFNSEKRIEGITDSGIKKIIYAHLKNEKYHGQKDDKGKDISPYELAFSPEGIAEMNANIKQLNGGKPHCPIYKVRLAEPVGEKFQLGETGNKTEKLVEVAKGTNLFFGVYANDEGVRSFATVPFYLAVEREKQGLPAVPQENENGDQLLFWLSPNDLVYVPSEEDAHFANPKQIELDNSRIYKMVSSTGTQCFFIPHFVATPIVQTIELGPNNKSERAWDGQMIKKVCYKLSVDRLGNVEIE

SEQ ID NO: 5671 - protein, 1462 aa, synthetic construct
  REGION 1..1462: note = Synthetic
MVSKKIIMMIKNILGLDLGTNSIGWALIKQDFENKHGEILGMGSRIIPMSQDILGEFGKGNSVSQTAARTDYRGVRRLRERFLLRRERLHRVLNVLNFLPEHYASQIDFVKRFGKFKVETEPKLAWKNIEGKFSFLFQTSFNEMLEDFKANEQDLKVPYDWTIYYLRKKALSQKIGKEELAWILLNFNQKRGYYQLRGEDIEEEKDKVFVTLKVDKVVDSGESVKGKTLYDVYFENGWKYEKQIVKTEDWIGRTKEFIVTESILKNGDIKRTFKTVDSEKDWIAIKTKTEQEIDRSHKTVGVYIYETLLKDPKQKIKGKMVRTIERKFYKEELKKILEKQKEFHSELRNDDFYSDCIRELYGNNQSHQLTLSKKEFVHLFMEDIIFYQRPLRSQKSSISNCTLEFRKYKDENGVEHTQFLKAIPKSNPHYQEFRIWQWIFNLSIYKKDDDFKVTEDFLSTIDDFENLFEFLNNRKEVDQKTLLKHFKLNEKNYRWNFVEDKKYPGNETKTMISERLKKVESISDDFLTREIEQKIWHIIYSVNDKTEYEKALKSFAGKNNLDENSFFEAFKKIPPFKSEYGSFSEKAIKKLLPLMRLGKYWNYENINEHSKDRVQKIITGEFDENIKDKVREKAIHLKAENDFQGLQLWLAQYIVYGRHSEASMIGKWNSVDDLEEFLKEFKQHSLRNPIVEQVITETLRVVKDIWLKYGNGAKDFFNEIHIELGREMKQTKSERADATKRITENENTNLRIKALLAEMMYDHSVENVRPYSPMQQEILKIYEDGILKSDIEIEDDILKISKTAQPSPSDLKRYKLWLEQRYKSPYTGQIIPLNKLFTPEYEIEHIIPQSRYFDDSFSNKIICESAVNKLKDNYIGLGFIKHFGGTIVECGFGKNVKVFEAGEYEDFVKKHYANNRGKRNKLLLEDIPEEMIQRQLNDTRHISKYISRVLSNIVREEDGTDEGVNSKNVVPGNGKITSQLKQDWGLNDVWNELILPRFERMNQLTNSTDFTAWNENHQKYLPTVPVEFSKGFSKKRIDHRHHALDALVIACATKDHVNLLNNQSAKSDTKRYDLKKKLMKFEKVVYKHSQTGERVEREVPKQFLKPWENFTVEVKNSLEKIIVSFKQNLRVINKATNHYEKYVEKDGVKVKERVEQTGTNWAIRKSMHKEFVYAKVNLPWVKVSGKEILTAIRKPLDISFDEKKISNSITDTGIQKILLAHLEKYKGILDDKGKEIAPEILAFTPEAIEEMNKNIIELNKGVFHQPIFKVRVFEKGSGRFSVGQLGNKKNKYVEAAKGTNLFFAIYEDKNGKRSYETIPLNEVIERQKQGLNSVPLENKKGHKLLFHLSPNDLVYVPEEGEFIGRVFNLNDLNKEQIKRIYKVEKTSGTECYFVRQDIAFLIKQYDAKTKIGELESQNKLQVTMSEDRTKIADVCLKIDCDRLGDINILTKEKIKKMFDEYR

SEQ ID NO: 5672 - protein, 1534 aa, synthetic construct
  REGION 1..1534: note = Synthetic
MKKILGLDLGTNSIGWALIEQDFDSKQGKILGMGSRIIPMSQDILGNFDAGNSISQTAERTSYRRHRRLYERCNLRRERLHRVFNVLGFLPDHYAKDIDFVNNFGKFIPETETKLPWVKDEEGRFKFLFQSSFNEMLNDFKANGQDIKIPYDWTIYYLRKKALTHKILKEELAWIILNFNTKRGYYQLRGEEEEDVPNKSVEFHSLKIIDVVADEKPNIKGETWYSLHLENGWIYRRSSKNPLYDWKDKVRDFIVTTDLNDDGTVKTDKDGNEKRSFRAPNENDWTLLKKKTEADIEHSQKTVGTFIYETLLQNPTQKIRGKLVRTIERKFYKEELLAILKKQIELQPELFTEEKYYDCVKELYRNNTEQQSFLSNQDFVHLFVNDIIFYQRPLRSQKSSIGNCSLEFRIYKDNNNNTIKEYLKGIPKSNPYYQEFRLWQWLYNLKIYNKDNETEVTTMFITNIEDLENLFDFLNNRKDIEQNILIKYLLKQKDIKGKNETDKYRWNYVEDKKYPCNETHAMLSTHLAKVENVPDNFLEIIDTKEFTNRKTQEHGTANLGTREYQLWHIIYSVTDKKEYEQALRNFAIKYNLETESFVENLKKFPPFKNEYGSYSEKAIKKLLPLMRIGKYWKYEAIDENTKARISKIITGEYDEKIKERVREKAINLTEEQHFQGLQLWLAQYIVYDRHSEAEIAGKWKNVTDLEEYLNKFKQHSLRNPIVEQIITETLRVVRDIWKQYGHSREDFFDEIHIELGREMRNTSEERKKMANTVIENENTNLRIKALLAELQNDSNVENVRPYSPIQQEILKIYEEYAVSNIADSDDDKDFIIKISKTAQPSSADLQRYKLWLEQRYCSPYTGQIIPLGKLFTSAYEIEHIIPQSRYFDNSLSNKVICEAAVNKKKDRELGLEFIKNHHGEIIETGLGQSVKILEEAEYIEFVKQHYSKNRSKKTKLLLEEIPDKMIERQMNDTRYISKFISALLSNIVRADSNDDGINSKNILPVNGKITTILKKDWGLNDIWNDLILPRFERMNQLTETSKFTAWNEQYQKKLPVIPLELSKGFQKKRIDHRHHAMDALVIACVTRDHTNLLNNQSAKSENSRHDLQRKLRYTEKWIDKDGKERHKYSEFKKPWDKFTVEAKNGLSKIIVSFKQNLRIINKATNKYCKYKNGKKIKVKQEGLNWAIRKPLHKETVYAQVSLRKIKIVRFSEAIKNWKSIVDEKLKEEIKRLISLHKDNYNTDIMNKHFKDRKYKFQDIDVSKVEVYYFDNGYSAARESLNTSFNEKKIKESVTDTAIQKILLNYLSTKGNDPDLAFSPEGIEEMNKNIIQFNNGKFHQPIIKVRVYETIGKKFVVGKKGNKKDKYVEAAKGTNLFFAIYTDENGNRSYETIPLNIVIERMKQGLNAVPNTNEKGNKLLFHLSPNDLVYVPTKDEIINSINLNITDINPERVYKLTDSSETTANFIPASIAEVIFNYNKDIQKKIGINYPIQNEIGIGSRGSKNQKAITGEMTKEMCIKLIVDRLGNILEMRGL

SEQ ID NO: 5673 - protein, 1534 aa, synthetic construct
  REGION 1..1534: note = Synthetic
MKNIVGLDLGTNSIGWAVLQESAINDYELKKQISGSGSRIIPMDAAQLGDFAKGNTVSQTKERTGYRGVRRLRERCLLRRERLLRTLDIMNFLPPHFSASLTRYGKFKNADDEPKLAWSKDDDGKAAFLFTSSFNEMLEDFKDTHPELLADGLKVPYDWTLYYLRKKALTKALTPYELAWIILSFNQKRGYYQLRGEETQADNSKKEEYLAQRVVDIIDTGEKKGKSTWFDVVLENGMVYHRPAETKPDWIGKTKEFIVTTPLDKDGNPKKDKEGNIRRSFRMPNDDDWNLQKIKAEKDIDDSGMTVGEYIYNALLHNPKQKIKGKLVRVVERKYYKDELRRILETQKKFIPQLTDSGLYTRCIAELYQSNEAYRQSIATRDDFTYLFVDNIIFYQRPLKSKKSLIDNCPYESHTYIKDGEEKTAPVKCIAKSHPLFQEFRLWQFVGNLRIYQRQAQVGDKVKLDVDVTGQYLQTEDDRAALFDYLNDRTEIKQDTLLKDFFNMKKPKGKDSVYPCRWNYVEDKTYPCNETRGKILARLKKANIQTDFLSDKATEEHLWHILYSVEDKDELRKALEKFASDNNLEHGFTDALADMEPFKKEYGAYSAKAIKKLLPLMRMGKHWDYDAIDENTRTRIEHIINGECDDTIRDRVREKAINLVSPRQFRGLPLWLACYIVYDRHSESANSGQWTKSDDIDRYLCQFKQHSLRNPIVEQVVTETLRTMRDIWKKFGKPDEIHVELGRDMKNPANKRGEMNRRMLENENANLRAKVLLTELMNPEFGVENVRPYSPSQQELLRIYEDGAMSNGENDIDDEISAIMGKLSQTDIKKMPTHSEVRRYMLWLEQNYRSPYTGEMIPLAKLFTSAYEIEHVIPQSRYFDDSMSNKVICEAEVNKLKDRMLGYEFIKRHKGEVVQLSMGRKVTILSPEEYTRHVECQYKNNKAKMRKLLMDDIPDEFINRQLNDSRYISKLIISLLSNIVREDGEEEATSKNVIACNGTITDRLKKDWGVNDVWNHIVLPRFERLNELTGTDKFTTMSKEGHEIPAMPLELQKGFSKKRIDHRHHAMDAIVIACTTRDHVNLLNNEAAMAKNNSNRIALSRKLRRYETVKVVKDGVSKEMSVAKEFKKPWSGFTKDVELALRDIVVSFKQNLRVINKTTNYYQHFKDGKKVAEPQTKGEAWAIRKPMHKETVFGEVNLRRVKEVSLKEALKRPDDIKDKELKAKIKDLLNAKCNEKQIKKYFEDNKDVWSDVNLKKINIFFFTKETKDRFFATRKPIDTSFNKDKIKNQVTDTAIQKIMLRHLKLKGDNAEEAFSPDGIEEMNRNIAELNGGKKHQPIFKVRVYEKADKFAVGQTGCKSKKFVEAAKGTNLFFAIYEEEQIDKNTGEPVSVRSYDSIPLNVVIDRQKRGLPSAPENENGTAPKYVLSPNDLVYVPTEEERKSGRINVPLDKERIYKFVDGSGTTANFVPYFASNIIFSMDKERAKTFCNGRIIQNEFGEGSPKSKNERALTGEMIKKVCIPITVTRLGEITLKK

SEQ ID NO: 5674 - protein, 1544 aa, synthetic construct
  REGION 1..1544: note = Synthetic
MKKILGLDLGTNSIGWALVDHEETKIDGIGSRIIPMDEATIGDFNSGNAKSQTSERTRLRSMRRLNERFVLRRERLLRVLKLLNFLPTHYAEAIDFSIRKGKFKENQEPKIQYKRTENGEHEFLFMNSFNEMLKEFQLYQPQLLNDGNKIPYDWTIYYLRKKALREKIKKEELAWLLLQFNQKRGYYQARGEEEEEKEGKLVEYHALKVVDVVADEQRKGKDEVWYSVKLENGWIYRRSSKVPLFEWTGKVKEFIVTTEVNEDGSVKKDKEGNERRSFRAPKEDDWGLMKKKTEADIERVGKTVGEYIYETLLLSPDQKIKGKLVRTIERKFYKEELSQILKTQIQLHDELQDRELYVQCLNELYQFNEAHKNSIADKDFLHLLVNDVLFYQRPLKSKKSLIANCPYEVRTYKKEGQKLTSPIKCIAKSNPLFQEFRLWQFMQNLRIYSRDEVVNGKQETDVDVTERFFPDEAAWVELFDWLSERKEVDQKAFLKYPKFGLKKDVSKYRWNYVEDKLYPCNETRGAILSKLKSCSSVPNGFLTPDVEMELWHLLYSVDDKQELVKALTSFAIRYQLGDDFVEQFKKFPPFKKDYGAYSEKAIKKLLPLMRMGKYWCEDAVDANAKYRLHAVNERLSTLTTNTTIEDIADDDIPKQVIKSFQKCKYPLRGFNTYQACYAVYGRHSESVDAQKWQTPADIDKFLANFKQHSLRNPIVEQVVGETLRVVRDIWQCYGDGKPNFFDEIHIELGREMKNPADKRKRMTSQITENENTNLRIKALLAELLNDKAIEEVRPYSPSQQEILKIYEEGALMSVSEIPDDILKISKLNQPTKSELVRYKLWLDQKYRSPYTGEVIPLSKLFTSDYQIEHVIPQSRYFDDSLSNKVICEAEVNADKDNNTAFEYIKNNQGKIIELNYGKKVTIMSMEGYGQFVKQYFGQNPAKMKKLLMEDIPEDFINRQLNDSRYISKYIKGLLSNIVREEGEMEATTKRVVSSNGSITTVLKQDWGLNDVWNDIVAPRFIRLNELTNSTNFGQWVNKGGKQVFQTQMPLELQKGFNKKRIDHRHHAMDALVIACATRDHVNYLNNEYAKASAKETRFDLRRKLRRIEPKEIVKKINGETVRKKIDVAKEFYKPWPTFTQDAREALETTIVSFKQNLRVINRAVNKYQRWQPDGEGKMKKVTVSQTGTNWAIRKAMHKDTVSGVVTLKKKKAVSLSVAIDMALIDVNVIVDKTLKQVLRGLIAKHPDKKAIAKYFKDNDSQVGGVDVSKVEVYYADGSLAASRVAVDDSFDSRTILDCITDTAIQKIMLKHLDRYNTVENGKTKEHPELAFSPEGIDQMNKDIVKLNGGRFHKPIYKVRKYEPVGNKFVVGHKGNKSAKFVEAAKGTNLFFAIYKNEETGKRSYETIPFYKVVEIEKQNAKLIKSGTAKRAELAPVPLVNEAGDRLLFYLSPNDLVYIPEDEECDSSVVIGNEGLTKEQCLRVYKFVSCTGNEGHFVPNFYSSPVLKNEVGANNKSQNTIDGRYQIKSNCLKLRVSRLGQVIID

SEQ ID NO: 5675 - protein, 1548 aa, synthetic construct
  REGION 1..1548: note = Synthetic
MSIVLGLDLGTNSIGWALVEQDFKQKQGKILGMGSRIIPMSQDIIDNFGSGKPTETQTASRTGFRGTRHLRERSLLRRERLHRVLNILGFLPQHFAAQIDFEKKLGQFYENTEPKLAYNNKDFIFKKAFEEMLEDFKIHQPELVSGGKKVPYDWTIFYLRKKALTQKLSGEELAWILLNFNQKRGYYQLRGEEYEENKNKEVAFYSLKIVDVTADEEPNKKGETWYSLILENGWIYRRSSKISLVDWKDKIRDFIVTTDLNDDGSIKTDKDGVEKRSFRAPGADDWGLVKAKTQHEIESSNKTVGTYIYDALLKNPNQKIKGKLVRTIERKFYKDELIAILKNQIALQPELFTDELYNDCVRELYRNNEAHRLNLSKRDFVHLFVDDILFYQRPLRSQKSSVSNCTLEYRVFKTKDKEGNTVDQKEYLKAIPKSHPLYQEFRVWQWLFNLKIINKDDDTDVTSLFLKTSEDLEKLFDFLMSQKEVNHKGVLNYLLTPVLKEKFPSAKPAAFNKELAKEIAKFRWNYVFDDTKEKEDDKSKTYPCNETGFEISKRLKKVENLPDGFLSPEIEYRLWHIIYSVNDKKQYEEALKSFARKHSIDEHSFAEEFKKFPPFKSEYGSFSEKAVKKLLPLMRMGKYWDWDAIDAKTKIRIDKIITGEYDEEIKNRVREKAIHLTTKTDFKGLQLWLAQYVVYDRHSEAALAGKWDSVTGLEEFLKDFEQHSLRNPIVEQVVTEALRVVRDIWVKYGKGEKGFFNEIHVELGREMKKTADERKRLTNKISDNENTNLRIKALLAELLVDSNVDNVRPFSPMQQEALKIYEDGVLNSSIPIPDDILKISKTAQPTKSELQRYKLWLEQKYCSPYTGQIIPLNKLFTHEYEIEHIIPQSRYFDDSFSNKVICESAVNKLKDKQLGLEFIKKHYGTEVIKGLYIMTEDTYKSFVKENYAKNPAKRTKLLLEEIPDKMIERQMNDTRYISKFISKTLSNIVREDTNDDGVNSKNVLPGNGQITSILRQDWGLNDVWNELIIPRFERMQQLRTEKDISEGVSFIALNKNGKPIPELQPITLQKVFQKKRIDHRHHALDALVIACATRDHINLLNNRFAKSNERFDLNRKLRKFVKVSYIESKTGEIIEKEVPKDFLKPWGTFTEDAKNILGGIVVSFKQNLRVINKAVNKYQSYKDENGNVRIGKDGKPKKDFIKQVKGDSWAIRKSMHTPMPYSKKMYEFEILKISKNVGKREFITDEFIRSEVERVFIANNSKVTDTQKYLDKYPIIGKTNMPIISTAFKLKTEKFRRRQSIFELSNRGQGGIKSAEDAKKFIDKIPDFKIREELLEHLRISNDDINKAFSIDGIGNFNSKRKVPIYRVPIAESGTSRFSVGVKIGTRHKWVEADKGTNLFFAIYQDENGKRSYETVPLNIVIERQKQGLNSVPETNEKGNALLYCISPNDLVYVPTEEERDPMKAIDFKNLTKEQKNRIYKLEKASGTESYFVRHDIAYLIKQYDAKTKLGELESQNKLQTTMTPDRMKISEFCIKLNVDRLGNITKA

SEQ ID NO: 5676 - protein, 1516 aa, synthetic construct
  REGION 1..1516: note = Synthetic
MKTKRILGLDLGTNSIGWALIENNFKEKTGKIIDLGSRIIPMTQDDIGKFNEGNTVSSTAERTRLRGVRRLRERHLLRRYRLHQVLNILGFLPEHYAQDIDFEKKRGQFLPNTEPKLTYNSNGFLFKDSFNEMLSEFKISQPELVKDGKLIPYDWTIYYLRKKALTEKIKKEEIAWIILNFNQKRGYYQLRGEEEEDDDSKLVEYHSLKVVDIIPDEEGDKEKCFSVVLDNGWVYRRKSKESLGDWMGKVRDFIVTTELNEDGSIKLTKDGEERRSFRAPKEDDWGLVKKKTEHEIDQSGKTVGTYIYDRLLKKPKQKIRGKLIQTIERKYYKTELRKILLKQIELQPEFFTEEIYVASIRELYKNNKAHRVELSNKGFVHLFLEDIIFYQRPLRSQKSLIGNCKLEYKLYRSITEDGKVKENRAYLKAIPRSHPLFQEFRLWQWIYNLRIYLNEDDTNITSEFLNNLESWEDLFEYLNTKSEINQKDLITFLLERKGLSAKEVKNDVKKYRWNFVEDKSYPCNETKASIQFRLSKVDDVEKDFLTNEVEVQLWHIIYSVTDIIEYKKALKTFARKHNLNETSFLDNFLNFPPIKSEFGTYSQKAINKLLPLVRLGKKWSWDNIHDDTKSRINKIINGEYDESIKERVREKALHLNNEEDFQGLDLWLAQYIVYDRHSESELSEKWETVDALKDYLKDFKQHSLRNPIVEQVVTETLRVVGDIWTIYGNGEKDYFDEIHVELGRDLKSSADQRKHLSQVIGHNENTNNRIKYLLLELKNDSNIENVRPYSPMQAEALRIYEEGVISALDVIPDDIDKIIKSLAPTSAELNRYKLWLEQGYISPYTGQIIPLSKLFTSAYEIEHIIPQSRYFDNSFNNKVICESAVNKLKDNQLGLEFVKNHGGEIVEIGYGRSVKILNEEQYQLFVKEKYASVRNKRNILLMDEIPEQMITRQLNDTRYISKFISNLLSNIVRSEANDDGINSKNLLPGNGKITNRLKHDWGLNDVWNDLVLSRFKKMNEISDSTDYTSWNDRHQKFLPTVPLELSKGFQKKRIDHRHHALDALVIACASREHVNLLNNQHAKSSKRHDLNRILRHYEQRTYYNKNNEKITRDVPTLFLKPWDNFTIESKKAIENVIVSIKQNLRVINKTTNNYQKFVEDKGRLVKKYVKQTKGDSWAIRKPLHKDTVYGQVKLRKKKQVRLSAALDSYGDIVDISLREHVISLVALNYDKKLLTKYFKDRNNTWNDIDVSRVEIYYWDDKQVATREFLDTSFTEKKIVGKITDTGIQKILLAHLENYIDLSEDSPEKLAFTPEGIEEMNNNIVQLNNGKFHQPIYKVRVYETKGSKFNVGHVGNKPSKFVEAAKGTNLFFAIYEKESGDRDYATIPLNIVVERLKQKLTPVPEYNENNERLLFYLSPDDLVYVPLSEEENIELIDFSNLSIEQKERVYKMVSATNKVCYFIPINYASLIKAYDAKSKIGELASLNKSELTICGEIRIKNTCVKLKSNRLGQINIV

SEQ ID NO: 5677 - protein, 1514 aa, synthetic construct
  REGION 1..1514: note = Synthetic
MKKILGLDLGTNSIGWALVEKSDKEGRIIKSGSRIIPMDAGELSDFANGKTKSKTADRTSKRSARRLRERFLLRRERLHRLLRIIGLLPKHYEERIGWDIENDEKHFGTFLEGEEPKINYLKDENGKNRFLFEDSFLEMVKEFKGKHPELKSIPKDWTLYHLRNKALHSKISKEELAWIILNFNQKRGYNQLRDEVLDSQDGKKSEYKELIVKKVTPDEDSKGEKKWYTIEFKGSDIIYRRQSKYDLDWVGKKRGLIITTKIDENGETKLKKDGSLDYSIKSPEDDDWGLLKIKTEQDLRLSGLTIGQYIYHALLDNPSQKIRGGLVRVIERSFYKDELRKILEKQCEFHPEFNDRDLYEKCITELYKNNTAHRNNIKNKDFTYLILEDVLFYQRPLKSKKSLIDNCPYESHNGFDKETGEIKQFPIKCIAKSNPFYQEYRIWKFLSDLRIIANTYEKDGHLYSDVDVTQEFIKDSYAMSDLFLWLNDLAKVDQKTMLKKLGIKKAEENKYRWNFVEDKIYPMNATRHAILSKLDKGEKLTKENEYLLWNLLYSTQSKAEIDKSLSENTPSGKPNTNKLYNKLRKDGISSESLEKIKTIKLPDEGYGAYSEKAIKKLLPLMRTGQCWDADNIDMYTASRIQAFIEENNLDNFSERIWSRISSLKTVDSYQGLPEWLACYIVYGRHSEANEVVKWKTPQDIDMYLNNFRQYSLRNPVVESIVLETLRVVRDLMAKYGSFDEIHIELGRDLKNPSDKRASITKQILENENTNLRIKALISEFTDSEFKIENVRPYSPSQQELLRIYEEDILNQYEPDSEILGIIKELSNPTVQPSRNKVLKYKCWLDQKYVSPYTGKPIPLSRLFTSDYEIEHIIPQSRYFDDSFSNKVICESEVNKLKDNLLAYEFIKQHHGYTLQSGVRIFEVKEYEEHIKNVYSSRKASSKRKKLLMDDIPTDFIERQLNDSRYISKVVKSLLSNLVREEDENGNLEPEAISKNLIVCNGTVTTRLKRDWGLGEVWNSIVLPRFQRLNDLTGRTCFTTTNKEGKEIPAMPLELQKGFNIKRIDHRHHAMDAIVIACTTREHVNLLNNEASLPKNKEMKYALSHRLRRYAEEIVNGQKRNIPKEFLMPWPSFKTDCKNSLNEIVVSFKQNIRVLNKATNSYFAYNDDGHKILNHQHGSDHFAIRKSLHKETIFGHVNLRWKKEGKLKEAISKPSMIVDRRLKKKIQEMLNKNYSEKQILAYFKNFSYEWKEFDFNKIELYYFSDEKEALVATRFGNDLVSIFSGKTKKEEIEKTIEKITDSGIRNILTTYLCQNLGNIEEAFSPDGLEKMNDNISSYNNGKEHKPIYKVRMFETMGQKFPIGISGNNAKKFAEANKGTNLFFAVYVNDENIRTYSSTPLNEVIERQKQGLTPVPETNENGDKLLFYLSPGDLVYVPDEENNHEYITEFDANKIYKIVSFSKNQAFFIPVYIASPILQTIELGANNKAERSWDRVMIKEVCIPISINRLGEITQK

SEQ ID NO: 5678 - protein, 1438 aa, synthetic construct
  REGION 1..1438: note = Synthetic
MKTILGLDLGTNSIGWALVQQDFKNKQGNILGMGSRIIPMSQDILGDFGKGNSVSQTAERTRYRSVRRLRERFLLRRERLHRVLHVLNFLPEHYDAQIDFEKRFGKFKSETEPKLAWENTDGKFSFLFQASFNEMLEDFKISGKDLKVPYDWTLYYLRKKALSQKIGKEELVWILLNFNQKRGYYQLRGEEEEENPNKRVEFYSLKIVDVLADEPQKGKTDLWYSLVLENGWIYRRSSKLPLFDWQDKTRDFIVTTDLNDDGSIKTDKDGNEKRSFRAPSENDWTLVKKKTEQEIEKSHKTVGTYIYETLLQNPKQKIKGKLVRTVERKFYKEELRKILEKQKEFHPELQDEDTYNDCIRELYRNNEVHQLSLSKKDFVHLLMEDLIFYQRPLRSQKSSVSNCTLEFRKYKVENGLEHIQYLKAIPKSNPYYQEFRIWQWVFNLNIYEKENEDNVTKEFLSTTKDYENLFEFLNNRKEVDQKALLKHFKITEKTHRWNFVEDKKYPCNETKTMISSRLDKVEGITNNFLTREIEQKIWHIIYSVNDKTEFEKALKSFARKNNLDEHSFSEAFRKFPPFRSEYGSFSEKAVKKLLPLMRLGKFWNYAAIDGNSKERIQKIIIGEYDENIKDKVREKTLHLKSEDDFQGLQLWLAQYIVYGRHSEASITGKWNSADDLEGFLKEFKQHSLRNPIVEQVITETLRVVKDIWVKYGNGAKDFFSEIHVELAREMKLPAEERERLTRQISENENTNLRIKALLAEMMDDHSVENVRPYSPMQQEILKIYEDGILKSDIEIEDDILKISKTAQPSSSDLKRYKLWLEQKYKSPYTGQIIPLNKLFTPEYEIEHIIPQSRYFDDSFSNKVICESAVNKLKDNYIGLGFIKQFSGTIVECGFGKTVKVFETGEYEDFVKKHYANNRSKRNKLLMEEIPEKMIERQLNDTRYISKYISGLLSNMVREEDGKDEGVNSKNIIPGNGKITTQLKQDWGLNDVWNDLVLPRFERMNRLTDSEDFTAWNERHQKFLPTVPVEYSKGFSKKRIDHRHHAMDALVIACATRDHVNLLNNQSAKSDTGRYDLKRKLMQFEKAVYNDPQTGKRIERGVPKKFLKPWNGFTVDARNKLETIVVSFKQNLRVINKATNYYEKYVEKDGVKTKMVVKQTGTNWAIRKPMHKDTVSGKVDLPWIKVPKGKIVTATRKSLDTSFDLKTINSVTDTGIQKILRNYLEFKGSPESAFSPEGIEDMNKNIQKYNDGKPHQPIGKVRVFELGSKFQVGQTGNKKDKYVEAAKGTNLFFAVYENKHGIRSYETVPLNEVIERQKQGLYSCPETNQKGEKLLFYLSPNDLVYIPTGEQQYNINTVDFKNLDKKNIYNVYKIVSFTGNRLYGIPFSLSNVIVNKIEYTQLNKIEFTREKEILLKFNVDRLGDIKTFTTDDVRKIFNS

SEQ ID NO: 5679 - protein, 1522 aa, synthetic construct
  REGION 1..1522: note = Synthetic
MRYMKNILGLDLGTNSIGWALINYSSENHQGNILGLGCRIIPMSQDVLGKFDSGVSISQTAERTGYRSTRKLNQRQLLRRERLHRVLNILGFLPKHYLDSIDFTKYYGQFKPETETKLVYKKDENGKYQFLFQQSFHEMLLEFKENGWENVKIPYDLTIYYLRKKALTQKIKKEELAWLILNFNQKRGYYQLRGEDLDENSKKMNKFYTLKVVDVIEGEKGKSGIWYNVVLENGWIYKRESKISLSNWIDKERDFIVTTELDDNGKVKLNKYNEEIRSFRSPKEDDWGLRKIRTEQIIEESNKEVGTFIYNTLLQNPTQKINGKLIRTIERKFYKQELEQILKKQMEFHKELQDSDLYIKCINELYKHNEAHKSNIKNRGFDYLFIEDIIFYQRPLKSKISLISDCSLEFRFYKKADQTIEKEPIKCIAKSHPLFQEFRLWQFVKNLKIIERQKVVNSITKFDEDVTNEFFKTEEDWIALYDFLNDKKDVTQKQFLAKYKLKEDKYRWNFVEDKTYPCNETRALFLTKAAKIEGMTASFFDKKNTEDLWHIQYSVNDRAEIESAIGKFTKKHNLPEEFAKEFSNLPAYKSEYGSFSAKAIKKLLPLMRMGKYWNVETIGSKTTERINKICTGEYDENIKNRVREKAINLTEINNFKGLPLWLASYIVYDKHSEGSDTTKWKNPDDISNYFKNEFKQHLLRNPIVEQVITETLRVVRDLWKYYGKGKEGFFDEIHLELGREMKNPAEKRKQITEKNSQNENTNIRIKALLEELKNDGIAEVRPYSLSQQEILKIYEEGIYLNENRKDQLDAIDKIRKNSKPTTSDILRYKLWLEQGYISPYTGEIISLGELFTTKYQIEHIFPQSRFFDDSMNNKIICESEVNSLKDNMTAYEFIKKHRGVRVDLNGGGFVNILMVDVYENHIKTYFTKNKVKQKNLLSEEIPESFINRQLNDSRYISKVIKNYLSKIVREQKEGNLEQDATSKNIVPVTGAITSKMKQDWGLNDVWNSIIIPRFERLNMLTNSTEFGQWEDKQGKKVFQTTVPNNSSKGFSKKRIDHRHHALDALVIACITKDHINYLNSINSERTNYSLVSKLRIMEEVFIKGEKKIVPKEFHKPWETFTVDAKNQLLKTVISFKQDTRIINKTINRYQKYENGKKISSKQINGENWAIRQPLHAETVSGKVFLRREKENPVLLSTALMQIEDVVDLKIKTILKRKAKELNNNVEELKKYFKKNPLTVNGKETESVKIYEIIEASATRKTLDTTFDEKRIGKITDTGIQKILMNHLRQPIYQSAIDENGKKIPANEVAFSEEGLDALSRNIQQLNNGKSHQPIKKVRVFEEGGKFALGQTGNKSNKYVEAAKGTNLFFAIYRDKNGKRCYQTIPLNEAIERQKQGIRIAPEKDKDGNQLLFTLSPNDLVYIPTADEMENLSLINFENLTKEQFFRIYKFVSCTGGEGHFVTNNYAKEIISNENGSNNKNERMLELIKSSTIYDEKEKPIMIKTVCWKLTTDRLGNLRLAKS

SEQ ID NO: 5680 - protein, 1482 aa, synthetic construct
  REGION 1..1482: note = Synthetic
MAKQILGLDLGTNSIGWAVVGTNDKNQPNHIVKAGSRIIPMDAAIMGDFESGNSYSQTGERTRYRGVRRMFERRLLRRERLCRTLSILQALPQHYAKHLNRHGQLNKGVEPQLAWCDGHFLFMDAFNEMCAEFRAVHPELFANGKTIAYDWTIYYLRKKALSYPISMQELAWILMQFNQKRGYNQARGEEEEVKTAEKKEFYSLRVKEVRDTGESSKGKNWYDVVLENGWVYKRQSQYPLDWVGKTKDFIVTTKLNEDGTEKRDKEGNIVRSFRAPDENDWTLRKVKTEQDIEDSNKTVGEYIYNALLNNSDQRIIGQLVRTIDRKYYKEELYRIIRKQMTYSPELQSPELYQECINALYPNNDAYRESIAKRGFDYLLVDDILFYQRPLKSKKSLINECPYEYWTYKDKDGIEKRQYLKCVPKSHPVYEEFRVRQFVSNLHLYTLAANGVDKNDCTSQYITDKESLVEQLLMSKAITEKALLKLLAGKNSKDLSWNYVPEKEYPMAPVTATLSQLLKDNVAQLSEEVLAVWHILYSVSDKTELEKALKHYADKKGLSDEFVDKLKKQKPYAAEYGAYSLKATKKLLALMRSGCNWKKEDIDTNTLQRIEHVLTGEFDPHITERVREKCTSMQDVQDFQGLELWLAEYVVYGVKDHSTKWATPDDIDNYIQHFRLHSLNNPIVEQVVLETLRTVRDIWKQYGTLDEIHLEMGRDLKNPADKRKQMQKRALENEKTNLRIKYLLQEFMNPDMDIDGARSYSPSQQELLRIYEEGVLSSNVIPEDIQKTIDALSSLKQPTHAEIVKYRLWLDQKYVSPYTGQIIPLAKLFTSAYQIEHVIPQSRYFDDSLSNKVICEAEVNALKDRQLAHEFISQHGGEKVTLTGGKVVTILSTAEYENLIKKTYASNRAKLEKLMLDDIPESFIARQLNDSRYISRLIKGLLSNIVREQDPQTHEYEPEETSKNVIVCNGSVTDRLKKDWGVNDVWNHIILPRFERLNQLQNTSVFTTYNREGHLIPNLPIELSVNKKRIDHRHHAMDAIVIACTTRNHVNLLSNLSAMPEQQVNRIALNNLLRERISFGDGKHLAFDKFLKPWETFTQEVEVALQEIIVSFKQNLRVINKSVNHYTKIEDGKKVIKKQTNGDNWAIRKSLHKETGFGLVNLQMKKTVSLKYALEHLDAIVDKDLRKKLRELLNAGKNEKQIKQYFASEPDVWSDINLQKIEVYYYTNDTADRYYATRTTVDDTFNADTIEKVTDSGIQTILRRHLEENNNDPKLAFSPDGIENMNRDIQRLNNGVPHKPIYKVRKYEKADKFAVGTISAKSKKFVEAAKGTSLFTFVYQYIDASNATKRKLYPISLQQVIQYQKEFGNKLWMRKANEDFMVKGEIPSCYQFLFCLSPGDLVYLPNKEEQQSHQYAYDQNRIYKVVSLDGENPNFIPASIATMIIDKVEFTTHNKSSRSVEGQLIKETCIPVRVDRLGNIIAQ

SEQ ID NO: 5681 - protein, 1485 aa, synthetic construct
  REGION 1..1485: note = Synthetic
MKRILGLDLGTNSIGWALIEQDFENKQGQILGLGSRIIPMSQDVLGDFGKGNSISQTAERTGYRSVRRLRERHLLRRERLHRILNILGFLPKHYASQIDFEKRLGQFFKETEPKLAWKQNDKDKFEFLFQRSFNEMVANFKANGQEIKIPYDWTIYYLRKKALTQKIEKEELVWIILNFNQKRGYYQLRGEEEEENPNKLVEFYSLKVTDVKADEEPNKKGEIWYSLILENGWVYRRSSKTDLSDWKDKVKDFIVTTDINDDGSVKTNKDGEEKRSFRAPKEDDWTLIKKKTEQEINQSRQTVGTYIYENLLQNPNQKIRGKLVRTIERKFYKDELRQILQRQIELQPELFTDDLYNDCVRELYRNNEAHQLQLSKRDFVHLFLNDIIFYQRPLKSQKSSIGNCPLEFRTFKDEDGNEQIVYLKAIPKSNPYYQEFRVWQWLYNLKIYTKEDDTDITVQFINGIESLENLFEFLMSRKEVNHKDILSYFIVPIIKEKFPDAKGKVLKNEISKEIGKYRWNYVYDTDKDESKNYPMNETGYEIRRRLGKVEGVPEDFLSREIEQHLWHIIYSVTDKIEYEKALRSFANKYALNEESFIENFKKFKPFDSGYGRYSEKAIKKLLPFLRIGKYWSWDAIDEKTKARIGKIITGEYDEEIKDRVREKAIRLTEENHFQGLQLWLAQYIVYDRHSEANVAGQWNSVTDLEQYLKDFKQHSLRNPIVEQVVTETLRVVKDIWKQYGKGAKNYFDEIHIELGRDMKNPADERKYLSSIISENENTNLRIKAILSELINDNSVENVRPYSPMQQEALKIYEDGVLNSGIAIPDEIEKISKKSEPTRSEIQRYKLWLEQKYRSPYTGKPIPLSKLFTSAYEIEHVIPQSRYFDDSFSNKVICEAEVNSLKDKQLGLEFIKNHYGQKVTTSSGEVEIFSEEAYTTFVKEHYDKNRGKKNKLLLDEIPEKMIERQLNDTRYISKYVSNLLSNIVRTEKGDEGINSKNIIPGNGKITGRLKQDWGLNDIWNDLILPRFERMNELTKSNNFTSWNEKYQKHLPTVPLELSRGFQKKRIDHRHHALDALVIACATRNHVNLLNNKHAKSKNERYDLQHTLRNKEKWQDKNGNERDKFTEFKKPWNNFTVDAKNELEKIVVSFKQNLRVINKATNYYEKIINGKKTKIEQKGLNWAIRKPMHKETVSGLVDLPRIKMPKGKILTATRKSLDMSFNSKNIESITDTGIQKILINHLEKYDEPKIEVEENDVSGKILKRKELIKKKKLIEHPELAFSPEGIEDMNKRITQYNDGKPHHPILKVRVFEVGSKFQVGYKGNKKDKYVEAAKGTNLFFAVYWDEKKQKRSYETIPLNIVIERQKQGLTSVPETDEKGNRLLFYISPNDLVYIPTEEEQENIGQIDFNNFSKEQVRNIYKMVSSTGAECHFVQSHIASLIKNYDAKTKIGEFGSLNKSEVNIENTTRIKEHCIKLKVDRLGNISRA

SEQ ID NO: 5682 - protein, 1508 aa, synthetic construct
  REGION 1..1508: note = Synthetic
MKRILGLDLGTNSIGWAVLLAEKNNDSFLLKRIEAAGSRIIPMDAAILGDFDRGNTISQTAERTRLRGVRHLIERCIQRRERLHRVLDTIGFLPVHYSQALTRYGKIKDGEEPKLAWVKNETGKYHFLFQSSFDEMLQDFKSQHPDFRDKKIPYDWTIYYLRKKALTQKISKEELAWILLNFNQKRGYYQLRGEEKETDKNKRIEYTALKVVSVEYSGEKKGKDVCYNVHLEDGGIYRRTSSVFLDWEGKTKEFIVTTDLNDDGTPKMDKEGNVKRSYRSPNEDDWTLVKERTQSDIERSGKTVGAYIYDTILQTPNQKVRGKLVRTIERNFYKDELVRILEKQTEFHKELQDRELYRDSIEELYPSNEAYRQNIANRDFTYLFVEDILFYQRPLKTKKSLIDNCQYEGYTVIDKETGEKKSYGIKCIAKSHPLYQEFRLWQFICNLRIYKKGLSKDEDVTREFLRNEDDYVALFDWLNDKKELNQKEFLKCPTFGIKKNAESYRWNYVEDDKKKYPCNETHAQILSYLSKANVEPDFLTAETEEWLWHILYSVEDKQELTKALQKFADTYSLGDSFTTTFQKFPPFQKEYGAYSAKAIKKLLPLMRMGKYWSQTNIDKKTLERIDRIITGEYDENIKNRVREKAFNLTNISDFKALPLWLACYIVYNRHSEAKDVTKWHTPEDLQRFLDSFKQHSLRNPIVEQVITETLRTVRDIWKKYSNIDEIHIELGREMKNPADKRKKMTQQILENENANLRIKTLLMEFANPEFEIDNVRPYSPSQQEILRIYEDGVLNSTNNLPEDIETILKKFKESDTKKQPTRSEVLRYKLWLEQKYRSPYTGQPIPLAKLFTPAYEIEHIIPQSLYFDDSLSNKVICESVVNKRPYKDYQLGFQFIKNNQGRIVQELSTSNKTVKIFTIDEYEQFIKDNYSNNRSKMRKLMMETIPDEFIARQLNDSRYISKVIKGLLSNIVREDNEEEAISKNVIVCTGGVTDRLKKDWGMNDVWNRIILPRFLRLNEITGTNQFTTTSTNGHEIPSMPLELQKGFNKKRIDHRHHAMDAIIIACANRNIVNYLNNESASKNSKISRDDLKALLCEKSKTDENGNYKWIIKKPWENFTKDVYNILNEIIVSFKKNLRIINKATNYYTHFKDGKKEQVEQTGTNWAIRKPMHKDTVFGEVSLRKVKTVSLNEAIKNPTRIVEKEFKIKLQSLLKQGCDAKKIKKFFEEEKDVWQDINLSKIKVYYFTKETKDRYFATRKTLTDLFTSAINEKKEDKKIKKAKELIEKITDEGIQTILFRHLEQKNNNPELAFSPDGIDEMNRNIVQLNNGKYHQPIFKVRVYEKGDKFAIGKKGNKASKFVEAAKGTNLYFAIYETEKWDDSVGTYKKERKYETIPLNIVIERLKQGLSPAPADEKGNEPKFVLSPNDLVYVPTEENEININNAKIYKFVSCTSNEAHFVPISIASPIIETIELGSNNKAQRAWSGEMIKEVCIPIKVDRLGNITKIG

SEQ ID NO: 5683 - protein, 1495 aa, synthetic construct
  REGION 1..1495: note = Synthetic
MKKKILGLDLGTNSIGWAVVNNENNRKNISHAGSRIIPMDAKLMGDFESGNSISQTATRTAARGARRLYERHALRRERLNRVLSILGFLPIHYVSELNRYGQLNKGAEPKLAWKIDGGKYVFLFFKAFSEMVTDFNAIHPELLENGKRIAYDWTIYYLRKKALTQPIDKQELAWILHQFNQKRGYNQARGEEEESKVNERKELITQKVISVRNTGEVSKGRTWYEILLENGLIYRRQSAYPLDWEGKTRDFIITTKLNDDGTESKDKEGNIKRSISAPQEDDWGLRKIKTQHDIDASHKTVGEFIYDALLHNPDQKIIGQLVRVVDRKYYKDELKRILDTQKQFIPELQNEDLYNECIHALYPQNEAYRNSIAGKDFTYLLLNDIIFYQRPLKSKKSLINECPYEYHVYKDEDGKWQRQYLKCISKSHPIYEEFRLWQFVENLHIYREAANGIGKEDCTAELIANKVDLISWLLTQKEVSEKSLLTQLVGKNKIKGLSWNYVSENDKKYPAAPVTSTITAVLKEAGGEVSTSEIEHIWHILYSVSDKSQLLAALKHYAETNLLSDVIVEKLGKQKPFAADYGAYSEKATRKLLNLMRCGEYWSEEAIDAQTKSRIEHILTGEVDDSVSERVREKLDTMNDVKDFQGLPLWLAEYVVYDVRKNDTKWEKPEDIDKYLQSFRLHSLNNPIVEQVVMESLRTVRDIWKQEGQIDEIHIELGRDLKQNAEQRRKTMLRQQENEKANLRAKLLLQEFMNPEMDVEGVHAYSPSQQELFRIYEDGVLSANKPDDDTQRIINELSSLKQPSLQDIKKYRLWLDQKYVSPYTGEIIPLAKLFTPAYQIEHVIPQSRFFDDSMSNKVICEAEVNARKDRMLGHEFITQCGGETITLSGGKVVQILSLRAYEDTIKKNFAGDPRKQEKLMLDEIPEKFVARQMNDSRYISRLMMQLLSNIVREKISNTEYEPEAVSKNLIVCNGTTTTRLKKDWGINDVWNKIILPRFERLNQIQNTTVFTAKTANGHIIPNVPLELKQGFEKKRIDHRHHAMDAIVIAFTTRNHVALLSNESALDKDEKARYDLQTLLRKREVWRSADGKEHYKFTDFIAPYDGFQKDVQETLENIVVSFKQNLRVINKSNNHFVHFVKDEETGKLKKKRDPQKKGENWSIRKSLHKATVFGEVNLRKQKYVNLTYALQHVEDIVEKDLRAKLKELLQEGKNEKQIKQYFASEPDVWADVNLKRIEVYYYTKDTNDHYYAVRTALDDSFTEDYIRNKVTSEAIQKILLAHLERCNNDSKLAFSPDGIEKMNADIQALNNGVPHKPIFKVRTYEKAEKFAVGQIGAKSKKFVEADKGTNLFFAVYSTKMEDGSEKRSFVTIPFKAAVDCQKQGKKEWRTWLDKWIHDENLVAEDAKLNFILSPGDLVYVPKADNTSEMERSRIYKFVSSSDTDAYFIPVAVASPIINKVEYTQLNKISRICAEESLIKEICIPIKVDRLGNIVAQ

SEQ ID NO: 5684 - protein, 1496 aa, synthetic construct
  REGION 1..1496: note = Synthetic
MKKILGLDLGTNSIGWAVINATTNDNGNEMLTGISHAGSRIIPMDTAQLGDFAKGNTVSATKERTAFRGTRRLRERHLLRRERLHRVLDVLGFLPPHYSNSLSRYGKFLNDIEVKLAWNKNQEGNYEFLFGDSYNEMLEDFKKAHPTLLENGKKIPYDWTIYYLRKKGLSQLLTKCELAWLLLNFNQKRGYYQLRGEEEEEKQNEKVEYLALKVVKVEATEDKKGEDVWYNVFLENGMVYRRTSKVFLDWEGKTKEFIVTTKLSSDGMPLVDKEGEIRRSFRAPQPDDWTLQKKKAEADIDNCGKTVGAYIYDALLANPNQKIKGKLVRVIERKYYKDELLQILAKQIELNPVLQDKGIYHKCIEELYSSNDSYRKNIENKDFSYLFVNDIIFYQRPLKSKKSLVDTCPYEEHIGIDTLTGKSRKYGVKCIAKSHPLFQEFRLWQFVQNLRFFEAETDQDVTSSFIKDENDMVSLFNWLNDKSSITQKVILSYTGFNLKKNEQQLYRWNYVEDKEYPCNETRGAMLSLLKKAEIDPSFLTKKIEQQLWHILYSVEDKRELEKALSSFATKHNLNTSFVDTFKKSKPYSKDYGSYSLKAINKLLPLMRTGEYWSEKSIDPDTARRIEHLITGEMDDSICNKVRQKAISLNDISSFKGLPLWLACYIVYNRHSEAKDITKWQSPADIDQFLKNFKQHSLRNPIVEQVITETLRVVRDIWKQEGRIDEIHVELGREMKNPADKRRKMTDQITQNEETNQRIRTLLTEFMNPDMHIENVRPYSSSQHELLKIYEDGVINSYSKLPEDIANIQKKFKESETSKRPTQSDIIRYKIWLEQGYRSPYTNQAIPLSKLFTAEYEIEHIIPQSRYFDDSLSNKVICEAAVNKLKDNMLGMEFIKKHPGEKIQIGTKTVTILSTAEYEQLVKDRFTQHSLKRKKLLMEEIPEDFIQRQLNDSRYISKFVTSLLSNIVREDGEDATVSKNVIVCSGGITDRLKQDWGIGDVWNSTILQRFQRLNNLTNSNEFISINSSGHEIPTVPFSLKKGFSKKRIDHRHHAMDAMVIACASRNIVNYLNNSSSLSTATTSRYDLQRLLCTKNFEGNSHNYQWLINKPWDTFTNDVKEQLQNIIVSYKQNIRIINKSPNKYQHINSNGKKEMVLQTKGEKWSIRKSMHKDTVFGDVNLRLIKAVGLKEAISKHDNIVNRDLRIKLKELISNGYDEKKIKQYFADESDTWQDVNFKKIEVYYFAHDTQNERYYATRKPIDTSFSEERIKGSVTDTGIQKIMLKHLEEKGNDPNIAFSPDGIDEMNANITHLNNGTTHKPIYKVRAYEKANKFAVGQKGNKYKKFVESAKGTVLFYAIYESEVLDKENGEIKIKRSFDSISLNTAIERLKKGLSPVPPNEDGINPKYVLSPNDMVYLPTQEEINAGKFNIRTDRLYKFINSSGPQSFFRLAPVALPIVDKVEYSKLNKEERSITGEMIKETCIPIKLDRLGNIIKIG

SEQ ID NO: 5685 - protein, 1507 aa, synthetic construct
  REGION 1..1507: note = Synthetic
MKKILGLDLGTNSIGWALLNAQELENGNGFVFDHIERAGSRIIPMDAAILGDFDKGNSKSQTSERTRFRGVRRLRERHLLRRERLHRVLNLLGFLPGHYLREIDFENHPGKFIASVEPKLPWVKNISGQFEFLFNSSFEEMLNDFKNSQPQLVADGRKIPYDWTIYYLRKKALHEKISKEELVWLLLNFNQKRGYYQLRGEDEEEDRSKRVEFHALKVLSVKATDQKKGKDVWYEVTLENGWIYRRASSLPLDWEGKVKEFIVTTDIAEGGTPKMDKDGNVKRSFRAPKEDDWTLLKKKTEADIEQSNKTIGTYIYDTLLQDPFQKIRGKLIRTIERKYYKAELEAILRKQKEYHQELNSPDVYKKCIEHLYPNNEPHRENIANKDFVYLFLDDIIFYQRPLKTKKSLISDCPFEYRRYKDPKTGEEKISTIKCIAKSNPLYQEFRLWQFISNLRIYQREKEINGQLKIDVDITSEWLKSEEDYAALFEWLNDRKEIKQDTLIQSYFKQKKIKGQTTFPFRWNYVEEKIYPCNETRASILSRLENANISSGFLTKEREVALWHILYSVEDKYEIIKALRTFKEKNQLDDTFVDAFCKFPPFKKEYGAYSEKAIKKLLPLMRRGKFWSESSIDSYTQTRIEKIITGEVDATILERVRDKAIHLSNVTHFQGLPVWLASYVVYNRHAEAQEVIKWQTAEEMDVYINAFKQHSLRNPIVEQVILETLRTVRDIWKEAGQIDEIHVELGRQMKNPKDKRAQMTEQALENENTNLRIKQLLTEFLNPEYEIENVRPYSPMQQEIFRIYEDCALNNSMEVPDEILDVVKKFKEADVKKRPGKSEIMKYKLWLEQKYRSPYTGEIIPLGKLFTPAYEIEHVIPQSRYFDDSFSNKVICEAEVNKLKSNQLGYEFIKNHHGEKVTLGFGKSVEIFSVSAYEEFIKQNYNGLKNRGKMKKMLMEDIPEAFIERQLNDSRYISKVIKGLLSNVVREKDEQDAISKNVITCTGGVTDRLKKDWGINDVWNDIVLPRFERLNRLTDSKQFTRYNERIQKYIPDMPLDLQKGFNKKRIDHRHHAMDAIVIACATRNIVNYLNNESASKRSKFSRYDLQHLLCEKRHTDDKGNYTWLVKKPWESFTQDTRLALENIVVSFKQNLRVINKATNSYQHYDESGKKIFKKQIKGNNWAIRKPMHKETVFGNVNLRKVKYVRLSVALDTPAMIVDKLLKSKVKELLSLKYEKKKIEKYFKENVDDWKEYDFTKVAFYYYTNDTKDRLVAVRKPLDASFNIKKIEESVTDTGIRKILLKHLANNEEKADLAFSSDGIDDLNRNIRMLNDGKEHQPIYKVRVYELQGNKFNVGVTGNKSSKYVEAAKGTNLFFVIYETEEGKRSYESIPLNIVIERQKQGLLSVPEIDENGNKLLFWLSPNDLVYVPSEDEVVNGRIADCLDKNRIYKIVSFTGKRLYGIPYSVANVIVDKFEFSLLNKIEFIGEKEICIPVKISRLGRVLSVGKRL

SEQ ID NO: 5686 - protein, 1459 aa, synthetic construct
  REGION 1..1459: note = Synthetic
MTKKILGLDLGTNSIGWALISQDVENKTGEIIKLGTRIIPMSEDILGDFDKGVTTSSTAKRTEQRGKRRLRERHLLRRERLHRVLNILDFLPEHYKSEIDFEKRLGQFRKEKEPKIAYRLNEDTRAFEFIYKKAFLEMLEDFKEKQPEILSEGKLIPYDWTIYYLRKKALTHKIEKEELAWLLLNFNQKRGYYQLRGEDEEENNTDKLVEFHPLQVIDVIDTKELNARKQMLYKIVLENGWEFIKPSFTPVLWKGKVKEFVVTTTIDKAGKEKRTFRAPEENDWTLVKKRTEYSIENSKKTVGEYIYDALLKNPKQKIKGSLVRVVERKYYKSELIKILSTQQAYHEELKSKSLYKKALNELYQYNEDHKKSIASKDLVHLLLNDIIFYQRPLKSKKSLISDCKFETRSFTKDGIIERRPLKCIPKSHPLFQEFRLWQWLQNLRIYEIATDHDATNEILKSEDNWTELFDWLNNRKEIKQKELFNYLLKPLKLKPANYRWNYVYDATKDDSKAYPCNETRATILNQIGKIDGLDKSFLNKQREEELWHIFYSINDKEEIEKGLKSFAIKHNLPDDFVNEFKKLPPYQNEYGAYSAKAIKKLLPLMRMGKYWTASNIHPQTLDRIDKIITGEFDENIKERVRVKALHLNKIEDFKGLPLWLTSYIVYDIHSEEGEIKHWRTIQDLENYLIEFKQHSLRNPIVEQVVTETLRVVRDIWQHFGKGKENFFDEIHIELGREMRNPADKRKAITEQVANNENTNLRIKALLAEMLNDNNIENVRPHSPSQQEILKIYEDGALNASTDIPDDILKISKTAQPSKNDLVKYKLWLEQKYRSPYTGEIIPLNKLFTPAYEIEHIIPQSRFFDDSFSNKVICESEVNKLKGNQLGMEFISNHKGERVTINFGKTVEILSKEAYEDLVRKQYAKSRSKLKKLLLEDIPEEFAQRQMNDTRYISKLVKNLLSNIVRKEDKDDGTTSINLLSSNGQITSILKQDWGLNDVWNEIIAPRFERLNQLYGTRDFGDINPSTNKFLPTVPLEYSKGFSKKRIDHRHHALDALVIACATRNHINYLNNQNALDKSKTKEQKQQAREDLRAILCYKKFNDGSEKNYKWLFNKPWKSFTEQAKDQLSTIVISFKQNLRVINKTVNKYERWETENGITKKIITTQTKGDSWAIRKPMHQAFVFGKVKLPRVKKSNEKSIVAIRRHINPTIDINKITDTGIQEILNRFLISKNNDPEIAFSADGLDELNSNILEFNKGKWHQPIYKARFFEVASRFQLGETGNKKKKYVQTADGTNLFYAIYWDEEKQKRVFETIPLNEVIEHQKWRASLSKSEQAKTHTIPIKSERGKFLFYLSPYDLVYIPSEEERDNIKQIDFTNLTEEKIKRIFVVNDFSSTCYFTPIHIAKKIIPKEVDLNLDKSKNKLTGSFDTKTASFEGKQIKDLCIKLIVNRIGSIKPVRG

SEQ ID NO: 5687 - protein, 1078 aa, synthetic construct
  REGION 1..1078: note = Synthetic
MAVSVQFADIPERKRNKSQYEIFKTGSALASRDRCECCFDVDVTVEFLRNEDDYVCLFDWLNNRKDIKQDAFFKYPAFGLKKDAKNYRWNYVEDKVYPCNETRAVMLARLDQAKVSEDFLTREKEEALWHILYSIADKGELRKALFTFAVKQGLGPEFVEKFQTTPPFEKDYGSYSAKAIKKLLPLMRRGKYWSADAIDAQTRERMAKILSNECDDSIRSRVREKAIHLTDMSSFRGLPLWLACYVVYNRHSEAKDIRKWETPSDIDAYLAGFKQHSLHNPIVEQVILETLRTVRDIWKQVGHIDEIHLELGREMKNPKDKRAKMTRQMQENETTNLRIKSMLLEFMNPEFEMENVRPYSPGQQDLLRIYEESVLNSVENVPDDIREIISKLGESDLKKRPTTSEVLRYKLWLEQKYRSPYTGEVISLSKLFTPAYEIEHIIPQARYFDDSLSNKVICEAEVNKLKSNMLGHEFISKHYGEKVLLAGGKCVKIFSVSDYETFVKDNYARNPVKLKKLLMDDIPEQFIARQLNDSRYISKLVKSLLSNIVRKENEQEDVSKNLIVCTGGVTDRLKKDWGVNDVWNKLILPRFLRLNELTGTTDFTALNANSKMVPTVPLGLQKGFNRKRIDHRHHAMDAIVIACASRNIVNYLNNESASKNAKVTRLDLQRLLCDKQRIDDKGNYRWFIKKPWPTFTQDVSVALQNVIISFKQNLRVINKTTNYYQRYVDGKKKFVPQEKGDNWAIRKSMHTETFYGEVNLRDIKTVSLKEALKNPKAVVERDLKKKLQGLLSQNLNEKQIIAYFEANKDIWHDIDLKKIQVYYFTKETTKRYFASRQSLDTSFDEKKIREKVTDTGIRKILLRHLEANGNDANLAFSPEGIERLNENMQTLNDGKYHQPIYKVRVYEKADRFAVGQTGNKKSKFVEAAKGTNLFFAIYEMEKVDKETVEKTIKRIYETIPLNVVIERQKRGLSSVPEDKDGNPLRFVLSPNDLVYVPTREEIESGHIIYPLDRTRIYKMVSCTGSQCFFIQHSVANVIVDKCEFYSLNKMERSIMGEMIKEICIPIKVDRLGNLMQSL

SEQ ID NO: 5688 - protein, 1543 aa, synthetic construct
  REGION 1..1543: note = Synthetic
MSNKNILGLDLGTNSIGWAVVKCIDNEDTERKLIGLVDAGSRIIPMDAAMQSDFAKGNTVSQTKERTQYRSVRRIRERHLLRRDRLHRVLSLMGMLPRHYAQALTRYGKFKDDVECRLPWAEGSEGMPVFIFQQSYDEMLQIFWQEHPELMAKGMKVPYDWTLYYLRRKALHQAISGEELSWILLNFNQKRGYYQARGEEDDVDTSKEEKYYALKVVDVVDSGDKRGKDTWYNVFLENGLVYRRSAKEKPDWVGKVKDFIVTTQLNEDGTPKKGKDGEVKRSISMPKEENWGLLKIKTEDDIRSSGLSVGEYIFGALLRNPKQKIKGQLVRTIERTFYKEELRGILEKQREYIPQLRDAALYEACINELYPQNDAYRQSIASKGFTYLLLDNIIFYQRPLKSKKSMIDECPYEYHECLDVNGEKMKKYIKCIAKSHPLYQEFRLWQFVSNLRIYRCSIDDEDVTSQFLPDEESRACLFDWLNDRDSIKEEILLTKYFGLKKPKGKNVVLPYRWNYVRDKSYPCNETRGKILERLSKNGVDTSFLDVENKNEKNVEEGLWHILYSVNDPEQLRRALRTFAQKCVAKRCTLNQSANDEAMPDGDAAWINAFVDAMVKFPPFENGYGAYSAKAVKKLLSLMCMGHHWRADDIDEKTRSRIQKLIDGEFDESIRERVREKAIYLDRLEKFRGLPLWLACYVVYDRHSEASDLSRWQTPDDIDAYLKSFKQHSLRNPVVEQVVTETLRTVRDIWRKYGSIDEIHVELGRELKAPADQRAQMTERALQGENTNLRIKALLTEFLNPELGIENVRPFSPSQQELLRIYEDTALNSVSEPDDYVTEIITKFADAKKRPTLSEVKRYALWLEQHYVSPYTGETIPLARLFTTDYEIEHVIPQSRYFDDSLSNKVICEAEVNKLKGNALGFEFIKQHHGEKVILNGGRVVTILETDSYSDLVNNVYGKSNRAKMRKLFLEDIPAEFIERQMNDSRYISKMVTSLLSHIVREEGEEEAKSKHIVVCTGAVTDRLKRDWGVNDVWNRIILPRFERMNEITNTQKFTTISTSGHLIPAMPLELQRGFSKKRIDHRHHAMDAIVIACATRDHVNLLSNEAALPKNQANRYQLSRKLRRYEDVLVCREGRSRKISVAKEFLLPWPTFTTDVEHALRQILVSFKQNLRVITKATNHTLRIVNGKKISVPQTLGDSWAIRKSMHKETVFGEINLRRTKTFGLKQALQLPRRIVNRDLRGKIMQLLELKYTEKQIKAYFSENAEAWSDVNLKQIEMYYFTKETSDRFFATRKSIDTSFNRKAINEKVADTAIQKIMLRHLEQYAGDATLAFSPDGIDQMNSNILALNDGKYHQPIYKVRVYEKAEKFAIGQKGNKSRKFVEAAKGTNLFFAIYEQTAVDPATGLSVKKRSYRTIPLNEAILKMKQGVPLDSKASFILSPGDLVYVPTKEERQTGQMESPIDKERVYKMVSSGKGRVDFVPYSAASVIFSVSKENSSHYSGIQNEFGVGSSKSKNERALTGEMIKEVCLPIKVDRLGHLIEK

SEQ ID NO: 5689 - protein, 1438 aa, synthetic construct
  REGION 1..1438: note = Synthetic
MIKNILGLDLGTNSIGWALINQDFDKKEGEILGMGSRIIPMSQDILGEFGKGNSVSQTASRTGYRGVRRLRERFLLRRERLHRVLNLLQSLPSHYASQIDFEKRFGKFKEETEPKLVYDGNEFIFKNSFEEMLSDFKKHQPQLLENNKKVPYDWTIYYLRNKALTQKIEKEELAWVLLNFNQKRGYYQLRGEDFEEEKDKTFVRLKVEKVIDSGDNIKGKILYDVYFENGWKYDKQIVKTEDWIERVKEFIVTESFLKNGDIKRTFKAVDSKKDWIAIKTKTEQEIDNSQKTVGTYIYNALLQNPKQKINGKLVRTIERKFYKKELKKILETQKSFHSELQNDDLYNDCVQELYRNNEAHQLTLSKKDFVYLFMDDIIFYQRPLRSQKSSISNCTLEFRKYKDENGIEHTQFLKAIPKSNPYYQEFRVWQWMYNLNIYLRDDDSNVTTEFLNTTKDFENLFEFLNNRKEVDQKALLKHFKLNEKTHRWNYVEDKKYPCNETKVMISSRLDKVENISDDFLTREIEQKIWHIIYSVNDKVEYEKALKSFAGKNNLDENSFVEAFKKFPPFKSEYGSFSEKAIKKLLPLMRLGKYWNEDEILRYSDYYFKNIESLLSVLKQRNENISDDDRQNYNKTINNKLREELENFQNAEIESFQGLRLHIAQYILYGKHSEGDNKKFNSADDLEEFLKEFKQHSLRNPIVEQVITETLRVVKDIWLKYGSGAKDFFNEIHIELGRDMKLPAKEREQLTKQISENENTNLRIKSLLAEMTNDSSVENVRPYSPMQQEILKIYEDGILKSDIEIDDDILKISKTAQPSPSDLKRYKLWLEQKYKSPYTGQIIPLNKLFTPEYEIEHIIPQSRYFDDSFSNKIICESAVNKLKDNYIGLGFIKQFGGTIIELGFGKSVKVFEAEEYEDFVKKHYANNRGKRNKLLLEEIPEKMIERQLNDTRHISKYISGILSNIVRVEDGSDEGVNSKNIVPVSGKITTQLKQDWGLNDVWNDLILPRFERMNQLTNSTNFTAWNGNHQKFLPTVPIEFSKGFSKKRIDHRHHAMDALVIACATKDHVSLLNNQSAKSDSKRYNLRKKLIKFEKVVYNHPQTGDRIEREVPKQFLKPWDTFTADAKNNLDRIIVSFKQNLRVINKATNYYEKYVEKDGVKTKEKVEQTGINWAIRKPMHKETVSGKVDLPRINVPKGKILTATRKSLDTSFDLKSINSITDTGIQKILKNYLEFKGNSELAFSPEGIEDLNNNIEKYNDGKAHQPINKVRVFELGSKFQVGQTGNKKDKYVEAAKGTNLFFAVYEDKNGKRSYETIPLNIVVERQKQGLNSVPEVNELGSILKFHLSPNDLVYVPSNENEPDRNDYNNLNKQQINNLYKMVSSSTYQCFFIRNDVSTSIVNKIEFSSLNKMEKSIEGVMIKESCVKLKIDRLGNISKA

SEQ ID NO: 5690 - protein, 1485 aa, synthetic construct
  REGION 1..1485: note = Synthetic
MKKILGLDLGTNSIGWALIDRDANKILGMGSRIIPMSQDVLGNFDKGNSISQTAERTGFRGIRRLRERHLLRRERLHRVLHVLGFLPEHYEQHIDFEKRLGQFANETEPKLAYNNCDFIFKESFEEMAADFKQQNPSLFYIKANGKETKIPYDWTIYYLRKKALTQKIEKEELAWIILNFNQKRGYYQLRGEEEEENPNKLVEFHSLKIVEVEADEKPNAKGETWYYLKLENGWVYRRSSKNPLFDWKDKVRNFIVTTNLNNDGTVKIDKEGNESRSFRAPSDDDWTLLKKKTEAEIEHSQKTVGTYIYENLLSNPNQKIRGKLVRTIERKFYKDELIAILKKQIELQPELFSEDLLNDCVRDLYRNNEAHQFVLSKKDFVHLFVNDIIFYQRPLRSQKSSISNCSLEFRKYKDKDENEVKEYLKAIPKSHPLYQEFRLWQWLFNLKIYRKDDDTDVTSQFIASIEDLENLFDFLNNRKEIDQKALLKYFKLTEKTHRWNFVEDKAYPCNETGTQIRTRLAKVEGLPADFLTSGTEQNLWHIIYSVTDKKEYEQALSSFAKKHKIDEDSFVENFKKFPPFKSEYGTYSEKAIKKLLPLMRLGKYWNWDAIDVKTKSRIEKILTGEYDEEIKDRVREKAINLTCENDFQGLQLWLAQYVVYDRHSEASDIILWKTPQDIDDYLKEFRQHSLRNPIVEQVVTETLRVVRDVWKKYGDISEIHIELGREMKKTAKEREQLTSQITKNENTNIRIKALLMELKENTDGKLNVDNVRPYSPIQQELLKIYEDGVINSDIEIPDDILKISKTAQPTSSELQRYKLWLEQKYRSPYTGQFIPLGKLFTSEYEIEHIIPQSRYFDDSFSNKVICEAAVNRLKDNQLGLEFIKEHHGEKVQLGLGQAVEIFSVEDYQSFVKEYYANSRSKRTKLLLEDIPESFIERQMNDTRYISKTVKGLLSNVVREEGEQEANIVICSGNITSILKRDWGLDAIWNSLIISRFERMNQLTNSTAFTAWNEQYQKFLPTIPLEFSKGFQKKRIDHRHHAMDALVIACVTKNHVNLLNNQSAKSDVKRYDLQRKLRLFEKVSYFDKKAGKQVEREIPKAFLKPWDNFTTDARKELEKIVVSFKQNLRVINKTTNKHQAYENGKKVLKSQIKGDSWAIRKPLHKDTVFAKVSLQKIKKVRLIEALKNVESIVNKEFRNEIRKISAAYGKFDPDKINKYFKDRKYLYEKTDISKVEVYYYETENAAVRKSLDTSFTEKVIKESVTDSGIRKILLNYLAAKDNKPELAFSPEGIEEMNQNIAAFNDGKPHQPIRKIRMYETIGNKFQVGYTGNKKAKYVEAAKGTNLFFAIYADDKGNRSFETIALNVVVERLKQGLIAVPERNDKGHELLFHLSPNDLVYVPTEEELISGSKFPSEDIKIDRIYKMVSSTGNQCFFILQNVAISIVNKVEFSSLNKMERCITGEMIKDVCIKLNIDRLGNIKPLLP

SEQ ID NO: 5691 - protein, 1517 aa, synthetic construct
  REGION 1..1517: note = Synthetic
IMNILGLDLGTNSIGWALVEQNFEEKTGQIINAGSRIIPMSQDILGKFDSGVSISQTAERTGFRGVRRLRERHLLRRERLHRVLNILGYLPVHYATQIDFEKRFGQFVPEKEPKLPYVFNSETSKSEFLFKDSFDEMTNDFKLHQPQLFEEVKKNGETKKIPYDWTIYYLRKKALTKKIEKEELAWLLLNFNQKRGYYQLRGEDGEENPNKLVEFYALRVTKVEATEDKKTKDEIWYNVVLENGWIYRRTSKTPLDWVGIIKEFIVTTDLNDDGKIKLDKDGKEKRSFRAPAPEDWTLLKKKTEFDIGKSGKTVGTYIYDTLLKNLNQKIKGKLVTVIERKFYKAELETILKTQKEFHTELQDGKLYADCLEELYEYNEAHRTNIGKKDFTHLFLNDIIFYQRPLKSKKSLISDCKFESRTFVKEGKTETEPIKCIAKSHPLFQELRLWKLVQDLRIIQKEKLIDGKFYTDVNVTNEHFKTVDDHTALFEWLNNRKEIDQKAFLKYFKLSDIKFRWNYVEDKIYPCNETRSQILSRLAKIENVPHGFLNTVKEEALWHILYSVEDKNEIQRALKTFATKNGLGEDFVEQFAKFPPFKKEYGSYSVKAIKKLLPLMRMGKYWNENTIHPLTTKRIDKILSGEFDDKIRTRVREKAINLQDINDFQGLPEWLVSYIVYDRSSEDGNALVWKKPEDIDYYLRYIFKQHELRNPIVEQVITETLRVVKDIWTQHGNGTEKFFNEIHIELGREMKNPADKRRQMTEQINENENTNLRIKALLMEMMNDREFENTVRPYSPSQQEILKIYEEGALNASNDIPEDILKIAKQAQPSSSDLTKYKLWLQQKYKSPYTGRVIPLNKLFTSAYEIEHIIPQSRYFDDSFSNKVICEAAVNKDKDNSLAMEYILNEGGKVLEIGFGESVTILQKDDYEQFVKTHYYKSKMKKLLMEEIPQSFIERQLNDTRYISKVVKNLMSNIVREEGEQETISKNVIASNGSITSTLKQDWGLNDIWNDIITPRFERLNHLTNTTNFGSVNPNTNKFLPQVPIELQKGFSKKRIDHRHHALDAIVIACATRSHINYLNNESALGKGKEEVKEKKRYDLRHKLCTKKYNDASKQHYKWAFNKPWDTFTQDTRGSLYSIVVSFKQNIRVINKTVNLYQKWKENGDGKMVKELVKQTKGDSWAVRKPMHKDTVSGSVKLRNKKTVNLSLAIDEWESIADNPELRKQIKELVGLKYDKKLLLKYFKDRGNKWDGKDISKVNIFYWETDNVASRVKLDESFSSSKIESITDSGIKKILSRHLEKYHEHKNDKVTEHPELAFGPDGIDELNKNIAQLNGGKPHQPIHKVRTYEPKGNKFAVGETGNKKDKYVEAAKGTNLFFAIYQDEKGKSNYDTIPLNIVIERQKQGLFSVPEKNEAGDFLILYLSPNDLVYVPGNGENINTINFTNLNKEQKGRIYKFVSCTGNEGHFVPNNYSKEIVKNEMGTNNKSQNAIDGTQIKSVCTKLKTDRLGNVKPYFKAS

SEQ ID NO: 5692 - protein, 1431 aa, synthetic construct
  REGION 1..1431: note = Synthetic
MAKNILGLDLGTNSIGWALIKQDFQNKQGEILGMGSRIIPMSQDILGDFGKGNKVSQTAARTGYRGVRRLRERFLLRRERLHRVLNVLNFLPDHYASQIDFEKRFGKFKEETEPKLVYDGKEFIFKKSFEEMLTDFRKHHPQLLENDKKIPYDWTIYYLRNKALSHKIKKEELAWILLNFNQKRGYYQLRGEEEEENPNKLVEFYSLKIVDVLADEPQKGEPDIWYSLVLENGWIYRRSSKMPLFDWKDKTRDFIVTTDLNDDGSIKTDRDGNEKRSFRAPSENDWTLVKKKTEQQIDQSHKTVGTYIYETLLQNPKQKIKGKLVSAIERKFYKEELKQILEKQKEYHQELQNDDLYSDCVRELYRNNEAHQLTLSKKDFVHLFMEDIIFYQRPLRSQKSSISNCTLEFRKYKDENEVEHTQYLKAIPKSNPYYQEFRIWQWIYNLNIYKKDNDNNVTNEFLNTTKDFENLFEFLNNRKEVEQKPLLKFLLEQKDFKGKLLNIEAEKYRWNFVEDKKYPCNETKTMISSRLEKVKNISDDFLTREIEQKIWHIIYSVNDKIEYEKALKSFARKNNLDENSFFEAFKKFPPFKSEYGSFSEKAIKKLLPLMRLGRYWNYADIDKYSKDRIQKIITGEYDENIKDKVREKAIHLTTENDFQGLQLWLAQYIIYGRHAEASITGKWNSAEDLEVFLKEFKQHSLRNPIVEQVITETLRVVKDIWMKYGNGAKDFFSEIHIELGREMKLPADDRKKLTNQISENENTNLRIKALLAEMMNDQSVENVRPFSPMQQEILKIYEDGILKSDIEIEDDILKISKTAQPSSSDLKRYKLWLEQKYKSPYTGQIIPLNKLFTAEYEIEHIIPQSRYFDDSFSNKIICESAVNKLKDNYIGLGFIKQFGGTIIELGFGKSVTVLKEKEYEDFVKKHYANNRGKRNKLLLEEIPEKMIERQLNDTRHISKYISGVLSNIVRVEDGTDEGVNSKNIVPGNGKITTTLKQDWGLNDVWNELILPRFERMNQLTNSTDFTAWNENHQKFLPTVPIEFSKGFSKKRIDHRHHALDALVIACATKDHVNLLNNQSAKSDTKRYDLQHKLRHTEKWIDKEGKERDKFTAFKKPWEHFTVEAKNSLDKIVVSFKQNLRVINKATNYYEKYVEKEGLKTKERVEQHGTNWAIRKPMHKDTVSGKVDLPWVKVPKGKILTATRKALDTSFDLKTINAITDTGIQKILKNYLEFKGSSELAFSPEGIEDLNKNIEKYNDGNPHQPINKVRVFELGSKFQVGQTGNKKNKYVEAAKGTNLFFAVYEDKNGKRSYETIPLNEVVERQKQGLSVVDLKGANDFYLCPNDLVYIPSGDELDNINNIDFKNPTKENNERIYKVVSFTGNRLSCIPYTVATTIVNKLEYTQLNKIEFTKEKEIIIKLNMDRLGNISKA

SEQ ID NO: 5693 - protein, 1473 aa, synthetic construct
  REGION 1..1473: note = Synthetic
MKKILGLDLGTNSIGWALIQQDFDAKKGEILGMGSRIIPMTQDVLDIFSGGKPLETQTAARTSYRSVRRLRERHLLRRERLHRVLNVLDFLPEHYARAVDFTQHYGQFVAESEPKLTYHNRNFIFKSSFEEMLNDFKQSQPQLFYTKPNGEETKIPYDWTIYYLRKKALSQKIAKEELAWIVLNFNQKRGYYQLRGEEETENPNKLVEFHSLKIVDVVADEKPNSKGDLWYSLYLENGWIYRRSSKTSLFDWKDKIRDFIVTTDLNDNGTIKTDKEGNERRSFRAPSEDDWTLLKKKTEQEINKLDKTVGVYIYENLLQNPSQKIRGKLVRTIERKFYKDELIAILKKQIELQPELFTEDLYNDCVRELYRNNEAQQLSLSKRDFVHLLVEDIIFYQRPLRSQKSSIGNCTLEKHPTKDKNGNIIRDEKGKPVLVPLKVIPKSHPLYQEFRVWQWLSNLKIYHKEDDIDVTTQFIKTNEDKVALFEFLMMQKEVGHKDILKHLLLPILKEQYPSAKAAAFNKEVDKEIAKYRWNYVFDDSKEKEEDKSKKYPCNSTGYEIRRRLEKVANVPDDFLTPGIEQHLWHIIYSVTDKKEYLSALGKFADKNSLDKESFVANFEKFPPFKSEYGAFSEKAIKRFLPLLRVGKYWDWEAIDVKTQDRIGKILTSECDENIKERVREKAISLNDESHFQGLPIWLASYVIYDRHSEADIAGKWDSIADLEKYLEDFKQHSLRNPIVEQIVTETLRVVRDIWKQYGHGAKDFFNEIHVELGRDMKNTSEERQRLTNIVSGNEATNLRIKALLMELKDNSDGKLLVDNVRPYSSIQQDTLRLYEDGVLNSKIDLPDDIVKISKTAQPSKTELQRYKLWLEQKYRSPYTGQMIPLGRLFTEDYQIEHVIPKSRYFDDSFNNKIICEAAVNQLKDKQLGFEFIKNHHGEKVECGMGKVVEILSEEAYQSFVKEHYAKSKVKRQNLLLEDIPEQMITRQLNDTRYISKFISSLLSNIVREDKEDDGINSKNLIPGNGKITTVLKKDWGLDAVWNDLILPRFQRMNQLTNSEAFTYWNEQYQKFLPVDYSPTDSKRIEKKRIDHRHHAMDALVIACMTRDHVNLLNNQSAKSETSRYDLQNKLRTKSKETWIDRKTHEQVERDVFKEFKKPWDSFTVDARNSLETIVVSFKQNLRVINKATNNYEKWIEKDGRKVKAKVKQEGTNWAIRKPMHKETVSGKVDLTSVKVSKGKILTATRKSVDNTFDLKTIDAITDTGIQKILKSYLAYKGNNPEIAFSPEGLEEMNANVKQYNDGKSHQPIRKVRIFELGSKFSLGETGNKKDKFVEAAKGTNLYFAIYESKDGKRSYDSIPLNIVIERLKQSLPPVELKGEKDFYLTPNDLVYVPNEDEKINIKNLNPREFGEEQRKNIYKVVSFTGNRLSCIPHSVATPIVNKLEYTQLNKIEFTKEKESIVKLKVDRLGNISL

SEQ ID NO: 5694 - protein, 1488 aa, synthetic construct
  REGION 1..1488: note = Synthetic
MKKILGLDLGTNSIGWALVDKDAQKILGMGSRIIPMSQDVLGNFDKGNSVSQTAERTGFRGTRRLRERHLLRRERLHRILHILGFLPEHYKKYIDFEKRLGQFVNETEPKLAYNNCDFLFKKSFEEMVADFRQQNPSMFYTKSNGKETKIPYDWTIYYLRKKALTQKIEKEELAWIILNFNQKRGYYQLRGEEEEENPNKLVEFHSLKIIEVEADEKPNSKGDTWYSLQLENGWIYRRSSKNPLFDWKDKIRDFIVTTDLNDDGTVKIDKEGNERRSFRAPSEDDWTLLKKKTEAEIEYSRKTVGTYIYENLLSNPNQKIRGKLVRTIERKFYKEELIAILKKQIELQPELFSDDLYNDCVRELYRSNEAHQFILSKKDFVHLFINDIIFYQRPLKSQKSSISNCSLEFRKYKDKDGNEVKEYLKAIPKSHPLYQEFRLWQWIYNLKIYRKDVDSDLTSQFITSVNDQKNLFDFLNSRKEIDQKALLKYFKLSEKTHRWNFVEDKTYPCNETGAQIKTRLAKVEKLPADFLTAQTELGLWHIIYSVTDKKEYEQALSSFARKYYLNETSFVENFKKFPPFKSEYGTYSEKAIKKLLPLMRLGEYWNWDAIDIKTKGRIDKILTGEYDTDIKDRVREKAINLIYENDFQGLQLWLAQYIVYDRHSEANDAVYWKTPQDIDNYLKEFKQHSLRNPIVEQVITETLRVVRDIWKKFGDISEIHIELGREMKKTAKERERLTSQMTENENTNLRIKALLIELKENSDGKLNVDNVRPYSPVQQELLKIYEDGIINSDIEVPDDILKISKTAQPTSSELQRYKLWLEQKYRSPYTGQFIPLGKLFTPEYEIEHIIPQSRYFDDSFSNKVICEAAVNRLKDNQLGLEFIKEHHGEKVQLGLGQVVEIFSEEDYQSFVKENYASSRSKRTKLLLEDIPESFTDRQMNDTRYISKAVKGLLSNVVREEGEQEVTSKNIVVCTGNVTTILKRDWGLDAVWNSLIISRFERMNQLTNSTAFTSWNEQYQKFLPTVPLKLSKGFQKKRIDHRHHAMDALAIACATRDHVNLLNNQYAKSETSRYDLQRKLRLFEPISYFDKKANKQVERKIPKEFIKPWDSFTTDARNELEKIVVSFKQNLRVINKTINKYQTYENGKKILKSQAKGDSWAIRKPLHKDTVFAKVSLQKIKKVKLSEALKNLESIVDKEFRNEIRKISATYGKFEPDKIDKHFKDRKYLYGKTDVSKVEIYYFETENAAVRKSLDISFTEKFIKESVADSGIQKIFLNYLVTKDNKPELAFSPEGIEEMNQNITAFNDGKSHQPIRKVRVYETIGNKFQVGYTGNKKAKYVEAAKGTNLFFAVYADDKGNRSYETVALNVVVERLKQGLSTVPERNEKGHVLLFHLSPNDLVYVPTEEELVSGIKWNIEDIKVDRIYKMVSSTGNQCFFICQNVANPIVNKVEFSPLNKMERGITGEMIKEICVKLNIDRLGNINLLMP

SEQ ID NO: 5695 - protein, 1495 aa, synthetic construct
  REGION 1..1495: note = Synthetic
MKRILGLDLGTNSIGWAVVEEESHKILKAGSRIIPMDAATLGDFQKGNLKSPASTRTDFRGTRRLYERAVLRRERLLRVLNVLDFLPEHFKKQIDFENHPGKFLHHGEPLLPYRKTANGKNEFIFKDSFNEMIADFMINQPELLMDGKKVPYDWTIYYLRKKALSKPIQREELAWIILNFNTKRGYYQLRGQEEETQTADNEEYKVLRVTNVEKMDEDKKRKGIFWYTITYENGATQRKSGKVAPRSIGDMVEVIVKTSYDKDGKIKTDKEGNPQINISTPQSDEWKLLKKKSENAIKESNKTVGTYIYDELLSKPDTKIRGKLIRVIDRPFYKDELIRILEKQAEFIPELRDRELYEKCVRELYQQNESHVQSVLNKDFTSLFVEDIIFYQRPLKSKKSEIADCPYECYHFIDKETGEKKEKRIKCIPKSHPLFQEFRLWQFIQNLRIYKKEKEINGKLKTDVDVTSEFISSPEDIVALYEWLNEKEKIEQKDFLKYKPFNLGKNTDGYRWNYVEDKSYPCNETHYKIAKRLSKVNGQPLLSNEQESALWHILYSVDDLIELKKALKSFAKKNGIDENSFVDEFYHIEPFDNAYGSYSEKAIRKLLPLMRIGKYWKKENLSAKTQKRINNIIDGIADDSISKRVREKAIHLTDISSFQYLPLWLACYIVYDRHSESTDTGKWKSPEDIDNYLQENFKQHSLRNPIVETVLGETMRVVRDIWRKYGDISEIHVEMGRDLKKSNKERADETQRILNNERRNYRIRLLLQEFVNPEYNIEGVRPHSPSQQEILKIYEENALSNIGNEEEDNNIQLIADNLGNSSKYVSKTDIMRYRLWLEQKYKSPYTGQIIPLSKLFTTAYEIEHVIPQSRYFDDSLSNKVICESEVNKLKDRMLGYEFITKHAGEIIQGNLGTQIKIFDKVQYEEFVKLHYANNRGKMRKLLMEDIPDKFIERQMNDSRYIARKTIEILSHLVREENETEATSKNVIATNGSITDKLKKEWGINDVWNEIIAPRFQRLNQLTETQDYGKWVDKNGKRYFQTDTPLEISQGFNKKRIDHRHHAMDAIVIACTSRDHVNYLNNQAALSSEKDKRHDLQHKLCTKIKTDDKGNYIWRFNKPWETFTQDVRTELNSIIVSFKQNLRIINKMTNFYWHYEDGKKVLARQEKGDGWAIRKSLHKATVSGAVRIQIKKTVRLSEALENWHMITNKELRQEIKRIIKLYNNHFDKKTILKYLKDRGNKVGKKDISKVEVYYTPPVADLSATRVALDTSFDKKKIESITDTGIQKILLRHLENNANDPKIAFTPEGIANMNSHIKELNDGKEHKPILKVRKTESLGLKFPVGEVGCKRHKFVEADKGTNLFFAIYIDEERKRYFESIPFNIAVERLKVGESVAPNTDEAGHKLLFVLSPGDLVYVPEEGEHVDDIHNANKIYKMVSASGKQCFFVPYAVASTIQSPLELGPNNKAEKSWEDLMIKSVCLKLHVNRLGIITKIYQ

SEQ ID NO: 5696 - protein, 1202 aa, synthetic construct
  REGION 1..1202: note = Synthetic
MKKILGLDLGTNSIGWAVVNADEIVRENETSYLQPKSISSAGSRIIPMDEGVLGDFDRGNTKSQTKGRTDFRSARRLLERYLLRRERLLRVLKLMGFLPEHFANQIDEFGKFVDYDEPKLAWRKGLNGKYEFVFKDSFEEMLKEFATSQPQLVSDGKKVPYDWTVYYLRKKALAQRITKEELAWILLQFNQKRGYYQLRGEEEEEQHDRLVEFLAQKVIKVEATGEKKGDDVWYNVYLENGMVYRRTSRFPLDWEGKIKEFIVTTELEKDGSPKIDKEGKVKRSFRAPKEDDWTLLKKKTELDIDNSNMTVGCYIYASLLKNPDQKIIGKLVRTVDRKYYKEELKQILEVQKELIHELQDTALYQACIEALYPNNEAHRNNITKPDFINLFINDILFYQRPLKSKKSLISDCPYESHYDKDGTPHPVKCIAKSNPLFQEIRLWQFVQNLKIYQREKMVSGGQLDLFGNELAGKLQTDVDVTSEFLKSEDDFVQLFEWLNERASIKQDTLLNSYFKIKKEKGKDQYPYRWNYVEEKEYPCNETRAVILSGLSKCDVSSDFLTHEQEMGLWHLLYSIDDKNEIVKALKKYAEKNDLPDTFVEVFAKIKPFKKDYGSYSEKAIKKLLPLMRMGKYWSADTIDSKTKERVEKIITGEYDENIKNRVREKAINLTDITHFKGLPIWLACYIVYCRHSEAKEIVKWETPEDIDAYLKQFKQHSLRNPIVEQVLTETLRTVRDIWKQEGQIDEIHLELGREMKNPADKRKKMTESILQNENTNLRIKAMLAEFMDPDMGIENVRPYSPSQQDILRIYEENALDNLSKDDKDFDFISKMSKTANPSKSDILRYKCWLEQKYRSPYTGEVIPLSKLFTPLYEIEHIIPQSRYFDDSFSNKVICEAEVNKLKDRLLGYEFVKSNAGRIVQISQGKTVKVFTVEEYEKFVKEHYSSNRMKMKKLLMDDIPDGFIERQLNDSRYISKWVKGLLSNIVREKLENGEYEQEAVSKNLISCNGSITDKLKKDWGMNDVWNSIILPRFQRLNELTGRQCFTAYNAEGHEIPNMPLELQKGFNKKRIDHRHHAMDAIVIACATRDHVNLLNNEAAHSKHNANRYQLQRKLRRFEKIIIDGKEKEIAKEFLKPWDTFTTDAKQVLENIIVSFKQNLRVINKATNHYQHYDDEGKKTMRKQEKGDSWAIRKSMHKDRKDCK

SEQ ID NO: 5697 - protein, 1535 aa, synthetic construct
  REGION 1..1535: note = Synthetic
MKKILGLDLGTNSIGWALTNNDFENKMGNIEGLGSSIIPMSQDVLGKFDSGVSISQTAERTKYRGTRRLVQRFLLRRERLHRVLNILDFLPQHYAEAIDFEKKFGQFKPEKEEKLSFYKNESGKNQFLFLESHQEMLAEFQLTNPDLKQVPYDWTIYYLRKKALTQKIYKEELAWIVLNFNQKRGYYQLRGEEIDSDKNITFETLKIERVEDSGSKIKGTEDALFDIYFENGWKYDKQTTKPQDWLGKIREFIVSTSILSNGESKRTYKKVDSEKDWIAIKSKTEQTINQSEKSVGTFIYDALLKNPNQKIKGELVRTIERKFYKDELSKILKAQIAFHNEIFGDRNLYTKCIDELYKHNDSHKNNIKDKSFEYLFLEDIILYQRPLKSKTSLISDCSLEFVPIKDKKGALVKDSNGNQVVKPLKCIAKSNPIFQEFRLLQFVKNLKIYRKEIVNDVDVTHDYLKTEEDLVELFNFLNDRKEIDQISFIKHLLKPLKLKGKLLDAEVAKYRWNFVEDKIYPCNETRNQFLNAVAKIDLDKSFFDAKNTQDLWHILYSVTDKIEITKAITTFAKRHNLSDEFITNFSKLKPYKKDYGSFSEKAIKKLLPLMRFGSYWDEKNIDAKTLARIDKIQTGEFDENMRTRVREKAIHLSKTNDFQGLPLWLASYIIYDRHSEASDVSKWKTPADIAWFLNPKNKSGFKQHSLRNPIVEQVITETLRVVKDIWQNYGEGKENFFNEIHIELGREMKNDKATRERMTKKISENENTNLRIKAILTELKNDGVDDIRPYSPSQQEILKIYEEGVYSNEIKKEKLEEIDKIRKNAKPTSSEIIKYKLWLEQGYISPYTGKLIPLSDLFTTKYQIEHIIPQSRLFDDSLSNKVICESEVNELKGNMTAYEFIKSDKPRIIPKNNGGSIKIFTTFEYEQHITAYYNKNKNKQKRLLSEEIPEKFIERQLNDTKYISKIIKNLLSKIVREDDEQEVTSKHIVSLNGSITSRMKQDWGLNDVWNNIITPRFERLNALTNSSDFGKIELKKDEFGNKGKQVFQTTVPDALAKGFTKKRIDHRHHALDALVIACVTKDHINYLNSINSERTNYSLVSKLRRTEEIVINKKRQKIAKEFHKPWDNFTKKAEDQLDRTIISFKQNTRVINKTVNKYQAWKEEDGAMKKVTLKQTKGDNWAIRKPMHAETVSGKVFLKRIKQSHITIANAIEQIELIVDKEVKKQLTEKIKQYPNNLVGLKKHIKAFPVMIDGKAIDKVQIYETIEATATRKTLDNSFDEKKIEKITDTGIQKILLNHLKQEMYQNAMDENGKKIPTHEIAFSENGLDELNKNITVLNNGKNHQPIKKVRVFEEGGKFSLGNTGNKTTKYVEAAKGTNLFFAIYQDEKGKRNYKTIPFNEVIERQKQGLSAALETDENINRLLFTLSPNDLVYIPTNEEKENLTTVNFDKLSKEQTERIYKFVSCTGGEGHFVSNNYSKEIISNENGSNNKNERMLDFKNSNTIYDEKEKPIMIKSVCWKLEIDRLGKIKKIIR

SEQ ID NO: 5698 - protein, 1501 aa, synthetic construct
  REGION 1..1501: note = Synthetic
MKRILGLDLGTNSIGWAVVNATPKKDEREKIHGIEALGCRIIPMDAAILGDFDRGNSISQTAERTRLRGIRHLVERHLLRRERLHRVLDILGFIPPHYAQELDRYGKILKDKEPKLPWRKNESGQYEFIFQESFNEMLEDFRKNYPELAANQRKVPYDWTLYYLRKKALKEKITKEELAWILLNFNQKRGYYQLRGEEEEENESKKVEFYALKVVAVEDTGKVKGKEHWYNVRLENGWIYSRTSELPLDWVGQTKEFIVTTDLETDGTPKKDKEGNVKRSFRAPKEDDWNLIKKKAEKDIEQTGNTVGTYIYDTILQNPTQKVRGGLVRTIERKYYKEELELILNKQCEFHPELQDSELYATCVEALYATNEAHRNNIANRDFTYLFLNDILFYQRPLKSKKSQISNCPYEENSCIDPATGEIKHFPVKCITKSHPLFQEFRLWQFFSNLRIYKREDAEDVDVTHELLKTEDDYIALFEWLNDRKEIDQKAFLKYPAFGLKKNAVFYRWNYVEDKSYPCNETRTSILSRLEKSGIPKEFLTRENEEALWHILYSVEDKQEIAKALNSFATKHGLKEDFVTVFQKMPPFKKEYASYSAKAIKKLLPLMRIGKYWSEDAIDASTRNRIENILTGEFDESIKYRVREKAINLTDISDFKGLPVWLACYIVYNRHSEAKDIRKWKSPDDIDAYLSSFKQHSLRNPIVEQVITETLRTVRDIWKQVGTIDEIHVELGREMKNPANKRAKMTQQALENENANLRIKYLLTEFMNPEFEIENVRPHSPSQQDILRIYERGVLDSVSELPDEIGNILKKFNERDEKKRPTKSEVLRYKLWLEQKYCSPYTGNVIPLGKLFTSAYEIEHVIPQSRYFDDSFNNKVICEAEVNKLKGNLLGHEFIEKYHGQIVLGGKGKIFSVTEYEKFVKDHYYSHANKKMKRLLMNDIPETFIARQLNDSRYISKVIKTLLSNIVREEEEEEAISKNVITCTGEITNRLKNDWGANNVWNKIILPRFRRLNKLTGKNNFITTNAESHEIPVVPLKMQKGFNKKRIDHRHHILDAILIACSNRNIVNYLNNESASDKAKISRYDLQKLLCDKKDTDDKGNYKWVVKKPWDSFNQDVFTALESVVVSFKQNLRVINKATNRYLHYNEEGKKEYVKQVKGDNWAIRKPMHKDTVFGEVNLRKIKEVSLSEAIKSPQSIVSKRFKKKLLSLLDEGADIKKIKKYFEENKDTWHDIKLSKIKVYYFTKDTNERFFATRKPLDTSFDKKKIENSVTDSGIQQILLRHLELKDNNPDIAFSPDGIDEMNRNLIQLNNGKKHQPIIKVRVYEKADKFPVGETGNKSSKFVEAAKGTNLFFAIYESETVDEKTNAITKKRTYATIPLNVAIERQKQGLPAAPEDENGNKPIFVLSPNDLVYLPTKDELANGIIAQPIDKNRIYKMVSSSGHQCFFIKHTVAAPIFDKFEFSVMNKMERALTNEMIKEICVPLKVNRLGSILRIGNLDV

SEQ ID NO: 5699 - protein, 1285 aa, synthetic construct
  REGION 1..1285: note = Synthetic
MVYHRLASEAPDWVGKVKDFIVTTNLNEDGTPKTDKDGHIKRLISMPKETDWGLIKIKTENDIRTSGLSVGEYIFNALLHNPKQKIKGQLVRTIERDFYKEELRQILNKQKEFIPQLCDANLYADCINELYSQNEAFRHSIATKDFTYLLLDNIIFYQRPLKSKKSTIAECPYEYHECLDTNGVRVKKYVKCISKSQPLYQEFRLWQFVGNLCIYKSGYDQEGRLVDSIDVTSDFLPDEESRAQLFDWLNDRPSIKADEMFKRYFGIGKLGSKTVGMSYSWNYVRDKAYPCNETRGGILVSLSKAGVDTSFLNDKVLEHQLWHILYSVSDRTELRTALGRFANKHALGSAFVEVMTKYPPFEADYGAYSAKAIKRLLPLMRMGHHWCANNIDSGTKERIQKIIDGEVDETISKRTREKALTLDSIDHFRALPLWLACYVVYNRHSESGDIRKWHSPNDIDDYLAHFKQHSLRNPVVEQVVTETLRVVRDVWRAQGHIDEIHVELGRDMKASADKRAQMTERALRNEMANLRVKALLAELKNPEFGIQNVRPYSPSQQELLRIYEDTALNSVGEPDDYIREILKKFSDAKNAPTTSDIKRYILWLEQHYISPYTGQHIPLSRLFTTDYEIEHVIPQSRYFDDSMTNKVICEAEVNKLKSNALGYEFIKQHHGQRVVLNGGRIVSVLEPDSYCELVQKMYGKNNRAKLRKLLLDELPAEFIERQMNDSRYISKLVKTLLSNIVRDEDEQEATSKHVIVCTGAVTDRLKREWGVNDVWNRLILPRFQRMNSLTNSSKFTAISATGHLIPAMPLELQKGFNKKRIDHRHHAMDAIIIACATRNHVNLLSNEAALPKNQSTRHQLSHKLRRYETIVVNRDGKLQQLSVAREFLLPWATFPADVEHVLSQIIVSFKQNLRVVNKTSNHALRIVNGRKQLVPQTSGDCWAIRKSMHKETVFGEINLKRQKAFALKEALLRPQRIVNRDLRAKIIELLSKHYTEKQIKVYFANNADAWQDVNIKKVEMYYFTSETADRYFATRKSIDTTFDRKCIKEKVADTAIQKIMLRHLERYADNPKLAFSPDGIDEMNRHIVVLNNGKHHQPIYKVRVYEKADKFAVGQTGNKRFKFVEAAKGTNLFFAIYENEVINKQTGHLVRKRTYRTIPLNEAIGKLKQRLPLDSQAAFILSPNDLVYVPTEEERITGKVNKPLDKSRVYKLVSISGSVADFVPCSAASIIFSVSKIESANYSGVQNEFGLGSPKSKNERATTNEMIKEVCIPIKVDRLGHIVEN

SEQ ID NO: 5700 - protein, 1521 aa, synthetic construct
  REGION 1..1521: note = Synthetic
MKRILGLDLGSNSIGWAFVQKDFENKQGKIIAAGSRIIPIDQKMLSNFEEGTTVSQTAERTTYRSMRRLRERHLLRRERLHRVLHILGFLPPHYDSQIDFSKRYGKFIDDAEPKIAYNKGNFIFMDSFNEMIEDFKKHQPQLFYKKSNGEESKIPYDWTIYYLRKKALSQKITQQELAWLILHFNQKRGYYQLRGEEETEGNDMEIISSKVLSVIKKNKDKKYDKYWYDITLENGLVYKAAFYNDLVYSWIGQEREFVVKRTLLKNGDEKIELSYLPTFDEIAKMDKKQQDKFYQKIKVKTESSIGNKTVGTYIYDHLLQNPNQKIKGKLVRTIERKYYKDELKAILAKQIALQPEFFTENLLADCIRELYRKNQTQQQNLLSKDFLHLFVEDIIFYQRPLRSKKSTIANCPLEKRSYIDKETNERKDVPIKVCAKSNPYYQEFRVLQWLQNLRIYEIETDREVTAEFIETAQDYEALFNFLMSQKEIDNEGLLKYFLLAKNPQIKDKVAKSELKKWLTTYRWNYVYDAADNSSKKYPMNETGYDLQRYLQKVERLPANFLTFDTAYQLWHLLYSVKDKVEFEKALKKFAQKYQLDEASFVDSFKNFKPYPNEYGSFSEKAIKKMLPLMRFSNYWNFKNIDVHTQKRIDDLINGVANEDIRTIIREKAEKYQLNSETCFQGLPLWLAQYIVYNRHAEATNIEKWTSVSDLEAYLEDFKQHSLRNPIVEQVVTETLRVVRDIWQQYGGGQANFFDEIHIELGRELKNTSKERERLSKQNQENENTNLRIKKLLAELKEDANIQNVRPYSLVQQELLKIYEEGVFSSTDEIEEDIQKIRKKAEPTTPEIQRYKLWLEQKYKSPYTGEVISLTKLFTEEYEIEHIIPQSRYYDDSLSNKVICESAVNKLKTNQLGLEFIQNHHGEKVRIAGNKEVTIFTEEQYKEFVKKYYANNLPKQQKLLLNDIPEKMVARQMNDTRYISKYVSEILSKIVRSDEKDEGVNSKNIIPCTGKITTALKQDWGLNDVWNELILPRFERMNQLTQTQLFTSYNDRLQKNLPTVPIEYSQGFQKKRIDHRHHAMDALVIACATREHINYMNNQHALDKSKDKKEKQQSRIDLRTILCEKKNNNWQFKKPWRTFTQEAKEALEHIVVSFKQNLRVINKATNYYEKWEEKNGVLVKKKVKQEGTNWAIRKKLHEDFPYGKVKYQVNFLKISENISKIDLIVDEFIKRQLEKIYVENHRKVNLTKKYLKENPIRDQKGEEVISTDFREENIKYRKRKPISVLSDRNRKTGITSIEKMLKTIAKVADNVLKRELFLYLEECNNDIDVAFSPEGIEQFNSKRKIPVYRLPFFEEGEKKNELGNKGKYVEAAKGTNLFFGIYQGKEKRTYATIPLNEVIERQKQGLPSVPERNEKGEPLLFSLSPNDLVYVPMVGEATETIDFSNFSKEQKERIYKTVSFTGNECHFVKSTIASLIKSYDAKSKIGELGSLNKLEVTISGDSRIKEVCIKLKVDRLGNITKA

SEQ ID NO: 5701 - protein, 1570 aa, synthetic construct
  REGION 1..1570: note = Synthetic
MQTRKILGLDLGTNSIGWAVVNDNEESKSIASAGSRIIPMDAAQMGDFESGNSVSQTANRTAARGARRLYERRALRRERLNRVLSILGFLPPHYAKELNRYGQLNKGAEPKLAWSTENGKSVFLFQPSFVEMTREFAIAQPQLVANGKKIAYDWTIYYLRKKALTQPVTKHELAWILLQFNQKRGYNQARGEEDETKANEKKELKTLKVVEVRDTGEVSKGRIWYEVVLENGDIYKRQSAYPLDWVGKVKDFIVTTKLNEDGSEATDKDGKVKRSFSAPQEDDWGLRKIKTEHDIAQSGKTVGEFIYDALLHNPEQKILGQLVRVVDRKFYKEELRRILEIQKQFIPELQDADLYQQCIESLYPQNEAYRNSIANKDFTYLLLQDIIFYQRPLRSKKSLINECPYEFHIYKDKNGEWRRRYLKCISKSHPLYEEFRLWQFVENLHIYKTAENGVSKSDCTAEYIPNKAELVKWLLTQKEVTEQSLLKCIVDKELKGLYLSWNNRKGKKFSAIKSFSSLEDSCFLKLVEDLHIYQVVDNVDCTEQYIHNKMEIREWLLRTDENKITQDALLTYIVTCRLSWNYVSDKKYPMAPVTATISSVLEEAGGKVSAEALVHIWHILYSVSDKEQLSQALSHYAEAHHLLSLFVEKLGKQKPFAAEYGAYSEKAIRKLLSLMRCGNYWKEESINDKTKERIEHLLTGEVDDNISDRVREKLKEMNHISDFQGLPLWLAEYVVYDVRKNDTKWETPEDIDNYLQSFRLHSLNNPIVEQVVMESLRTVRDIWKQEGHIDEIHIEMGRELKQNAEQRKNTLARQADNEKANLRAKLLLQEFMNPEANIEGVRAYSPSQLELFRIYEDGVLNNPKSEKDEDIQRIIKELSELKQPSAADVRKYRLWLDQKYISPYTGQPIPLAKLFTSAYQIEHVIPQSRFFDDSMSNKVICEAEVNARKDRLLAHEFISKCGGEKITLSGGKVVTILMKDAYEELVRDIYKTNPHKQEKLMLDDIPEKFTSRQMNDSRYISRLMLGLLSNIVRKKNTKGEYEPEVTSKNVIVCNGATTTRLKKDWGINDVWNHIILPRFERLNQLQNTTIFTTKTVNGHTIPALPLELSKNFEKKRIDHRHHAMDAMVIAFTTRNHVNLLSNEAALEADKDARYDLQMKLRKHEIWTTADGKQHTKFTDFIAPYEGFQEDVRTTLENIIVSFKQNLRVINKSNNHNIRFVDGKKNSVKQTKGDNWAIRKSLHKATVFGKVNLQFKKTATLKYALEHLNDIVDIDLRHKLRELIAQGYDEKQIKKYFSTGKDIWADINLQKIEVYYYTNDTPYNYYATRTALGDWLDEKSIREKVTDMGIQKILLAHLAQYNGDAKEAFSADGIEKMNQNIVALNGGVPHKPICKVRKYEKADKFAVGETGSKAKKYVEADKGTNLFFAIYVMKDNDGKEVRSYATIPLKVIIDCQKQGKQEWKLLLDQWVHENNIVPANATLKYILSPGDLVYVPKEANMDLDKTRIYKMVSGSSTDWYFTPCTTASIILDKKEYGLLNKLSRALTGEMIKETCVPIHIDRLGNIISLES

SEQ ID NO: 5702 - protein, 1042 aa, synthetic construct
  REGION 1..1042: note = Synthetic
VDVTAEFLRTEDDYVALFDWLNSRKEIDQKAFLKYPKFGLKKEIDNYRWNYVEDKLYPCNETRYAILSRLEKVGVSIDFLSDEKETVLWHILYSVSDKQEIEKALRTFAVKNGLNESFVEVFKKFPPFKSEYGAYSAKAIKKLLPLMRCGKYWDTSLIDDATRDRIERIITGEYDRNIAAKVREKAINLSDIYCFKRLPLWLACYVVYNRHSENKEIAKWETPADIDAYLASFKQHSLRNPIVEQVITETLRVVRDIWKQVGKIDEIHIELGREMKSPADKRKRMTAQIQENEKANLRIKTLLVEFMNPEYEVENIRPYSPSQQEILRIYEDTVLKREEPIPEDIDAILKKFNNSKLPTKSEFLRYKLWLEQKYRSPYTGELIPLGKLFTTAYEIEHIIPQSRYFDDSFSNKVICESAVNKLKDNQLGYEFIKNHHGQKVEVGFGKKVEILSVDSYERFVKEQYAKSSVKMKKLLMDDIPEQFIERQLNDSRYISKVVKGLLSNIVREKNDNDGYEPEAVSRNVLVCTGNVTDRLKKDWGMNDVWNCIVYPRFERLNALTGTQCFGHWENKDGKKVFQTELPLEYQKGFSKKRIDHRHHAMDAIVIACATRNHVNYLSNESASRNTNISRYDLQRLLCDKNRVDGGGNYRWVIKKPWNTFTQDTREALDKIVISLKQNLRIINKTTNIYQHFDITGNRIYKKQEIGDNWAVRKPMHKDTVFGAVNLRKVKRVRLSVALDTPTMIVDKRVKGKVLELLSYKYDKKKIEKYFKENVFFWKDLDIAEVAVYYFTENTSEPLVAVRKSLDSTFNEKKIKESVTDTGIQKILLNHLSVKGGKADWAFSAEGIEEMNRNILQLNDGKKHQPIYKVRVYESRGNKFSVGVSGNKGTKWVGAAKGTNLFFAIYVTENGKRTYVTVPLDVAIEREKQGLIPVPDRNDKGDKLLFWLSPNDLVYLPTEEERELGRINEPIDRGRIYKIVSFTGNRLYGVPCNVANVIVDKLEYSSLNKVELTDAKESIKEICIPIRVDRLGHIIEVKYRINE

SEQ ID NO: 5703 - protein, 1446 aa, synthetic construct
  REGION 1..1446: note = Synthetic
MKKILGLDLGTNSIGWALIDGEKNTIIKAGSRIIPMDAKAMSEYETGNLQSATSVRTDFRGTRRLYERAVLRRERLLRVLNVLGFLPEHFKNQIDFEKHLGQFINHGEPLLPYRRTEDNKNVFIFADSFYEMIADFSLHHPELTENGKRVPYDWTIFYLRKKALSKPIKKEELAWLILNFNTKRGYYQLRGMENETKTNDGEEYKILKVIDVEKTNEDKKRKGIFWYEITYENGAKQRKSGPVAPRKIGDMVEVIVTTSYDKDGNIKTDKEGNPKISISTPSADEWKLLKKKSENAIKESGKTVGEYIYDELLVNPNIKVKGKLIRVIDRPFYKDELKRIIDKQSEFIPELRDRSLYEKCIRELYHQNEAHVQSIMDKSFTDLFVEDIIFYQRPLKSKKSEIANCPFENYHYIDKESGEIVNKPIKCIPKSHPLFQEFRLLQFTQNLKIFKREKVVNGKLKTDVDVTSDFLSTLEDYAALFEWLNNKKDINEKELLRYPSFNIGKNVSEYRWNYVEDKSYPCNETHYLINRQLDDVGTSLTPDQECALWHILYSVDDIILLRKALKSFAKKYDINTELFVKAFEHIEPFDNDYGAYSEKAIKKLLPFMRKGMRLHDACYEVYGRFSETADTDKWTTPEDIDRYLEFEFKQHSLRNPVVESILGETMRVVRDIWKTYGEISEVHVEMGRDLKKSNQERRDTTDRIRKNEQTNLRIRLLLQEFLNPEYKIDGVRPHSPSQQEIFKIFEENALANINEDAESDDIQMIADNLGNPSKHVSQSEIMRYRLWLEQKYKSPYTGQTIPLSKLFTTAYEIEHVIPQSRYFDDSLSNKVICESEVNKLKDRMLGYEFITKHGGEIIQGNLGTQIKILDKVQYEEFVKQHYASNKGKMKKLLMEDIPDNFIERQLNDSRYIARKTISILSKLVREENETEATSKNVIVTTGNITDRLKKEWGVNAVWNDIIAPRFIRLNTITGTHNYGEMINREGKQYFQINVPLEISRGFSKKRIDHRHHAMDAIVIACTTRNHVNYLNNKAALSSEKDLRYDLQHKLCTKVKTDDRGNYTWQFNKPWESFTQDVRRELASIIVSFKQNLRVINKMTNFYWHYENGKKVLTRQTKGDGWAIRKSLHKAGVSGTVRLQTKKTVKLSDALNCVSMIVDKEIRKEIKDVISTYGKLYEKKTILKYFKDRDYKVGKKDVSRVEIYYTPEIAELSAKRVLLDTSFDEKTIKSITDTGIQKILLKHLANNGNDPKIAFTPEGIANMNDHLKELNDGKEHKPILRVRKTESFGLKFPVGEVGNKSKKFVEADKGTNLFFAIYIDEDGNRSYESIPFNVAVERLKMGAQVAQEINEEGKKLLFVLSPGDLVYIPDEGEHVDTISTTDRIYKMVSTTKRECHFIPQSIAAPIIDTIELGSNNKSEKMWDGKNIKKNCLKLQVNRLGIVTKILQ

SEQ ID NO: 5704 - protein, 1524 aa, synthetic construct
  REGION 1..1524: note = Synthetic
MNKILGLDLGTNSIGWAIVQKDEQGFYEKIINAGSRIIPMDAETMNNFNKGITKSPASERTRFRGARRLIERSLLRRERIHRLLNTMNYLPPHYAEKIDFVNRLGKFIGEEEPKYAYKVDEHGKFQFIFKESFNEMLKDFQDKQPELVLNNKKVPYDWTIYYLRKKALNRAISKEELGWIILQFNNKRGYYQLRGEEDETLTEGQKKEYFALKVIRVEADSSSAGKKGEVWYNVQLENGWIYRCKSEIPLDWEGKIKEFIVTTEVDENDNVLKDKEGKEKRKLKIPEAGDWTLLKKKTESDLDKSGKTVGAYIYDTLLSNPDQKIKGGLIRTIERELYRSELEQILDKQKEFHPELKDGTLYNKCVEELYRSNESRRISLSNYDFTRFITEDVIFYQRPLKSKKSLIDNCSFERRNYLNPITKELAYAPIKCIAKSHPLFQEFRLWQFIKNLRIIEREKIVGDKLMFDQDVTTEFLPTQNDYVILFDWLNEHKEIDQKALLKYPAFNLKKNIDKYRWNYVENKSYPCNETRALLKAKLNKAGNIPSDFLDNDTLESLWHILYSVEDKFEIEKALKSFATKKELREEQTVAFVKQFINIPPFKKEYGSYSAKAIKKLLQLMRMGSRWSENEISDSTKDRIQKLIDGEWDESIKTRTRDKAIKLNEINDFQGLPLWLASYIVYDRHSESGDVMKWETPEDIDYYLKHVFKQHGLRNPIVEVVVVETLKVVKDLWKTYGYFNEIHIELGREMKNPADKRRSMTNKNIENENTNLRIKALLAELANHKDVEGVRPYSPSQQEILKIYEEGVLDMLTKEDPDYESISKISKMALPSSSELIRYKCWLEQKYRSPYTGQVIPLARLFTSEYEIEHIIPQSRYFDDSFSNKVICESAVNKDKDNLLAYEYIKQNEGKIIEIGLGKKVKLFTADSYTEFVQSNYVGSVAKKKKLLMDTIPDSFIKRQLNDSRYISREIMKLLSSVVREKEEEEEEEEEEAISKNVIVCTGAITDKLKREWGLNDVWNTIIYPRFERLNQLTNSDKFGQWENKQGKKVFQIEMPLKLQKGFNKKRIDHRHHAMDAIVIACATQSHVNYLNNESAHSNSKEKRYYLRRKLRRIEILEKQELKDGVTITKKIEVAKEFNKPWPTFTQDAHEVLQSIIVSFKQNLRVVNKATNRYACFVNGKKEIVKQSKGESWAIRKPMHKDTVSAAVSLRKIKTVSLSQAIDDWTNIVDKSLRKEIGLLYSKYGQNGSKNIIKYFKDRDNKHNGLDVSKVNVHYFDNDYAASRVALDHKFNSAKIKSITDTGIQTILLKHLESYNEINGDKIIEHPELAFSADGLDILNANITKLNNGKFHKPIKKVRKTETLGLKFIVGQTGNKRKKYVEAADGTNLFFAIYVSVDGIRSYKTIPLREVAERLKEGLIPVPEKNDKDDHLLFWLSPGDLVYVPSIEEEGRIVEIENIKQDRIYKVVSCTENECHCIPHFVASPIVKTDELGANNKAQRAWSGEMIKETCIKIKMNRLGQIVKI

SEQ ID NO: 5705 - protein, 1092 aa, synthetic construct
  REGION 1..1092: note = Synthetic
MYSQVSSSLSRISPLAIYCNLRIYRKETDVDVTQELLPTEADYVTLFEWLNEKKEIDQKAFFKYPPFGFKKTTSNYRWNYVEDKPYPCNETHAQIIARLGKAHIPKAFLSKEKEETLWHILYSIEDKQEIEKALHSFANKNNLSEEFIEQFKNFPPFKKEYGSYSAKAIKKLLPLMRMGKYWSIENIDNGTRIRINKIIDGEYDENIRERVRQKAINLTDITHFRALPLWLACYLVYDRHSEVKDIVKWKTPKDIDLYLKSFKQHSLRNPIVEQVITETLRTVRDIWQQVGHIDEIHIELGREMKNPADKRARMSQQMIKNENTNLRIKALLTEFLNPEFGIENVRPYSPSQQDLLRIYEEGVLNSILELPEDIGIILGKFNQTDTLKRPTRSEILRYKLWLEQKYRSPYTGEMIPLSKLFTPAYEIEHIIPQSRYFDDSLSNKVICESEINKLKDRSLGYEFIKNHHGEKVELAFDKPVEVLSVEAYEKLVHESYSHNRSKMKKLLMEDIPDQFIERQLNDSRYISKVVKSLLSNIVREENEQEAISKNVIPCTGGITDRLKKDWGINDVWNKIVLPRFIRLNELTESTRFTSINTNNTMIPSMPLELQKGFNKKRIDHRHHAMDAIIIACANRNIVNYLNNVSASKNTKITRRDLQTLLCHKDKTDNNGNYKWVIDKPWETFTQDTLTALQKITVSFKQNLRVINKTTNHYQHYENGKKIVSNQSKGDSWAIRKSMHKETVHGEVNLRMIKTVSFNEALKKPQAIVEMDLKKKILAMLELGYDTKRIKNYFEENKDTWQDINPSKIKVYYFTKETKDRYFAVRKPIDTSFDKKKIKESITDTGIQQIMLRHLETKDNDPTLAFSPDGIDEMNRNILILNKGKKHQPIYKVRVYEKAEKFTVGQKGNKRTKFVEAAKGTNLFFAIYETEEIDKDTKKVIRKRSYSTIPLNVVIERQKQGLSSAPEDENGNLPKYILSPNDLVYVPTQEEINKGEVVMPIDRDRIYKMVDSSGITANFIPASTANLIFALPKATAEIYCNGENCIQNEYGIGSPQSKNQKAITGEMVKEICFPIKVDRLGNIIQVGSCILTN

SEQ ID NO: 5706 - protein, 1186 aa, synthetic construct
  REGION 1..1186: note = Synthetic
MTKKILGLDLGTNSIGWAVVDEEDTKKRISHAGSRIIPMDAKLMGDFESGNSVSQTATRTADRGVRRLYERHALRRERLNRVLSILGFLPEHYSTELNRYGQLNQGAEPKLAWEMIDGKYSFLFKDSFLEMVHEFAQVHPELLVNGRNIAYDWTIYYLRKKALTQAITKQELAWILHQFNQKRGYNQARGEEEETKSNERKELITQKVVSVRNTGEESKGRTWYEITLENGFVYRRQSAYPLDWEGKVRDFIVTTKLNDDGSDAKDKEGNVKRSISAPQEDDWGLRKIKTQQDIDASHKTVGEFIYDALLHNPDQKIIGQLVRVVDRKYYMDELKRILDTQKQFIPELQNKELYAECIKALYPQNDAYRSSIASKDFTYLLLNDIIFYQRPLKSKKSLINVCPYEYHVYKDKEGTWQRQYLKCISKSHPLYEEFRIWQFVENLHIYRETPNGLGKEDCTAEYISNKAELVSWLFTQKEVTETSLLTHIAGKQKKGLSWNYVSDKEKKYPAAPVTSAISSILQEAGGEVSSNTIEHIWQILYSVSDKQQLMAALKHYAEVNNLSDVFVEKLSKQKPFAADYGAYSEKATQKLLSLMRSGESWSEEAIDANTKSRIEHILTGEVDDAISERVREKLDAMHEIKDFQGLPLWLAEYVIYDVRKNDTKWETPEDIDKYLQSFRLHSLNNPIVEQVVMESLRTVRDIWKQEGQIDEIHIELGRDLKQNAEQRKKTQQRQQENERANLRAKLLLQEFMNPDMEIEGVHAYSPSQQELFRIYEDGVLSSNKPDEETQRIINDLASLKQPSAQDIKKYRLWLDQKYISPYTGEIIPLAKLFTPAYQIEHVIPQSRFFDDSMSNKVICEAEVNARKDRMLGHEFIVKCGGEKITLSGGKVVTILSPEAYEDTIRKNFAGDSRKQEKLMLDEIPEKFVARQMNDSRYINRLMMQLLSNIVREKISKTEYEPEAVSKNLIVCNGATTTRLKKDWGINDVWNKIILPRFERLNRLQNKTVFTAKTANGHIIPNMPLELRQGFEKKRIDHRHHAMDAIIIAFTTRNHVALLSNESALDKDEKARYDLQTLLRKREVWRSADGKEHYKFTDFIAPYDGFQKDVQETLENIIVSFKQNLRVINKSSNRSIRFVDGKKQRVPQKKGDNWSIRKSLHKATVFWRSESAQKEICQSDLCAPACG

SEQ ID NO: 5707 - protein, 1562 aa, synthetic construct
  REGION 1..1562: note = Synthetic
MKKILGLDLGTNSIGWALVNQDYENNKGEIIGLGSRIIPMSQEIINDFNKGISISQTATRTGYRGVRRLLERNLLRRERLHRVLNVLGFLPKHFAEQIDFENKLGQFFPNREPKLAYKEIKTTDNKLKHDFIFKKAFEEMLEDFKAHQPSLLLNDKKVPYDWTIYYLRKKALTAKIEKEELAWLLLHFNQKRGYYQLRGEEEEETPNKLVEFHSLKVIDIKADEQQKGKADIWYNVNLENGWVYRRSSKTPLFDWKGKTQEFIVTTELNDDKTIKLNKDGNEKRSFKAVDSEVDWVAIKKSTEEKIDKSKKTVGSYIYETLLQNPNQKIIGKLVRTIERKFYKDELKQILEKQVHEHTELQDRNLYNACIEELYENNTAHRENIKEKSFVHLFINDILFYQRPLKSKKSLISDCPFEQRTYLKDGKKEIQSIKCISKSNPLFQEFRLWQFIQNLKIYQKEKTIDGKTYSDVNVTTEFLKSEDHYTNLFDWLNERKEIDQKVFLKCPAFNLKKDVENYRWNYVEDKSYPCNETHNAIVNRLSKVQKMPSDFLTREKEQDLWHILYSVEDKIEIEKALKSFAIKNNLSEDFAEVFKKIKPFDKDYGAYSEKAIKKLLPLMRRGKYWNEEDIHQQTKNRIEKIIYGEVDDKIRDRVREKAIHLNNINDFKALPLWLASYIVYDRHSEDRNAMQWKKPEDIENYLEEFKQHSIRNPIVEQVITETLRVVKDIWKTYGNGVANFFDEIHIELGREMKNPSDKRKDMTNRMIVNESTNLRIKSLLMEFMNDDYFKNQIDYSEYCKDENKLSSYQKGSNPIRPNSPSQQDKLKIFEETILNTVNEIPDYISETIKKFKESDENKQPTKSEINRYKLWLEQKYCSPYTGEIIPLNKLFTPAYEIEHIIPQSRYFDDSLSNKVICEAEVNKDKDKSTAYEYIRDNHGKKIELSFGKVVTIFEEKAYEDFIKRHYAKNRSKLNKLMMEEIPESFIQRQLNDSRYISKIVKNLLSNMVREDEEQESTSKHVISSNGNITNVLKQDWGLNDVWNDIISPRFERLNESTKSSNFGEWTNKNGKRVFQTQVPLELHKGFNKKRIDHRHHALDALVIACASKNHINYLNNQYAKSETTRYDLQKNLRRHEQVEITYKKTGEKKKINVAKEFFKPWDSFTVQAKQSLENTVVSFKQNLRVINKTVNYYQSFKNEDGTLRLNKNGVPQKDIIKQKGSNWAIRKPMHTPMPYGKRNFGFDILKISENISKREYIIDEDIKKKINTIFEECGKKITATQNFIKKNPIQNNEGKPILETAFKISVIKFRKRQPISKLSNRGQGGIKTLEDMTKFINKVVDNKLRDDLLLHLKVNNNNIDMAFNADGIDVFNSKRKIPVYKLPIAESGDKRFSLGNNIGSKHKWMEAAEGTNLFFAIYLDDKGKRNYDTIPLNIVIENQKQGALQNIKPEFCSVPNKNEKGDSLLFHLSPNDLVYVPTNEEFENPTLVNFKKLSKEQLNRIMKFVSCTGSEGHFVPNYYSSPIMKNEIGTNNKSEKTFDNVQIKAVCWKLKLDRLGNIITVLK

SEQ ID NO: 5708 - protein, 1541 aa, synthetic construct
  REGION 1..1541: note = Synthetic
MKKILGLDLGTNSIGWALTTQDFENKKGKIEGIGTRIIPMSQDILGKFDSGQSHSQTANRTSYRGVRRLYQRALLRRERLHRVLNILNFLPKHYKESIDFEKHLGQFKNNTEVKLNYRKNEEGKHEFIFMDSFNEMVAEFKAAGKDVKIPLDWTIYYLRTKALKHKITKEELAWVLLNFNQKRGYYQLRGEDIDNDKEKNKKFETLFVTEVKDSGEVIKKTGEPLFDIYFKNGWKYDKQTTKPKSWLNKQKEFIVTTKELQNKEIKRTFKLVDSEIDWIAIKKKTEQDIEQSNKTVGQYIYETLLINPSQKIRGKLVKTIERKFYKQELQKILKTQIQFHPELNDKELYNACLDELYPRNEAHQSNIKNNGFDYLFIDDIIFYQRPLKSKKSTISDCPYEERIFIKDGVRNVQKVKCIAKSNPLFQEFRLWQFLKNLKIHQKENIVNGNIDEDITDSLFTSDNDWVLLFEFLNDKKEVEQKHIIDFLVDNKKIEKSQKKNYRWNYVEDKKFPANETRSSFLSRLKKVKNCNENDFLSKEKEVALWHIIYSVKDKKEYETALETYASKYNLDVNSFVEVFVKYPPFKNDYGAYSEKAIKKILPLMRMGKYWDEEAISDDVKNRILQIQERLESINYDKEVFNGDKEDRLKTIVDDEIPRQFIKSFIDFKDKNPLTGLNTYQACYAVYERHSESGLIKQWKSPNDIDTYLNEFKQHSLRNPIVEQVVTETLRVVRDIWKYYGKGASNFFNEIHVELGREMKNSSDKRKAMSSRNIENENTKQRIKSLLEELKNDSEYDIRPYSPSHQEILKIYEEGVFQNPEVSFSKVKEDEINKIRKSNSPTKSEINKYKLWLEQGYISPYTGQIIPLSKLFSIDYQIEHIIPQSRYFDNSMSNKIICESEVNQLKDNKTAYEFLKNEGGRVVTLSNGNTVKLFTLENYEKHCKQYFKQNRTKLNNLLSEDIPEGFINRQLNDSRYISKIVKTLLSNIVREDGEKEATTKRLVPVTGAITSKLKQDWGLNDKWNEIVAPRFKRLNELTNSNDFGEWDSKINAFRIKVPNEISRGFSKKRIDHRHHALDALIIACCTKKHTNYLGSLNSQRENYGLKASLLIKNKQGDFTKHFQLPWPNFTAEAKDSLEKTIISFKQNLRIINKTNNKTWQWQPQKNGTFKKVLVKQKDATNSKNKTNWAIRKPMHKETVSGAVKVKRIKKGLSNITSYLDKPELIVDKLIKRKINSLLILFDKDLKKVRKHLKETPLVIDGKEITKVKVYEWTENATATRVALNEKFTRKQLESITDSGIIAILERHLQNYTDQDSKERFDLAFNPDGIDALNKNIKALNNGKNHHPIYKVRLYEEGSKFPVGESGAKSTKFVEAAKGTNLFFAIYYDKEKDKRVFETIPLNEVIEHQKQTAALQKDKRLPIQPNNTKGEFLFTLSPNDLVYVPTDEEIENNSLVDFNHLSVDQISRIMVVNDFWDITCYFSPNQLASSIAPKEVDLSYNHIKKKLTGSYDTKTAKFKNRSIKDICWKIDLDRLGNIIKYAK

SEQ ID NO: 5709 - protein, 1453 aa, synthetic construct
  REGION 1..1453: note = Synthetic
MKTVLGLDLGTNSIGWALIQHDFDSKKGEILGMGSRIIPMSQDILGEFGKGNSVSQTADRTKFRSARRLRERHLLRRERLHRVLNILGFLPRHYAADIDFEKRLGQFFEGKEPKLAYDNNQFIFTKSFGKMLADFRQHQPDFLKDEKSNDLLIPYDWSIYYLRKEALTKKIEKEELAWIILNFNQKRGYYQLRGEEEEENLNKLVEFHSLKIIDVVADEKLNNKGETWYSLLLENGWTYRRSSKVPLFDWKEKVRDFIVTTDINDDGSVKTDKEGNEKRSFRAPSDDDWTLLKKKTEQDIDKSRKPIGAYIYDAILKNPKQKINGKLVRTVERKFYKEELKLILQKQKEFHPELQSTDLYNECIRELYKNNDAHQLQLNKKDFVHLFLEDIIFYQRPLRSQKSSVGNCPLEFRKFKDSEGIEKVEYLKTIPKSNPYFQEFRIWQWMYNLSIYKKDDDENVTRDFLKTIEDWEDLFEFLNHRKDIEQETLLKFLLGKNGVKGKALKVEAGKFRWNYVSDKIYPCNETKALIISKLEKVKGVEEKFLTEEIEYKLWHLIYSVTDKVEYEKALKAFAGKQKLDLVSFVDSFKRFPPFKNEYGAYSEKAIKKILPLLRTGKSWNWMAIDSKVRDRINKIITGEFDEEIKNKVREKAEKHSLKKENDFQGLPLWLAQYVVYGRHSEASFSGKWNSVDDLKKYLEEFKQHSLRNPIVEQVLTETLRVVADIWQFYGKGEKDFFSEIHIELGREMKNTAEDRKEMSAIIQANETTNLRIKALLNELLQDKKVENVRPYSPSQQEILKIYEDGVLSSDIEIPDDIQKISKAAQPTKSELQRYKLWLEQKYRSPYTGAMIPLGKLFTSEYEIEHIIPQSLYFDDSFSNKVICESAVNKLKDSRLGMEFIKECHGMVVETGFGKSVTVFEEETYRDFVVQNYSKNHSKKSKLLLEEIPEKMIERQMNDTRYISKFISSVLSNIVREEVNDDGVNSKNIVPGNGKITTQLKQDWGLNDIWNELILPRFERLNVLTDSKHFTAWSENHQRLLPTVPIGLSKGFSKKRIDHRHHALDALVIACASRNHINFLNNAHAIDKKKNSEEKQKFRHDLKAILCDKKYSDKSEKNYRWIFKKPWDNFTIDSKNALDKIIVSFKQNLRIINKATNRYEKWVDRDGIKVKEWHKQEGINWATRKPLHKDTVSGKVDLKRVTVPEGKILTATRKSLDTSFDLKVIESITDTGIQKILKNYLTSKSNNPELAFSSEGVEDMNKNIRKYNDGKLHQPIYKVRIFELGSKFPLGQFGNKKFKYVETAKGTNLFFAVYEDENKNRNYETIPLNVVIERQKQGLSSVPIKSEKGHKLLFYLSPNDIVYVPGSNEEFSIDRLYRFTDSSDKTANFIPLSVSSLIFSSNKNEQKKIGISYPIQDEFGLGSPQSKNQKSIDGIMIKEKCVKVNIDRLGRVSF

SEQ ID NO: 5710 - protein, 1108 aa, synthetic construct
  REGION 1..1108: note = Synthetic
LPIRIKNLYTRRRKKIEALKCISKSHPLYQEFRLRQWISNVRIINRENDVNETEKYLQTIDDSTALFDFLNKRKEIDQKSLLQYFKLKEGSYRWNYVEDKKYPCNETHSMIAGRLENVKDLPQEFLNKKKEEELWHIIYSVTDKIEYEKALKSFADKNNLDLESFYDAFKKFPPFPSNYGSYSAKAIKKLLPLMRIGKYWNEENIDEKTRDRLTKIINAEVDETIEERVREKAKNLTQIEHFQGLPEWLAKYVVYDRHSEKSDLGKWKTVQDLEEYLKSFRQHTLKNPIVEQVITETLRTVKDIWQHYGNGVEGFFDEIHIELGRDMKNSAAERVRITEQVTKNENTNLRIRALLAEMLNDNSVENVRPYSPTQQDILKIYEDFVLNSAFEIPEDIEKISKQAQPTSSELQRYKLWLEQKYRSPYTGEIIPLNKLFTPAYEIEHIIPQSRYFDDSFSNKVICETAVNKLKDNQTGLQFIQNYHGQIVELGMGKTAKVFTEEAYTDFVKQHYDKSRAKKNKLLALEIPEKMIERQMNDTRYISKFIMQALSNIVRANKEDDGANSKNVLASNGQITTKLKQDWGMDAIWNELILPRFERLNQITNTTHFTVYNDKHQKYLPAVPLVLQRGFQKKRIDHRHHAMDALVIACATRSHINFLNNQNALEKNKSIMQKQQGRLDLRKILCDKKYNDGSSENYQWIFKQPWVGFIPEAKSKLEQVVVSFKQNLRIINKTINQHDIIKDGEKIKVKQKKGESWAIRKSLHTPMPYSKKTYEFNVLKIAENLGKANFIIDLAIKQYADAILNQFNNKITEAQKFIKANPIKDENGKECISTTFKIPIEKFRRRQPISKLSNRGQGGLKTIDEVIKFINKVADIKLQQNLLNHLKNNDNDIDKAFNADGIEKFNLLRKIPVYKLPISENGSGRFPVGQKLSTNHKWVEADTGTNLFFAVYEDEFGNRSFETVPLNEVVVHQKLDASLSKNDRKQSSPIPTKSDKGKLLFTLSPNDLVYIPTKDELENHQNLNFKSIKQSGRIYRFVSCTGSEGHFVHNNYSTGIINNEHGTNNKSERMLDFKNTPSFSDEKGKPQMIKNSCWKIVVDKIGNIKSVLT

SEQ ID NO: 5711 - protein, 1441 aa, synthetic construct
  REGION 1..1441: note = Synthetic
MKKILGLDLGTNSIGWSLIENDAQSLKGTIISAGSRIIPMSQDVLGKFDAGVTESQTAERTRYRSTRRLYERNKLRRQRLHRVLNIMGFLPKHYAQDIDFEKRLGQFKEGTETKLSYRKIDQAVATAGYEFIFQDSFNEMVKEFKEKGYNENIPYDWTIYYLRKKALEEKISKEELAWVILNFNQKRGYYQLRGEEEADKNKHFVQLTVQDIIDTGEDIKGKRLYEVLFDNGWVYDKKITKTEDWVGRTKEFIVTIKDLKGGDKKYTYKTVNSEVDWLAIKSKTEQDIDNSGLTIGQYIYSKLLDKPDQKIRGKLIKTIERKYYRRELREILRVQEKFHQVLMDETVFEKCLIELYKRNEAHRNNIKSLSLSYLIEEDIIFYQRPLKSKKSTVGGCQFEYRTYYKNDADSGDTIQQRVPLKAIPKSHPLYQEFRLWQFVLNIKIIDQDLELLQAKNADITQELLSSDEEIVELYEELNGRKEVEQKNIIDYFIKKSKIDKSKRGNFRWNYAKDKKYPCNETRAEILKRLKKVNGVKPHQFLTKEIELKLWHIVYSVTDRIEYASSIENFAKKNGLHVESFVLAFGNMPPYSSDYGSLSHKAIVKILSLMRMGKYWDPDVIDPHTFDRITKIISGEYDESIRDRVRDKAIMLKSINDFSGLPYWLASYVIYDRHSEGSDTAQWTSASDIDEYLKQFKQHRLRNPIVEQVVTETLRVVRDVWLKYGDGAKDFFDEIHLELGRSLKNSAEKRKSISTKQNENENTNERIRQLLEELGQDDSILGDIRAYSPSHQEILKIYEDGVYQNPDAKYGTVSEDEIYKIRRNKTPSYNEIQRYRLWLEQGYVSPYTGSIISLSRLFTTEYQIEHIIPQSRYFDNSFNNKIICEADINQDKGNLTAYDYMTRMSEEVRDGHELLSKENYEAHCQKYFKKNRVKLANLLSEDIPEGFINRQMNDSRYIAKYVKGLLSNIVRDDGEQESTAKRLLPVSGAITAKLKQDWGLNDKWNDIIAPRFMRMNEITRTSDYGYYDKKINAFRITVPDKIRKGFSKKRIDHRHHALDAIVIACITREQVNYLNSLNSERENYSLRSRLLVKNKHGDYTKHFRLPWSNFPIEVQQSLEQMIVSFKQNIRVINKTNNKTWQWIYEDGRYVKRRVRQEGKNWAIRKSLHKETVSGQVMHIPTSKGKIATASRVLLSSITNKKHIDKITDVSIQKILLNHLSSYLDDKGKPQYDVAFSTEGIEDMNKNIKMLNGGVSHKPIKKVRQYEIGSKFQVGIKGNNHKKYVEAAKGTNLFFAVYWNENINKRTYETVPLNEVVEHQKQTTHISKSKKHPFQPDNSKGKFLFSLSPNDLVYVPDEDEILNSGLVSVVSLRIKNIYKMVSSSGNQVFFLKSEVAKSIANKLEFSGLNKMEKDINGVMIKSLCWKLVIDRIGNILNIKKGIL

SEQ ID NO: 5712 - protein, 1498 aa, synthetic construct
  REGION 1..1498: note = Synthetic
MKKILGLDLGTNSIGWSLIEHDFEKKQGEINDLGVRIIPMSADVLGKFDAGQSHSQTAERTGYRGVRRLYQRDNLRRERLHRVLNVLGFLPGHYAVHIDFKKHLGQFKEGKETKLNYKPIADSKYEFIFQSSFNEMIKEFKKYRPELFYVKSNGKETKIPYDWTLYYLRKRALSQPLTKQELSWIILNFNQKRGYYQLRGEEIDGDKNKQFVQLKVKEVIDSGEAVKGNPLFDVIFENGWKYDKQVVKTEDWIDRTKEFIVTTKTLKNGDIKRTYKAVDSEQDWAAIKAKTEQDIERTNKTVGEFIYETLLENPAQKIRGKLVKTIERKFYKEELEKILTKQIELQPQLFTNELYKACIEELYPKNEAHQNALKNRDFLYLLMEDIIFYQRPLKSQKSNISGCQLEQRAYHKTNKETGKKEKVKQAVNVIPKSHPLFQEFRNWQWLQNLKIYNKVDTDKGELIDVTEQLLPNEDSRVDLFDFLQSKKELEQSQFIKYFIDNKLINKTEKNHYRWNYVEDKKYPFGETRAQFIFRLTKVEGIKDADMFLDEKIQIGNKENNSFISRIEQLWHIIYSVSDISEYKSALEKFAIKHHLNQESFVANFIKFPPFKSDYGSYSKKALNKLLPLMRRGKYWDENDISDKVKQRVSQIMERVNSLHLKEDYNANELAEALGNVSDDDVKKQLVKSFVPFANKNLLQGLNTYQATYLVYGRHSEIGDIQNWKSPEDIETYLKNFKQHSLRNPIVEQVVTETLRVVRDIWKHHGESKPNFFNEIHVELGREMKNPADKRKRISDRNTENENTNHRIREILKELMKDTSVDGDVRDYSPSQQDILKIYEEGVYQNPRIDYSNVSEDEIAKIRRSNSPTQKEIQRYRLWLEQGYISPYTGKPIPLTKLFTHEYQIEHIIPQSRYFDNSLSNKIICESAVNEDKDNKTAFEYLKAKGGNVINGHKLLSLAEYEAHVSQYFKNNRQKLKNLLSEDIPEGFINRQLNDSRYISKLIKGLLSNIVREEGEQEATSKNLVPVTGSVTSKLKNDWGLNDKWNELILPRFERLNQLTQTKDFTVTNTSGHTIPSVPDDLLKGFSKKRIDHRHHALDALVVACCTRNHGHYLNALNSEKKNYGLRDKLLIKNENDHYIKTFQMPWQGFANEAKNQLENTVISFKQNLRVINKANNKFWSYKDENGNLNLDKNGKAVKKLRKQIKGDNWAIRKAMHKETVSGKYNIETPKGKIATAVRGSLGDIKNEKHLAKVTDSQIREVILPNHLKNYIDVKGKIKFDVAFSDEGIEDLNKNIISLNNGKKHQPIRKVKFFEVGSKFSISENENSAKNKKYVETAKGTNLFFAIYWDEIKQKRNYETVPLNEVIVHQKQVAHLPKNERLPIQPNSKKGSFLFTLSPNDLVYVPTDEELTNISLIDFNNLSNNQLNRIYKMVSCTSVECYFVSQGTASLIMSYNSKSKQGEFGSKNKLETTIDSLEVRIKERCLKLKVDRLGNISKA

SEQ ID NO: 5713 - protein, 1490 aa, synthetic construct
  REGION 1..1490: note = Synthetic
MKKTILGLDLGTNSIGWAVVNEIDEHKNISCAGSRIIPMDAALMGDFESGNSVSQTKNRTAARGTRRLFERHALRRERLNRVLSILGFLPEHYLSSLNRYGQLNKGEEPKLPWDVKDGKSTFLFQKSFIEMTHEFSQANPDLLMNDRKVAYDWTIYYLRKKALTEAISKQELAWILHQFNQKRGYYQARGEEEEAKVNERKELMTLKVVSVKDTGEVSKGKTWYEVLLENGWIYKRPSAYPLDWEGKVKDFIITTKLNDDGTDATDKEGNVKRSFSAPKEDDWGLRKIKTQHDIDASHKTIGEFIYDALLKNPDEKIIGQLVRVVDRKYYIEELKRILDTQKQFIPELCDKILYQDCINALYPQNEAYRNSIASKDFTYLFLNDIIFYQRPLKSKKSLINECPYEYHNYKSSEGEWKRQYLKCIPKSHPLYEEFRLWQFVENLHIYHNDANGIGKIDCTAEYIHDKAEIVKWLLTQKEVSEKTMLEHLAEKKTKGLSWNYISDKDKKYPAAPVTATISSVLHEAGGTADMSNIMHVWHILYSVSDKVQLTAALQHYAVDNNLTNVFVEKLSKQKPFEADYGAYSEKAIRKLINLMRCGEYWKKDAIDQKTLERIEHILTGEVDDNISERVREKLTSMHEITDFQGLPLWLAEYVIYDVRKNDTKWNNPEDIDSYLQAFRLHSLNNPIVEQVVMESLRTVRDIWKQEGQIDEIHIELGRNLKQNAEQRKKTLERQQENEKANLRAKLLLQEFMNPDMEVEGVRPYSPSQQELFRIYEDGVLNSNNPSEDIQKIIDDIASLRQPSMQDIKKYRLWLDQKYRSPYTGEIIPLAKLFTSAYQIEHVIPQSRFFDDSMSNKVICEAEVNALKDRMLAHEFILLHGGEKVTLSGGKVVTICNRESYEQLVRDNFSGNKAKQEKLMLDDIPEEFIARQLNDSRYISRLMTQLLSNIVREKINATEYEPEAVSKNVIVCNGTTTTRLKKDWGINDIWNHIILPRFERLNQLQNTTVFTTQTANGHIIPNMPMELRKGFEKKRIDHRHHAMDAIIIAFTTRNHVNLLSNEAALEKDEKARYDLQSILRKREIWTDANGKQHTKFTDFKVPYDGFQKEVQECLENIVVSFKQNLRVINKSNNHSLRFVDGKKRMVRQEKGDNWAIRKSLHKETVFGRVNLRKKKFVNLTYALQHIKDIVEKDLRNKLQELVTDGKDEKQIKKWFAAEPDVWSDVNLKRIEVYYYTEDANEHYYAVRTAIDESFTAEYIRNKVTAESIQRILLAHLDSCNGDPKLAFSPDGIEKMNAHIWQLNSGRPHKPIYRVRVCEKAEKFAVGQIGAKSKKFVEAAKGTNLFTLVYEKIEMDGSISRKLVPLSLQEVITAQKHAHKEWIDYINTYYHENEVLSNEWIYKFTLSPGNLVYVPSEDEIKNKKYDLNPNSIYKVVSLDDENPNFIPVNIASMLIDGVEFGRHNKTTRDSYGCLIKKICIPINIDRLGNISL

SEQ ID NO: 5714 - protein, 1491 aa, synthetic construct
  REGION 1..1491: note = Synthetic
MAKIIGLDLGTNSIGWAVVDNEKKCIEAAGSRIIPMDAGRMGDFEKGNSVSFTAERTQYRGVRRLHERYLLRRERLLRVLHIMEFLPKHFAAQIDRYGKISSSKEPKLAWRESEDGMNEFLFRASFDEMVADFRTAGYNNNIPYDWTIYYLRKKALTRPLSKEELSWVLMQFNQKRGYYQLRGKQDELDNQANDKGVEKEYQELKVISVKNTGEKHKNGSLWYDITLENGWIYHRPCRTAPDWEGKTRGFIATFKLDKNGNRKEEQPSLRAPDENDWGLRKIRTEETIRQSGLTIGEFIYKSLLTNPSQKIIGELVRVVDRKYYLDELHRILDKQREYIPELNDRDLYYSCIEELYPNNDAYRNSIAKRNFTYLIADDILFYQRPLKSKTDLIKDCPYEKRNGKAIKCIAKSHPIFQEFRIWQFLSNLRIEHCDTDVTALLLPDTNAWENLYNWFSSQKSINQKSLLKYLKIDKSDIDTYRWNYVQDKDYPAGETRAILLGGLRKAGIPEEFLNTEHELQLWHILYSIDDPTQYDKALHTFARKQRWDNEREASFCQVFKQLTIYKEKDYGAYSAKAISRLLPLMRCGKYWKEGDIDTQTRQRITHLITGEADDTLPIAIRERFKDLTNICQCQKLNTWQACYLVYGRHSEVADAKIWTTPDDIDLYLKEFRHNSLNNPVVEQVVTESLRVVRDIWRQYGHPDEIHIELGRELKKTKAERERLAQVITEGEATNQRIRLLLTELMNPEYHVENVRPQSPSQLELLKIYEEGVLDSNIEIPDDINDIRKRFTSAKSQPNHAEIIRYKLWLDQKYISPYTGKPIPLAKLFTPAYQIEHVIPQSRWFDDSMSNKVICEAEVNQLKDRELGHEFIVNHHGERVQLSLGGTVDILSVDAYEKLITNLFVNNRAKYRKMMLDEIPEDFNARQLVDSRYISRLMMHLLSNIVRSSDEKGNQEDAVTSKNVIPCNGSITDRLKHDWGLDDVWNRIILSRFQRLNSITGTSFYTATTANGHQIPQVPLDMRQGFNKKRIDHRHHAMDAIVIACCTRDHINLLNNESAREGSARYDLQHKLRETENYLDRSGKRHEKFTNFIKPWSTFTEDTFNILANIIVSFKQNLRIINKTTNHYYVICDGKHAIHKQEKGDSWAIRKPLHKETVFGEVNLQLKKRLPIKKALLDINSIVSHELKEKIKEKKALGYSDKQVLEFLDKNKDVWSEAADGKVEVYYYTKNSGDRYFATRKDLLSYLSDCTTIAAAEKAIDNITDSGIRTILKAHLAVEGNNPSEAFSADGLERMNHNIRVLNGGKNHMPIKKVRVFEQANKFSVGNKGQKATKYVEAAKGTNLFFVIYTNAKGLRGYATVPLNIVIDLQKRYEKAWRDHLAERLKESDLKLMSDNDQILYVLSPGDLVYVPLNKDNNAKDIRHFDTKQIYKMVSCGQLQCMCIHHHVASPIVNKVEFSTQNKMERALTGEMIKEVCIPIQVDRLGNIIKIG

SEQ ID NO: 5715 - protein, 1517 aa, synthetic construct
  REGION 1..1517: note = Synthetic
MRKILGLDLGTNSIGWAIVNAKPVQREDGTEYLKPESIEMAGSRIIPMDAATLGNFDAGNSVSQTAARTGYRGVRRLRERFLLRRERLNRVLDCMGFLPEHYSAELDRYGKFLSKEIEPKLAWRPSKDCKYEFIFMDSFNEMLEDFRQHQPDLLKEGCKVPLDWTLYYLRKKALSRPVSGEELAWILHNFNQKRGYYQLRGEEEEENAKQRVEYYSLGVVKVEESGDRRGDDVWYNVHLENGWIYRRSSRYPLDWVGKKKDFIVTTSLDDEGNPKLDKDGNVRRSFRAPNEDDWTLQKKKAEMDIDQSGYAVGEYIYNTLLINPEQKIKGKLVRTIERKYYKQELIQILQKQLELNKTLQDRELFERCLEALYPRNEAHRNNILCKDFVYLFVEDIIFYQRPLKSKKSLISNCPYEFTQYVDKETGEIIDSPIKCISKSHQLYQEFRLWQFIDNLKIYERTKTVNGRLCSDVDVTDEFLKDEEGYVALFDYLNDRASITQDVLLNKHFNIKKPKGKDAVYPYRWNYVEDKEYPCNETRATMLAGFKKAGIPAERLDYKMTEALWHILYSVSDKQELNKALAKFANKNQLGEDFVAAFAKTKPYDHDYGAYSAKAIKKLLPLMRRGKYWSYDAIDQKTAKRIENIINGEFDESLGQRVREKAIGLTEESHFRGLPVWLACYIVYNRHSESGDIVKWERPEDIDAYLNGFKQHSLRNPIVEQVILETLRTVRDIWKKSGSIDEIHVEMGREMKNPADKRAKMSQQAVINENTNLRIKSLLAEFANPEFKIDNVRPYSPTQQDILRIYEDFALSNLKQDDEDYEFVRKMSTTAQPTHNEVLRYKLWLEQKYVSPYTGQVIPLTKLFTSAYEIEHVIPQSRYFDDSFSNKVICESEVNKLKDKQLGYEFIKNHAGEKVQISMSNKSVEIFSTQAYEEFVKQHYSGIKLKKLLMDDIPDKFIERQLNDTRYISKLIKGLLSNVVREKLDNGEYELEAISKNLIPTNGYITDLLKKDWGLNDVWNSIILPRFQRMNEITGRTCFTAINQQGHEIPAMPLELQRGFSKKRIDHRHHAMDAIAIACTTRDHINLLNNEAAKSGNSANRYKLSRKLRRYESIQIEKDGERKKVDVAKEFIAPWPAFAVDARDALNDIVVSFKQNLRVINKATNYYQRYDDSGSKVFAEQKAGDNMAVRKPLHKETVFGLVNLKLKKTVSLTEALKNPSMIVDRDFKYRVKQMFKAGLDAKNIKKELESDSSVANRVEVYYYTSDTNDRYYATRKPLDSSFDEKTILNSVTDTGIQKILLAHLSRCDNDPELAFSPDGIDRMNRDIVQLNDGRYHQPIYKVRKYEKADKFAVGQTGNKRTKYVEAAKGTNLYFAIYRTEKIDKETGETILGRSFETIPLNVVVERLKQHLKPVPEVNENGDKLLFWLSPNDLVYVPTADEIESGRISEPIDKERIYKIVSCTGVKSHYVPYYVATPIVDKLEFSSMNKIGRALTGEMIKDVCLPVLINRLGELDYKT

SEQ ID NO: 5716 - protein, 1464 aa, synthetic construct
  REGION 1..1464: note = Synthetic
MKYIKYILGLDIGSNSIGWALIQLDLLQKTKRIIAAGSRIIPMDQKVLSDFGKGITISSTAQRTSYRNARHCRERHLLRRERLHRVLHILDFLPAHYDKQIDFSKKYGKFVDNTEPKIAYNEGKFLFMDSFQEMLADFKIHQPDLFYTKRNGEESKIPYDWTIYYLRKKALSRKISKEELAWIILNFNQKRGYYQLREEEENKENDFEIISSKIISVIKKDKDKKYNKYWYDIILENGLVYQAAFYNDFVYNWINQDREFIIERTSLKNGTEKVKLSYLPTFDEIDKMDKKEQDKYYKKIKIKTENSIGNKTVGCYIYDHILQNPNEKIKGKLVRTIERKYYKEELKAILEKQIALQPQLFTDQLLADCIRELYSKNEAQQRNLAARDFVHLFVEDIIFYQRPLRRQKSTIANCSLESRFYIDKDSHTRKEAPLKVCPKSNPYYQEFRVLQWLQNLKIYEIESDREVTHEFIKTLEDKQQLFDFLMAQKEIDCEELLKYFLSLTYPNAKEKALKSELKKWKDTYRWNYVYDIGEKSSKKYPMNETRYELKRYLEKVANLPDDFLSSEVEYLLWHLIYSVTDKVSYEKGLKKFAQKHHLDEDSFVESFKKFKPYPSEYGSFSEKAIRKLLPLMRFGSYWDFNHIDKNTQKRIDDLITGVENEEIRTILREKAEKYQLEKETDFQDLPLWLAQYIVYNRHAEASSLEKWTSVNDLETYLNEFKQHSLRNPIVEQVVTETLRVVRDIWQQYGQGQADFFNEIHIELGRELKKTAKEREDLSKQNQKNEDTNLRIRALLAELGEDSTIENVRPYSLMQQELLKLYEEGVFSSSIEIEDDIEKIHKKATPSKAELQRYKLWLEQKYKSPYTGQIISLKRLFTEDYEIEHIIPQSRYYDDSLSNKVICESVVNKAPYKDRQLGLEFIKNQGGRIVKELSKENKTIKIFTEKQYRTFIKEHYSNNPAKTKKLLLEEIPEKMVARQMNDTRYISKFISEILSKIVRSDEQDEGVHSKNVILCTGKITSILRQDWGLNDVWDNLILPRFERMDNLLQKEKFTIYSIEKQKKIPVVPINDQFKSFQKKRIDHRHHALDAIIIACVTGEHINYINNQHALEKGKDKKEKQKEHDKLREKLCIKKYNKGSEENYSWIFKKPWNTFTQEVRATLEGMVVSFKQNLRVINKATNYYERWVEENGKYIKKMVKQEGTNWAIRKPMHEETISGKIYLDREKITKNDILTATRKTVDSSFDEKRIKKITDTGIQKILLNYLEYKRSPEIAFSPEGLEELNKNLSIYNDGKPHKPIYKVRIYEKGSGRFALGEKGRKYKKYVQGAPNLYFGIYQGKDKRSFATIPLNEVIERQKQGQSSVPEYNEKGDPLLFNLSPNDLVYVPIEGEIIEDINFRNLSNEQKERIYKIVSFTKGRIYGIPNRVAISIVNKMEYTQLNKIEFIKEKEVCIKLKVDRLGNISKA

SEQ ID NO: 5717 - protein, 1499 aa, synthetic construct
  REGION 1..1499: note = Synthetic
MKHILGLDLGTNSIGWAVINATTDENTHKEQLIGINAAGSRIIPMDAAQLGDFNKGNTVSQTANRTQYRSTRRLHERKKLRRERLHRVLQLLGFLPPHYAAQLDRYGKFIANSEPKLAWVKNTNHLYHFIFQESFQEMLNDFTQADGSAKKIPYDWTLFYLRKKALTQKIKKEELAWILLNFNQKRGYHQLREEETEKPTSKTRLYFDSQTITDIVDTGETYKGLKIFTLTLANGEKGKWYGKNIPDWKGQKKDIIVSIDLDKNGNDKCDESGEPIRRFKIPTEQEWEEQWGLVKAKTEKDLNTSGKKVGTYIYDTLLQAPDQKIRGKLIRTIERKYYKEELYQILTTQEKFHPELQDKNLLQACIEELYPSNEAHRNTISKYSMSKLLVEDVIFYQRPLKSKKSLISDCPYEEHTYVDKETGEIHTVPVKCIAKSHPLFQEFRLWQFLSNLRIYQKEGTLNGKLTTDIDVTNEFLKNADDYVNLFDWLNQKKEIKQDAFFKYPAFGLKKNAANYRWNYVEDKTYPCNETHSRILFHWVKTDIDQSLLTIDLEEKLWHILYSISDKNELQKALQHFADKNKLGHKFVDTFQQIPPFKKDYGSYSAKAIKRLLPLMRMGKYWHPESIDNTTLTHIHQILNGEKDEVTASRIKGKAIHLDNLSSFQGLPTWLACYIVYNRHSEIKNITKWQQPSDIDAYLQSFKQHSLHNPIVEQIIMETLRTVRDIWKQIGHIDEIHVELGREMKNPADKRKKLTQQIQENENTNLRIKALLTEFVNPEFEIENVRPHSPSQQDLLRIYEEEVLNESAKNMPEDIATILKKFNETDAKKRPSTSDVLRYKCWLEQKYRSPYTGAMIPLGKLFTPAYEIEHIIPQSRYFDDSFTNKVICEAEVNKLKGNMLGYEFIKNNSGKIVELGFGQKVKIQTVEDYELFVKEHYSYNPVKMKKLLMEDIPEQFIQRQLNDSRYISKFIKSLLSNIVREEGESEATSKNIIVCTGGVTDRLKKDWGVNDVWNKIILPRFLRLNEITNSNLFTTTNTNNKIIPTMPLALQKGFNKKRIDHRHHAMDAIVIACANRNIVNYLSNESASKNAKISRLDLRQILCTRTKPDTFGNYQWIINKPWETFTQDVHTILENMIVSFKQNLRIINKTTNHYFRYQNGKKVQCVQETGDCWAIRKPMHKETVYGEINLRKITTVPLKSALENPQRIVEKDLKKKIKELLQQGLNEKQIKKYFEENKDTWQDVNLKKIQFYSFTKEGKERFFASRESLDTSFNNKKIEEKVADTGIQQILLHHLEQNNNDPNQAFSPEGIEWMNKNIISLNNGKWHQPIYKVRTYEQAEKFTVGQTGNKSEKFVEAAKGTNLFFAIYETEHKRSFASVSLNVVIERLKKGLSLAPENSKGNLPKYVLSPNDLVYVPTQEEIKCGHINQPIQKDRIYKMVSCTEGECHFIPYFVANPIIQTIELGSNNKAQKSWQNEMIKEICIPIKIDRLGNITSSISL

SEQ ID NO: 5718 - protein, 1481 aa, synthetic construct
  REGION 1..1481: note = Synthetic
MKNILGLDLGTNSIGWALIDDENKNIIKAGSRIIPMDAAAMSAYEKGNLQSSASVRTVFRGTRRLYQRATLRRERLLRILNIMGFLPDHFKEQIDFEKHPGKFKNNAEPLLPYRRTAEGNVEFIFMSSFQEMLNDFRSIHPDLVSNGKKVPYDWTIYYLRKKALKQPISREELAWIVLNFNTKRGYYQLRGNDETTTKKNEEYKILSVSQVVKLEADKRKKNFYWYEITYENGATQRKLSAAAPKQVGEKVELIVTTTEKKDGTIKISLRDPKDDDWTLRKKRAESIIDKEDKTVGEYIYDSILSDPNVKVRGKLIHTIERAYYKKELERILEKQAEFIPELEDHDLMMRCVCELYHNNEAHRDALKDRTFCQFIVEDIIFYQRPLKSKKSEISDCPFEYYIYKDKDGNIHQKHLKCIPKSNPIYQEFRLWQFVQNLRIFERERHDNGKLKSNVDVTNEFIRSESDIVALFEWLSEQKDISQDKLLKSSIFNIGKRSKEYRWNYVEDKVYPCNSTHAEFTKRLAEVKNTPVLNKEQEMNLWHILYSVEDRLELGKALHHFANKNGIDEESFVNAFVNIEPYGSDYGAYSEKATKKMLALIRCGKYWSLDNIDNKTKDRIQHILDGEVDESISLRVREKSLAMQSVDDFRNLPVWLASYVVYNCHSESFETSRWESPNDIDTFLKNGFKAGGLRNPVVESVLSESLRVVRDIWKKYGKIDEVHIEMGRNLKQNKEQRTKATNRQLENQRTNFRIRALLQEFVSPDYKIKDVRPNSPSQQEIFKIFEENILNSDIEIPDDIQSTVDALANPTSHVEKNDIMKYRLWLEQKYLSPYTGQPIPLSKLFTSAYEIEHVIPQSRYFDDSLSNKVICESEVNKEKGSMLAYEFIQKKGSSIIKGSEGKEYKVLDKTQYEDFVKAHYSKNASKKRILLMDDIPDNFIAKQLNDSRYIAKVALHIFSHLVREKGEMETVSKHVVATNGSITDRLKKDWGLNDVWNRIITPRFERMNEITNSNNYGEWVNKDGKQFFRINIPLEISQGFSKKRIDHRHHAMDAIVIACASRDHINYLNNVAALSNKKDERYDLRAKLCYKNKTDDRGNYQWQFKKPWDSFTQDAYNELDSIIISFKQDLRVINSMTNYYWHYVYGKKVLSKQTVGDSWSIRKSLHKATVSGAVRIQEVRKVKLIDALEHIEFIKDKQIRKHILKVKRDVLNNTSNKKEIINYYKKQKFLINKKDISKLEVYYIPDIPNKTATRVAVDTSFTQKIIDSVTDSGIRRILTKHLHLYDDDKGKEHPELAFSPEGLEAMNKNIQALNSGKEHKPIVKVRKSEALGAKFNVGEQGSKPKKYVEADKGTNLFFAVYVDEKGNRSFESIPFNEAVERLKQGMSVADDVKATGEKLLFTLSPNDIVILEGGGSTLYYRFVSCTNTRAYFIPMSIASVISDKVEYGTLNKIENNENRLSIKHYCQKVIVDRLGEISRVIK

SEQ ID NO: 5719 - protein, 1089 aa, synthetic construct
  REGION 1..1089: note = Synthetic
MKKILGLDLGTNSVGWALIAQDTSERKGEIIGLGSRIIPMSQDLLGDFGKGNSVSQTAERTRLRGVRRLRERYLLRRERLHRVLHILGFLPENYASQIDFTERVGKFFPEKEPKLAYDDSGNFLFSAYFEEMLTVFNARQPELLSQGRRLPQGWTLYYLRKKALTEKISKEALAWVLLNFNQKRGYYQLRGEEQEENPHKLVEFHTLKVVKIEKDPEVNSKGDTWYSLHLENEWVYRRSSKVPLDDWLGKERDFIVTTDLDKEGNPKLDRDGQIKRSFRAPSEDDWGLVKKKTERELERSGTTVGAYIFEQLLLNPQVKVKGKLIKTIERKFYKEELLKIMRTQEAFHPELRDEQLLADAVRELYKHNKGHQHVLLGKDLSHLLIEDILFYQRPLKSQKSSIANCPLEKRYYEKEGEQVELPQKVTSKSHPLFQEFRLLQWLANLRILRKADNKDVTAAFIRSWEEKEQLLHYLSSVEKISNDIVLKFLLGLHGFKGKALQAEVQKYRWNYVFDSETNESKEYPGNTTRADFMARLNRVVNFDKEQYTPEFEESLWHIVYSVTDKQEFERALKRFARKWSLDEETFFAAFRKIPPFKSDYASYSLKAIKKLLPLMRFGSSWNESAIDTESRRRIDLVLDGEYDPEVKDKVRELSVDFTSVAEFQGLPLWFASYLVYGRHAEASELVKWNSSEELAQFIKDFKQHSLRNPIVEQVIVETLRVVKDIWDTYGEGRKDFFDEIHIELGREMKNPAEVRQRMTRQQSEQENTNLRIKAFLLELLKDPDVEDVRPYSPMQQDILKLYEEGALLAAEDIPEDILKISKAPQPSRSDFQRYKIWLEQQYCSPYTGKLIPLNKLFTPAYEIEHVIPQSRYFDDSMSNKVICEAAVNKLKGNKLGLEFIQAHGGERIQLGYGEEVTIFTEAQYKGFIEDKYARHPVKKRKLLADELPESMIERQLNDTRYISKYIAGILSCIVRAEEQDTGFNSKNVVPGSGKVTGVLKQDWGLNDVWNSLILPRFERMNQLSGSNDYTAWNEKHQKFLPTVPLEMAKGFQKKRIDHRHHALDALVVACTTRTHIQYMNNEHARKKSL

SEQ ID NO: 5720 - protein, 1239 aa, synthetic construct
  REGION 1..1239: note = Synthetic
LDKNGNDKCDENGEPVRHFKIPTEKEWEEQWGLVKAKTEKDLNTSKKTVGTYIYDTLLRTPDQKIRGKLIRTIERKYYKDELYQILTTQEKFHPELRDGNLLQSCIEELYHNNEAHRNTISKYSMSKLLVEDVIFYQRPLKSKKSLISNCPYEEHTYVDKETGEIHTASVKCIAKSHPLFQEFRLWQFLSNLRIYQKEGILNGKFTTDIDVTNEFLKNADDYTNLFDWLNQKKEIKQDAFLRYPPFGLKKNVANYRWNYVEDKTYPCNETHSRILLYWEKAGIDQSILTTDIEEKLWHILYSISDKNELQKALKHFADKNKLEDKFADIFQQIPPFKKDYGSYSAKAIKKLLPLMRMGKYWHLESIDNATLTRIHQILNGEMDEATASRIKEKYIHLDNFSSFQGLPTWLACYIVYNRHSEIKDITKWKQPSDIDAYIQSFKQHSLHNPIVEQIIMETLRTVRDIWKQIGHIDEIHVELGREMKNPADKRKKLTRQIQENENTNLRIKALLTEFANPEFEIENVRPHSPSQQDLLRIYEEEVLNESAKNMPEDIVTILKKFNETDAKKRPSTSDVLRYKCWLEQKYRSPYTGAMIPLGKLFTPAYEIEHVIPKSRYFDDSFTNKVICETAVNKLKDNMLGYEFIKNHSGQIIELGFGQKIQIQTVEAYEQFVKEHYSYNPVKMKKLLMEDIPEQFIQRQLNDSRYISKFIKSLLSNIVREEGESEATSKNIIVCNGSITDRLKKDWGVNDVWNKIILPRFLRLNEITNSDHFTTTNTNNKIIPTMPLALQKGFNKKRIDHRHHTMDAIVIACANRNIVNYLNNESASKNAKISRMDLRQILCKKTEPDALGNYQWIINKPWETFTQDVYAVLANIIISFKQNLRIINKTTNHYFRYQNGKKVQCVQEKGDNWAIRKPMHRETFYGEINLRKVNTVSLKVALENPQRIVEKDLKKKIKELLQQGLSEKQIKKYFEENNDIWQDVNLKKIQFYSFTKERKERFFASRESIDTSFNQKKIEKQVSDTGIQQILLRHLRQNNNDPNLAFSPEGIEWMNKNIISLNNGKWHQPIYKVRIYKQATKFAIGQTGNKTTQFVEAAQNTNLFFAIYETEHNRSFASVPLNVVIERLKKGLPPTPEDSKGNPPKYVLSPNDLVYVPTKEEMENRHINQPIQKDRIYKMVSCTEGECHFIPYFVAKPIIQTIELGSNNKAQKSWQDEMIKETCIPIKTDRLGNIITLISL

SEQ ID NO: 5721 - protein, 1248 aa, synthetic construct
  REGION 1..1248: note = Synthetic
MKHILGLDLGTNSIGWAVINSNFDEATQKEQLKGIEAAGSRIIPMDAAQLGDFNKGNSVSQTANRTQYRSTRRLYERKKLRRERLHRVLQLLGFLPSHYAGQLDRYGKFIANSEPKLAWEKGANNLSYFIFQESFQEMLKDFSQEDRCTKKVPYDWTLFYLRKKALTQKIEKEELAWILLNFNQKRGYYQLREEEAEKSTSKTRQYFDSQIVIDIVDTEETYKGLKIFTLTLANGEKGKWYGKNIPDWKGQKKEIIVSIDLDKNGNDKCDENGEPVRHFKIPTEKEWEEQWGLVKAKTEKDLNTSKKTVGTYIYDTLLRTPDQKIRGKLIRTIERKYYKDELYQILTTQEKFHPELRDGNLLQSCIEELYHNNEAHRNTISKYSMSKLLVEDVIFYQRPLKSKKSLISNCPYEEHTYVDKETGEIHTASVKCIAKSHPLFQEFRLWQFLSNLRIYQKEGILNGKFTTDIDVTNEFLKNADDYTNLFDWLNQKKEIKQDAFLRYPPFGLKKNVANYRWNYVEDKTYPCNETHSRILLYWEKAGIDQSILTTDIEEKLWHILYSISDKNELQKALKHFADKNKLEDKFADIFQQIPPFKKDYGSYSAKAIKKLLPLMRMGKYWHLESIDNATLTRIHQILNGEMDEATASRIKEKYIHLDNFSSFQGLPTWLACYIVYNRHSEIKDITKWKQPSDIDAYIQSFKQHSLHNPIVEQIIMETLRTVRDIWKQIGHIDEIHVELGREMKNPADKRKKLTRQIQENENTNLRIKALLTEFANPEFEIENVRPHSPSQQDLLRIYEEEVLNESAKNMPEDIVTILKKFNETDAKKRPSTSDVLRYKCWLEQKYRSPYTGAMIPLGKLFTPAYEIEHVIPKSRYFDDSFTNKVICETAVNKLKDNMLGYEFIKNHSGQIIELGFGQKIQIQTVEAYEQFVKEHYSYNPVKMKKLLMEDIPEQFIQRQLNDSRYISKFIKSLLSNIVREEGESEATSKNIIVCNGSITDRLKKDWGVNDVWNKIILPRFLRLNEITNSDHFTTTNTNNKIIPTMPLALQKGFNKKRIDHRHHTMDAIVIACANRNIVNYLNNESASKNAKISRMDLRQILCKKTEPDALGNYQWIINKPWETFTQDVYAVLANIIISFKQNLRIINKTTNHYFRYQNGKKVQCVQEKGDNWAIRKPMHRETFYGEINLRKVNTVSLKVALENPQRIVEKDLKKKIKELLQQGLSEKQIKKYFEENNVKIAQKITSKN

SEQ ID NO: 5722 - protein, 1555 aa, synthetic construct
  REGION 1..1555: note = Synthetic
MKTILGLDLGTNSIGWALIRHNFENKEGEILGMGSRIIPMSQDVLGKFDSGQSISQTAERTGFRGVRRLLERDLLRRERLHRVLNIIGFLPEHYANDIDFEFRLGQFKENKEPKIAYKEISPKKFEFIFQNSFNEMLEDFKTHQPELVEDGKKVPYDWTIYYLRKKALTQRIEKGELAWILLNFNQKRGYYQLRGEDEEVDASKSINFYALKVEKVEEAEKGKNNDVWYNVHLENGWVYRRSSKTFLDWEGKIKEFIVTENLNKDGTIKVDKEGKESRSFKAVDSEQDWIAIKKSTEEKIENSDKTVGAYIYDTLLQKPNQKIRGKLIRTIERQFYKNELKKILEKQKEFHPELQDRNLYNSCLEELYAYNEAHRRSIADRDFTYLFLDDIIFYQRPLKSKKSLISQCSLETRTYRSDDGTYKTEGVRCIAKSNPLYQEFRLLQWMKNLKIFRKDDTEDKDITADLLTANDWEKLYEWLNDKSEISQIELLKYPSFGLEEVLRKEIGQGLRKVTKKEIEEKLLEKYRWNYVEDKVYPLNETRGEILKRLQKAKIPFDFLTFANELRLWHILYSVEDKNEIESALKKYAEKNELPESFVETFRKFPRIDKEYGSFSEKAIKKLLPLMRFGKWWNFSAIDAKTKGRIEKIQTGEFDNSIKNRVRDKAIHLTQNEDFQNLPLWLASYIVYDRHSESADVQYWNTADKIELLKQHSLRNPIVEQVINETLQTVRDIWKEFGEGKEKFFDEIHVELGREMKNPADKRKKMTERITENENTNIRLKTILLELLNDGDTNVRPYSPMQQEILKIYEEGVYGSETRQDELDEIDKIRKKAQPSLSELRRYKLWLEQGYKSPYTGEIIPLSKLFTPAYEIEHIIPQSRFFDDSLSNKIICETEVNELKGNQLACEFIKNNNELKIELSHGKFVKLLSPDAYEENVKRYYAKNKAKLQKLLLEDIPEKFIERQLNDSRYISKVVTALLSNIMRQEGESEGTARNVIVSSGGITARLKQDWGLNDVWNTLITPRFERLNKMAGYEKYGSWENKDGKNVFQINTIEPELLKLNKKRIDHRHHALDALIVACSSRNHINYLNNQSAAKDKKSERFDLRNKLRHIETYIDKDGKRRTAAKEFLKPWETFTQNTKEELQKIVVSFKKNNRVINKTVNKHQKWIKQPDGTTKKVFVTQTKGDSWAIRKPLHKDTVSGLVNLRLKKSITLAAALDNIENIDNKSLRKKILELQKAGYNKKKIIKYFKDKKNEWLGEDISRVEIYYFTNEAESTKLAASRVKLDESFNEKRIETITDTGIQKILLAHLEKYKGQTDEKGKEIPAQSLAFSPDGLDELNNNLTELNGGKPHAPIYKVRTYEKLGNKFNVGVSGNKKDKYVEAAKGTNLFFAIYADEEGNRSYETVPLNVVIERQKQGLPSCPATNDKGDRLLFDLSPNDLVYVPTPEEMENPSNVDFNNLSKEQVKRIYKFVSCTGSEGHFIPNSNAFEIIKNENGTNSKSERMQEFSDGNTIYDVKNNPIQIKATCWKLSVNRTGKINIFTAKKISEKFNNHQ

SEQ ID NO: 5723 - protein, 1533 aa, synthetic construct
  REGION 1..1533: note = Synthetic
MKKNLGLDLGTNSIGWALVNHNFENKQGEILGMGSRIIPMSANILGDFEKGNPVSATADRTHFRGVRRLIERDLLRRERLHRLLNIIGFLPQHYANDIDFEHRLGQFKKDKEPKIAYRKNSNGKFEFIFQKSFEEMVADFRETQPQLFYTKPNGEETKIPYDWTIYYLRKIALSQKIEKEELAWILLNFNQKRGYYQLRGEDEEIEDNKNKSFEILKVAKVVDSGDKIRGTDTILYDVFFENGWKYDRQTTKPEDWIGKTKEFIVTTTTLSTGETKLSFKAVDSEQDWIAIKQKTEQDISNSDKTVGKYIYDTLLQQPNQKIRGKLIRTIERKFYKDELRQILEKQKEFHSELQDRNIYNSCIEELYEYNDAHRNSISNRDFTYLFVDDIIFYQRPLKSKKSLISNCSLEFRTFKVDGVERREGIKCIAKSNPIYQEFRLLQWMKNLKIFKIDDKQDIDITDELLPSIADREKLYEWLNDKTEIDQKAFLKYPDFNLDERIKKEIGLEQFRIFKKDKEQGLHTYYRWNYVADKKYPLNKTRGEILKRLTKIGISSDFLNRNNETHLWHILYSVEDRNEIISALNKFANKHNLPEIFVDTFRKYPRIDKEYGAYSEKAIKKLLTLMRFGKWWDFSAIDENTKDRVDKIQTGEYDEKIKNRVREKAINLTGNNHFQDLPLWLASYIIYNRHSEASEIKYWRTANDIELLKQHSLRNPIVEQVINETLQTIRDIWNHYGEGKENFFDEIHVELGREMKNPADKRRKITERVMENENTNIRIKAILTELLNEGDNNVRPYSPMQQEILKIYEEGVYHNENRADELNEIDKIRKKSQPSSSDIKRYKLWLEQGYKSPYTGEIIPLSKLFTPAYEIEHIIPQSRFFDDSLSNKVICESEVNSLKDNQLAFEFIKNNKELTIELSHGKFVKLLHPDAYEENVKRYFAKNKPKMRKLLLEDIPDSFIERQMNDTRYISKVVKMLLSNIVREENEEEGTAKNVVVSNGGITNTLKQDWGLNDVWNTLITPRFERLNQMAGYEKYGSWENKEGKQVFQINTIEPELLKLNKKRIDHRHHAMDALIVACSSRNHINYLNNAAAAKNKQSERFDLRAKLRRIENFTDKDGKQRTAAKEFLKPWDTFTQDAKKELNHTVVSFKKNNRVINKTVNYYQKWVKQPGGSMKKMLVKQEKGDSWAIRKPLHVPMPYGLKEYSFDNLKIAENVGKKDFIIDDYIRNEVEKHFDLNNRKITDTQKFLKKNPIKDKYGNIILTTDFNIRSKKFRKRMPILKLADRSSGRGITSLDSMIKFLNKISDKTLKNDLFSHLKDNDNDINVAFSIEGIERFNSKRKTPVYKLPITESGEKRFVLGNSIGSKHKWVEAEAGTNLFFAIYIDNEGNRNYETIPLNIVIERQKQGLPSCPELNEKGHNLLFDLSPNDLVYVPSLEEQENPNSVDFNNLSEEQVKRIYKFVSCTGIEGYFVPNTNASEIIKNENGTNSKSERVQDFYDNKTILDNSGKPIQIKSVCWKLETNRLGQIKKVLR

SEQ ID NO: 5724 - protein, 1528 aa, synthetic construct
  REGION 1..1528: note = Synthetic
MKKILGLDLGTNSIGWALIIEDLRKVEGLGSRIIPMSQDILGKFDSGTSVSQTAERTDYRGVRRLRERHLLRRERLHRVLNILGFLPEHYRNSIGWDKSDYKTFGKFLINLEPKFSWRKDSEGNYEFLFKTSFEGMLNDFAVNQPELLTGSKKIPFDWTIYYLRKKALSEEISKEELAWIVMNFNQKRGYYQLRGEDEDNSQKNEYVIQLRVEEVIERDVDKKNPKKKWYDIKLENGWIYSATFLAEPKWFGLNKEFLVAEDIDENNLIKLTKDGTPRRKLSVLPTFDEIELMSQADKDKIYKKIKAKTEATISNSGKTVGRYIYDTLLKNPSQKIKGKLVRTIERKFYKEELKAILEKQKEFHEELCNKDLYNLCINELYPNNKTQINSIANRDFTYLFIDDIIFYQRPLKSKKTLISNCPYEERLFVGEDGKLQKASIKCVAKSHPLYQEFRLWQFVKNIRIYQKEKDVNGSLKTDVDVTSEFLKNEDDYATLFEWLNDKKEVKQDSFLKYPVFGLKKNAENYRWNYVEDKPYPCNETRTLILNGLEKLNISFDFLTKEKEEMLWHILYSVEDKHEIEKALHSFAHKDALDEEFVEVFRKFPPFKKDYGSYSAKAIKKLLPLMRMGKYWSEQAIDEKTRERISKIINGECDEKISSRVREKAISLKDISKFRGLPEWLACYVVYNRHSEAKEITKWEKPEDIDAYLKSFKQHSLRNPIVEQVITETLRAVRDIWKKAERIDEIHIELGREMKNPADKRKQMTQQVSENENANIRVKRLLMEFLNPEFEVENVRPYSPSQQDILRIYEDGVLNSVDEIPLEVETILKKFKESDAKKQPTRNEILRYKLWLEQKYRSPYTGEMIPLGKLFTPAYEIEHVIPQSRYFDDSFSNKVICEAVVNASPYKDRQLGYEFIKGFGGQIVPELSSPNKTVKIFTIEEYERFVKQNYSKSRGKMKKLLMEDIPDSFIERQLNDSRYISKVVKSLLSNIVRAKEENGEYEQEAISKNLITCTGGVTDRLKKDWGLNDVWNDIVYPRFVRLNEITQSNQFGQWENKDGKRVFQTTLPIDNQKGFSKKRIDHRHHALDALVIACATRNIVNYLSNESANKKAKISRYDLQNLLCNKTKTDEKGNYKWVVNKPWDTFTQDTRLALEEIVVSFKQNLRVINKTTNFYQHFDGDGKKQFDKQVKGDSWAIRKPMHKDTVFGKVNLRKIIKVNLVNALENPSRIVDKEFKKKIIELLGSGSDAKKIANYFKVNSEIWGDLNLSKIDFYIYSEETKESFVATRKNVDSSFNAKKIQEGITDTGIQKILLKHLENKGGDTELAFSAEGIDEMNKNITELNNGKSHKPIVKVRVYEPMGNKFNIGVNGSKSLKFVETAKGTNLFFGVYQTIERKRTFETIPLNVVIERQKQGLKSVPELNDKGDELLFWLSPNDLVYVPTQEEITNGCNINSITDKGRIYKMVSCSSYVADFIPAFVANSILQAIELGSNNKSQRAWTNEIIKEICLPIKVDRLGNITEVNGKSVL

SEQ ID NO: 5725 - protein, 1538 aa, synthetic construct
  REGION 1..1538: note = Synthetic
MKKILGLDLGTNSIGWALVDIDEKRIEGMGSRIIPMTQDVLDTFSGGKPLETQTAARTAYRSTRRLRERHLLRRERLHRVLNILGFLPEHYSNLIDFNKKLGQFSGETDAKLAYNNRDFLFKKSFEEMLIEFKQSQPQLFYTKPNGKETKIPYDWTIYYLRKKALSHKIEKQELAWIILNFNQKRGYYQLRGEDDTDATRTAQTRVYFDTQVIDNITDTGNVYKGLKIIQVTLANGDMGKYFSKDVPKWIGSQKNIIATIDLDNDGNDRLENDGTLKRRFSIPTEEDWEKKWKLIKIKTEKEIKDAGKTVGDYIYESLLKNPSQKIRGKLVRTIERKLYKEELVDILKKQLELQPEFFTDDLYNECLSELYRNNKAQQLVLSKRDFVHFFVEDIIFYQRPLRSQKSSIGNCSLEYRVYKDKDGNQIKEYLKVIPKSHPLYQEFRVWQWLSNLKISKKEDDIDVTAQFIKNLDDNVSLFEYLMLQKEIGHKDILKHLLSPILKEKYPNAKAAAFNKEVDKEISKYRWNFVFDDSKEKEEDKSKKYPCNTTGYEIRRRLEKVADVSDDFLEITDIEDVVIKKGENKGKKITVSLGTREIQLWHIIYSVTDKNEYKSALGKFAKKYLLDEDSFVANFEKFPPFKSEYGSYSEKAIKKILPLLRMGKYWNWIAIDNKSQVRIEKIVTGEYDENIKNRVREKTINLTDNNHFQGLPIWLSSYIIYDRHSEAKNSDQWQMSQDIQQYLYSFKQHELRNPIVEQIITETLRVVKDIWEIYANKSNIPYSMVYDLKKKKNVKSYNCFFDEIHVELGREMKNTADDRKWLTEQVSNNEATNLRIKALLMELKENSDGKLLVENVRPHSPMQQDALKIYEEYALQNNEKYDENKKEFIVYPIAEDILKISKTAQPSKAELQRYKLWLEQRYRSPYTGNMIPLGRLFTEDYQIEHVIPRSRYFDNSFNNKVICESAVNQLKDKFLGLEFIKEYFGQEVELGLGKRARIFTENEYKDFVKDHYSKNKTKRQNLLLEDIPEQMIARQMNDTRYISKYISSLLSNIVRADKEDDGINSKNLIPGNGKITTALKKDWGLDSVWNDLILPRFERMNQLTNSDDFTYWNEQYQKFLPVDYSPADSKRIEKKRIDHRHHAMDALAIACMTRDHVNLLNNQSAKSETSRYDLQNKLRCKSRETWFDKKINKQVERDVFKEFKKPWDTFSTDANNALKTIIISFKQNLRVINKATNNYEKWIEKDGKKVKEKVKQEGINWAIRKSLHEETVSGKIDLPWVNVSKGNFLTATRKNIDSSFTIEKTRKITDTGIQKILEEHLKQNQNNADLAFSPQGLEDLNRNIAELNDGKNHKPIFKVRLYEMGSSRFSLGLKNNKQSKFVQGAPNLYFARYSDSNNKKVYETIPLNIVIERLKQGLEAVPEKNTEGYSLQNFLSPLDLVYLPTVEEFDMPHLIDFSKLNKHQIERLYNVNDFSGVTAYFIQNSFAKNIYPKEMDLSWNDKKQKLSGSFDSKTASYNKRSIKEICIKLKVDRLGNISL

SEQ ID NO: 5726 - protein, 1204 aa, synthetic construct
  REGION 1..1204: note = Synthetic
LDDWKGKTRDFIVTTDLNDDGTIKLDKEGKEKRSFRAPDENDWNLLKKKTEHDIDFSGKTVGAYIYDHLLQNPNQKIKGKLVRTIERKYYKDELKAILAKQIALQPELFTETLLADCIRELYRKNETQQQNLLSKDFPHLFVEDIIFYQRPLRSKKSTIANCTLEKRSYIDKETNERKDAPIKVCAKSNPYYQEFRVLQWLQNLRIYEIETDREITAEFIETAEDYEALFNFLMSQKEIDNEGLLNYFLFAKNPQIKDKVAKSELKKWLTTYRWNYVYDAADNSSKKYPMNETGYDLQRYLQKVEGLPANFLTFDITYQLWHLLYSVKDKVEFEKALKKFAQKYQLDEVSFVDSFKNFKPYPNEYGSFSEKAIKKLLPLMRFGNHWDFNRIDVSTQKRIDDLINGVANEDIRTIIREKAEKYQLNSESCFQGLPLWLAQYVVYNRHAEATDIEKWTSVSDLETYLEDFKQHSLRNPIVEQVVTETLRVVRDVWQQYGRGQANFFDEIHIELGRELKKTAEERKQLSDKNQENENTNLRIKKLLAELKEDASIQNVRPYSPVQQELLKIYEEGVFSATDEVEEDIQKIRKKAEPTTPEIQRYKLWLEQKYKSPYTGEVISLTKLFTEEYEIEHIIPQSRYYDDSLSNKVICESAVNKLKTNQLGLEFIQNHHGEKVRITANKEVTIFTEEQYKEFVKKHYANNSAKQQKLLLNEIPEKMVTRQLNDTRYISKYISEILSKIVRSDEKDEGVNSKNIIPCTGKITTALKQDWGLNDVWNELILPRFERMNQLTQTQLFTSYNDRLQKNLPTVPIEYSQGFQKKRIDHRHHAMDALVIACVTREHINYMNNQHALDKSKDKKEKQQSRIDLRTILCEKKNNNWQFKKPWSTFTQEAKEALEHIVVSFKQNLRVINKATNYYEKWEEKNGVLVKKKVKQEGTNWAIRKPLHKETVSGKIVLDRKIGKDKILTATRKAVDITFTEKIISSITDTGIQKILLNYLKYKGSPEVAFSAEGLEELNKNIAQYNDGKKHQPIYKVRIFEEGSKFPLGETGAKATKYVEAAKGTNLFFGVYQGKGKRTYATIPLNEVIERQKQGLPSVPERNEKGEPLLFSLSPNDLVYVPMEGEIAETIDFNNLSKEQKERIYKTVSFTGNQCFFVQEAVATPIVNKMEYSPLNKMERDILGTMIKEVCIKLKVDRLGNITKA

SEQ ID NO: 5727 - protein, 1463 aa, synthetic construct
  REGION 1..1463: note = Synthetic
MKRILGLDLGTNSIGWALIEQDFKKKQGKILGIGSRIIPMSQDLIGDFGKGNTISQTAERTSYRGVRRLRERHLLRRERLHRVLNVLGFLPKHYALQIDFEKRLGQFRENLEPKLAWNKNEKGNFEFIFQESFDEMVEAFVANGHDSKIPYDWTIYYLRKKAITQKIKKEELAWIILNFNQKRGYYQLRGEEEEENPNKLVEFHSLKIVDIQSDEELNKKGETWYSLVLENGWVYRRSSKTDLSDWKGKVKDFIVTTDVNDDGSIKTNKEGEPKRSFRAPKEDDWTLLKKKTEQEIINSDKTVGAYIYEALLQNPSQKIRGKLVRTIERKFYKKELKAILKKQIELQPELFTTDLYNGCIRELYRSNEGHRLQLKSKNDFVHLFLNDIIFYQRPLKSQKTSIGNCSLEYKTYKIKDGLEQTQFLKGIPKSNPYYQEFRVWQWMYNLKIYSKKDDADLTSKFIKSTEDQEKLFGFLMSKKEVNHIDILNYFLEPLVNAKFPNAKPKALKTELAKEIAKYRWNYVFDDSKDKEDEKSKKYPMNETGYEIGRRLEKVENVPVDFFTRKIEQQLWHIIYSVTDKNEFEKALKTFADRNSIDINSFKESFKNHKPYVSEYGRYSEKAIKKLLPLMRTGKYWEWDNIDSKIKSRIDKLISGEFDEEIQNRVREKAINLTEHVHFQGLQLWLAQYIVYDRHSEASDAGKWSSVADLDDYLREFKQHSLRNPIVEQVVTETLRVVKDIWNQFGKGEKDFFDEIHIELGRDLKNPSDKRKRISNTIAENENTNLRIKSILSELLNDKSVENVRPYSPMQQEALKIYEEGVLNSGIDVPDEIERISHKAEPSKSEIQRYKLWLEQKYKSPYTGRPIPLNKLFTSAYEIEHVIPQSRYFDDSISNKVICESEVNSLKDRQLGLEFIKNHHGQKVSTVFGVVEILNEEVYTEFVNNHFHKNRSKRSKLLLEDIPDKMIERQLNDTRYISKFVTNLLSNIVRSDKNDDGVNSNNIISINGKITSKLKQDWGINGVWNDLILPRFQRMNELTESNDFTSWNDKYQKYLPTVPLELSKGFQKKRIDHRHHAMDALVIACATRSHVNYLNNTSAKVEDLKSEARKKKQIELRTQLKNSLCFKTKPDKDGNYKWIFNKPWSGFTVDVKNELEGIVVSFKQNLRVINKATNYYEKIENGKKVKVEQKGVNWAIRKPMHKETVSGFVELPRIKVPKGKILTATRKNLDTSFNQKVIDSITDTGIQKILKNYLLSKGGKPDLAFSPEGIEDMNRSIHFFNDGKPHKPILKVRIFEVGTKYPVGYEGNKKTKYVEAAKGTNLFFAIYFDNKTKKRIYETIPLNIVIERQKQGLSSVPDKDEKGNRLLFHLSPNDIVYVPTKDEVEDISNIDFRNLSSEKVNRIYKVVSFSKAQSFFIRNDVAISIVNKEEFSSLNKMERSMDDQMIKDCCIKLKVDRLGNISRA

SEQ ID NO: 5728 - protein, 1551 aa, synthetic construct
  REGION 1..1551: note = Synthetic
MKKILGLDLGTNSIGWALVNHDYNEMQGKVLGIGSRIIPMSQDIKDEFGKGNSVSQTAERTGFRGIRHLRERSLLRRERLHRVLNVLNFLPPHFASQIDFQKRLGQFIKDAEPKLAYNNNDFIFRTAFEEMLEDFKKKQPEIIKDGKKVPYDWTIFYLRKKALTQKISGEELAWILLNFNQKRGYYQLRGEEDEENKNREVAFYSLEIVDVIADEEPNKKGETWYSLILENGWVYRRSSKTSLLDWKNKTRDFIVTTELNHDGSVKLDKDGVEKRSFRAPGADDWGLVKAKTQNEIIKSEKEVGEYIYDELLKNPTQKIKGKLVRTIERQFYKNELIAILKKQIALQPELFTNELYDDCVRELYRNNEAHRINLGKRDFIHLFVDDILFYQRPLRSQKSSVSNCTLEYRIFKVKDKEGNPVEKKEYLKAMPKSHPLYQEFRVWQWLFNLKIINKDDNSDVTSTLLKTSEDLEQLFAFLMTQKEVNHKDVLGYLLTPVIKEKFPSAKPAAFNKELAKEIAKFRWNYVFDDSKEKEDDKSKKYPCNETGFEIKRRFQKVINLPDGFLTPKIEYQLWHLIYSVNDKKQYEQALGSFARKHDIDEASFVENFKKFPPFKSEYGSFSEKAIKKLLPLMRLGKYWDWNAIDSKTKNRIEKIITGEYDENIKNRVREKAIHLYKENDFNGLQLWLAQYVVYDRHSEAALAGKWNSVAELEQFLKDFKQHSLRNPIVEQVVTETLRVVRDIWIKYGNGQKDFFDEIHVELGREMKKTADERKRLTGKMSENENTNLRIKALLAELLSDSNIQNVRPFSPMQQEALKIYEDGVLNSNIPIPDDILKISKTAQPTKSELQRYKLWLEQKYCSPYTGQIIPLSRLFTNDYEIEHIIPQSRYFDDSFTNKVICESAVNKLKDNQLGLEFIKKHGGTIIETGFNNTVTVFTEDAYKAFIKEHYSKNFAKRSKLLLEEIPDKMIERQMNDTRYISKFISQILSNIVREETNDDGVNSKNVLPGNGQITTILRQDWGLNDVWNELVLPRFERMQRLRTEKDIAEGVSFIAANKNGKPIPELQPVALQKGFQKKRIDHRHHALDALVIACATRDHINLLNNTFAKSNQRFDLNRKLRKFVKVSYIDAQTGDRKEKEVPKEFIKPWETFTQDTKNVLESIVVSFKQNLRVINKTVNRYQSYRDEHGNLRIGKDGKPKKDVIKQVKGDSWAIRKSMHKDTVSGAVKLRKVKEVSLSVTLDNYNDIVDRSLRKHILKLIERKYDKKQIIKYFKDNENNWNSLNVSRLKIYYWDNGNVATRQNLDVSFNENRIIETITDTGIQKILLKHLEQYKGIIDEKGKEIAPEMLAFTPEGIDEMNKNIIALNNGKFHHPILKVRTYEPKGSKFSIGQKGNKANKFVEAAKGTNLFFAIYQGENGQRSYDTVPLNIVIERQKQGLNSVPETNEKGESLLYCLSPNDLVYVPTEEERDNINAVDFNSLSTSQVKRIYKMVSTTQDKLECVPVHYASPILVNEMGSNNKSQNSTDGTQIKQVCVKLNIDRLGNVTRALR

SEQ ID NO: 5729 - protein, 1261 aa, synthetic construct
  REGION 1..1261: note = Synthetic
LDWNGKIKEFVVTTELDEAGNPKVDKDGNVKRSFRAPKEDDWNLLKKKSESIIDQSKLTVGTYIYESLLNVPNQKIRGKLIRTIERKYYKDELKAILDAQKNFHPELNDRDLYYACVNELYPSNESHREMLSTHDFTYLLIEDMLFYQRPLKSKVSLIADCPYEARIYKDKEGNKCSVALKCIAKSHPLFQEFRLWQFISNLRIYQREKKIGTSLKTDVDVTSEFLRNEDDYVALFDWLYEQKDISQKKLLGYKPFQLKKNEQINYRWNYVEDKLYPCNETRWAITSRLEKIGIPSSFLTKEMEESLWHILYSITDKQEIEKALQTFADKHQLDTAFVSAFAKMPPFEKEYGAYSQKAIKKLLSLMRMGKYWSEKNIDPKTKERIEKILSGVCDETIRMRVRDLAFHLQEITSYKGLPLWLACYVVYDRHSESKDIDKWEKPSDIDEYLKAFKQHSLRNPIVEQVITETLRTVRDIWKQEGKFDEIHIELGREMKNPADKRAKMTAQALENENTNLRIKALLTEFMNPEFEIENVRPYSLSQQEILRIYEDFALSNEPNIPDDVALILKKFRESDVHKRPTRSEVLRYKLWLEQKYRSPYTGEIIPLGKLFTPAFEIEHIIPQSRYFDDSLTNKVICESAVNKLKDNSLGYEFIQKHHGEKVALGNGKQTTIFSVEDYEAFVKQHYAANRAKMEKLLLEDIPEKFIERQLNDSRYISKVVKSLLSNIVREENEQEAISKNIIVCTGGITDRLKRDWGIMDIWNKIILPRFQRLNKLQGTNDFTTISAQGHEIPAMPLYLQKGFNKKRIDHRHHAMDAIIIACANRNIVNYLNNASALKGSTITRYDLQHILCEKTKSDANGNYQWVLRKPWETFPQDVYQALKEIVVSFKQNQRVINRTTNHYQHYDATGKKVLVKQTKGDSWAIRQPIHKDTVFGEVNLRMKKTVSLNEALKRITSIVDKDLKHKLQELVKSQYNVKQIKKYFEDQADVWQDINLKKIEIYYYTQETKDRYFATRKPLDTSFDRKEIEESVTDTGIQKILLNHLERNQGKAEIAFSPDGIDQMNQDIISLNEGKKHQPIYKVRYYEKADKFAIGKAGNKSRKFVEAAKGTNLFFAVYETTEEDKQTGNLTKKRSYASIPLNVVISRQKRGLPSAPENENGDSPVFVLSPNDLVYVPKQEELNTGDIQFPIDRNRIYKMVSCTGNEAHFIPVYIANPIIQTVELGSNNKAQKSWTEEMIKEVCIPLRVDRLGNISLLNQSE

SEQ ID NO: 5730 - protein, 1012 aa, synthetic construct
  REGION 1..1012: note = Synthetic
MLIKKRTEADIANTRKTVGSYIYDTLLQKPQQKIIGKLVKTVERKLYKEELNLILQKQCAFHAELRDRDLYMRCIEALYPGNEMRRKNIVNRDFIYLLIDDILFYQRPLKTKKTLISNCPYEENEYVNRETGEIKKAPLKCIAKSHPLFQEFRLWHFLSNIRVYQKEKKVNGTLHLDVDVTAEFLRTEDDYVALFDWLNSRKEIDQKAFLKYPKFGLKKEIDNYRWNYVEDKLYPCNETRYAILSRLEKVGVSIDFLSDEKETVLWHILYSVSDKQEIEKALRTFAVKNGLNESFVEVFKKFPPFKSEYGAYSAKAIKKLLPLMRCGKYWDTSLIDDATRDRIERIITGEYDRNIAAKVREKAINLSDIYCFKRLPLWLACYVVYNRHSENKEIAKWETPADIDAYLASFKQHSLRNPIVEQVITETLRVVRDIWKQVGKIDEIHIELGREMKSPADKRKRMTAQIQENEKANLRIKTLLVEFMNPEYEVENIRPYSPSQQEILRIYEDTVLKREEPIPEDIDAILKKFNNSKLPTKSEFLRYKLWLEQKYRSPYTGELIPLGKLFTTAYEIEHIIPQSRYFDDSFSNKVICESAVNKLKDNQLGYEFIKNHHGQKVEVGFGKKVEILSVDSYERFVKEQYAKSSVKMKKLLMDDIPEQFIERQLNDSRYISKVVKGLLSNIVREKNDNDGYEPEAVSRNVLVCTGNVTDRLKKDWGMNDVWNCIVYPRFERLNALTGTQCFGHWENKDGKKVFQTELPLEYQKGFSKKRIDHRHHAMDAIVIACATRNHVNYLSNESASRNTNISRYDLQRLLCDKNRVDGGGNYRWVIKKPWNTFTQDTREALDKIVISLKQNLRIINKTTNIYQHFDITGNRIYKKQEIGDNWAVRKPMHKDTVFGAVNLRKVKRVRLSVALDTPTMIVDKRVKGKVLELLSYKYDKKKIEKYFKENVFFWKDLDIAEVAVYYITENTSEPLVAVRKSLDSTFNEKKIKESVTDTGIQKILLNHLSVKG

SEQ ID NO: 5731 - protein, 1432 aa, synthetic construct
  REGION 1..1432: note = Synthetic
MKKVLGLDLGTNSIGWALVEQDFSEKTGSILGIGSRIIPMSQDIIGEFGKGNSISQTAERTRYRGIRRLRERYLLRRERLHRVLNILSFLPEHYANLIDFENRKGQFLDGAEPKLAYCNNEFIFKDSFKEMLTEFKRFQPRLVDNSKKIPYDWTLYYLRKKSLTEKISKSELAWIILNFNQKRGYYQLRGEEEEESHNKLIEFHSLKVIDVIPDEAPNRKGDLWYSIVLENGWIYRRSSKTPLDDWKDKIKDFIVTTDLNEDGTIKTDSEGAEKRSFRAPKEDDWNLVKKKTEYEIINSEKTVGEYIYEAILRNPNQKIRGKLIRTIERKFYKEELIQILNSQKRFHPELNDKSLLSECISELYRFNEPHQLLLLKKDFVHLIVNDIIFYQRPLKSKKSCISNCSFEYRKFRDENGVEVTKYLKSAAKSIPYYQEFRLWQWIHNLRLLNREGDVDVTYDYLQTSEEISMLFDYLSERKEIDQKTLLKYFKLNEKRFRWNYVEDKSYPCFETRALIKSRLKKVVTDVDVFLTSEKELLIWHIIYSVTDIKEFEKVLKTFAVKFDLDVESFVDKFRNIPPFKSDYGTLSEKAIKKILPLLRTGKYWNWQSIPKVAQDRILRLINAEYDNGISDRLREKLASLQTEKDFQGLQMWLAQYLVYGETKNTNKWESVSDIDNFLAEFKQHTLRNPIVEQVVTETLRVVRDIWAKFGKGNKNFFNEIHVELGREMKNSAEDRKSITKSVTENENTNLRIKALLAELFNDSNVENVRPYSPIQQEALKIYEDGVLRSIELIPDDILKISKSAQPNRSELQRYKLWLEQKYRSPYTGQIIPLNKLFTTAYEIEHVIPQSKYFDDSFSNKVICESAVNKLKDNQLGLEFIKNHQGEKVEIGSGKFVEIFSESGYRNFIAENYEKNPAKRNKLLFEEVPEKMIERQLNDTRYISKYISALLSNIVRSETNDDGINSKNLHPGNGKVTNILKKDWGLHDVWNVLILPRFERMNEITNSTAFTVWNEKYQKYLPSVPLEFSKGFQKKRIDHRHHAMDALVIACATRDHINLLNNKFARSKNTRYDLQHKLRHIERKQFTNPTTGKIYVRDIPGDFIKPWPTFTQDVKAALEKMVISFKQNHRLINKTSNKYQKYINRNGQMVKEIVPQVKGDSWAIRKSLHKETVSGLVKLDRIKLPKGKILTATRKSIDQSFTEKVIRSITDTGIQKILLNYLKSKGGKPELAFSPEGLEDMNNNIEQYNNGKKHKPIHKARIYESGSKFALGETGNKRSKYVEAAKGTNLFFAIYQDESGKRSFETIPLNVVIERLKQGWGAVPETNEKGHKLLFHLSPNDLVFIPGSMRMNLDLNYPKSILDAKNPELMYKVVSFSGTQCFFVQINVASSIVNKMEFSALNKLERSIAGDMIKDVCVKLLVDRIGNVHSAIS

SEQ ID NO: 5732 - protein, 1511 aa, synthetic construct
  REGION 1..1511: note = Synthetic
MDEKYILGLDLGTNSIGWAVIKQIMQENGIYTLSGILDAGSRIIPMDAAIQSDFSKGNSISQTADRTHYRGVRRLRERQLLRRERLHRVLDRMGFLPTHYQKALTRYGKFKEYTECLLPWTKDESENATFLFKASYEEMLQLFWQVHPELMQQQLKVPYDWTIYYLRKKALTEAITGQELAWILLHFNQKRGYYQTRGEEQEEDKSKKEEYYALKVIDVQDSGDKKGKDIWWNVLLENNMVYRRPSKEKPDWIGKIKEFIVTTQLNPDGTPKTDAKGEIKRSFRMPNENDWSLVKIKTQADIKKSHLTVGTYIFQALLANPKQKIKGKLVRTIERDFYKEELRQILEAQKQFIPQLNDRELYAHCIQELYPQNEPYRSSIANRDFTYLLMDDILFYQRPLKSKKSLISECPYEQHAFINENGEPATKSLKCIAKSHPLYQEFRLWQWIYNLRIFKSQRDANGRALDDMDVTEQFLPDEESKANLFDYLNDLSAITQKELLEKYFKLKKPAGKNAELPYRWNYVQDKAYPCNTTRGDIRSRLLKHGIDCTFLTGSIEQHLWEILFSVSDRQELRKALTKFAERHQLSEYFVEAMAKFPPFEPDYGAYSAKAIKKLLPLMRMGHHWNPEDIDEATQKRIQKIIDGEVDDSIRQRVREKAIHLSDIEQCHGLPLWLACYLVYDRHSEASDTNKWDSPADIDRYLQQFRQHSLHNPIVEQILMETLRTVRDIWIKVGHIDEIHIEMGRDLKNPADKRAKMTERALQNENANLRIKALLTEFMNPVFEIENVRPFSPSQQELLRIYEDTALNSVEILDDDIADIVKKFAQADVTKRPTHSEVMRYKLWLEQHYLSPYTGQPIALSRLFTTDYEIEHVIPQSRYFDDSLSNKVICEAEVNKLKDHALGYEFIKQHHGEKVQISGGRTVTILGSDSYCRLVEQTYKNNRAKMKKLLMDDIPAEFIERQLNDSRYISKLVKGLLSNIVREPDEQEATSKHVIVCSGSVTDRLKQDWGIHEVWNHLILPRFERMNTLTGTTKFTTTSTAGHRIPDMPLELQKGFNKKRIDHRHHAMDAIVIACTTRDHVNLLSNEAASPKSNQNRHQLSHKLRRYEEVTTLQNGQPKKLNVAKEFLMPWPTFPADVEKTLSNIIVSFKQNLKVINKTSNHSLRFIDGKKKFVPQTIGDSWAIRKSMHKETVFGEVNLRRIKTVALKEALLQPHRIVNRDLKEKIKAMLALGYNEKQVKAYFTENADTWQDVNLRKIEVYYFTKETSDRYFATRKAIDTSFSKDFIETKITDTGIQQILLRHLERHCNNAELAFSPDGIDEMNRNIRELNKGHNHQPIYKVRVYEKADKFTVGQTGNKSQKFVEAAKGTNLFFAVYEETSIDKKSGKMEKRRSFRTIPLNEAILKMKQALPLDKQALFILSPNDLVYLPTEEENKKGEIQMPIDKSRIYKMVSSNKFQAFFINERVAAMVQDKLEFSPLNKMERAITGEMIKETCIPLKVDRLGNIIQIGI

SEQ ID NO: 5733 - protein, 1593 aa, synthetic construct
  REGION 1..1593: note = Synthetic
MKKILGLDLGTNSIGWAVVNAEETTRENETSCLKPTGISAAGSRIIPMSADILGNFDAGNSVSQTAERTGFRGVRRLHERNLQRRERLLRVLRVMGFLPEHFASQIDEYGKFINHSEPKLAWTKGIDGKFEFVFKDSFEEMLEDFVLHQPQLVADGKKVPYDWTIYYLRKKALTQRLAKEELAWVLLQFNQKRGYYQLRGEDEEEKTTSKTRQYFDRQIIADIIDTGQKYKELKVLNIVLQNGDVGKIFKKEVPNWIGQEKSIIVIVDIDKDGNDKYDENGQISRKFKIPTEAEWDSEWKLIKMKTEEDLNNSHKTVGCYIYDNLLQKPNQKIIGKLVRTVERKYYKEELRQILETQVALIAELNDATLYNRCIGELYPNNEAHRNNIAKPDFVNLFINDILFYQRTLKSKKSLISDCPYESHFDKDGNEHPVKCIAKSNPLFQEFRLWQFVQNLRIYQREKSIDGKLQTDVDVTNELLKTEEDYVKLFDWLNDRASIKQEMLLSSYFEKKKDKDKYRWNYVEDKDYPCNETRATMLGGLTKCSLDAGFLTRENEMSLWHILYSVEDKAEIDKALKKYAEKNNLLESFAEVFAKVKPFKKDYGSYSEKAIKKLLPLMRMGKYWCADAIDGKTKERIEKIIVGEYDESISVRTREQIVAYNEKTGKTLDDISSFKGLPIWLVCYVVYNRHSEVSNNKPWEKPEDIDRYLKDFKQHSLRNPIVEQVVTETLRTVRDIWKQEGQIDEIHLELGREMKNPADKRKKMTERILENENTNLRIKALLMEFVNDPEIENVRPYSPSQQDILRIYEENALDNLTKDDKDFDFVSKISKSAQPSKADITRYKCWLEQKYRSPYTGEMIPLAKLFTSAYEIEHVIPQSRYFDDSFSNKVICEAEVNKLKDRQLGFEFIKNHKGEKVQISQGKVVEILSVEAYEKFVKDHYSSNRTKMKKLLMDDIPDGFIERQLNDSRYISKLVKGLLSNIVREKLDNGEYEQEAVSKNLISCNGSITDRLKKDWGMNDVWNSIVLPRFRRLNELTGKISDDELVAEFKRLFEEQLIVCSKSRNESINSSYTDYYKSLGEKEQKKVIDEVMKKLPIKESFLSVNNEGHIIPNMPLELQKGFNKKRIDHRHHAMDAIVIACATRDHVNLLNNEAAHSKHNANRYQLQRKLRRFEKMTIDGKEKEIAKEFLKPWDSFTTDAKQVLENIIVSFKQNLRVINKTSNHYQHYDENGKKVMVKQKKGDSWAIRKSMHKDTVFGEVNLRKSDKTVSLKEALKNPKAIVNKEFKKKVMELLEEGRDAKYIKKYVEDNKDVWSDIDIKRIQVYYYTKDTNDRYFATRKPLDTSFDKKKIESSVTDTGIQKILLAHLEAKGGNPELAFSPDGIDEMNRNIVALNKGKFHQPIVKVRVYEKAEKFAVGQNGNKASKFVEAAKGTNLFFAIFGTEKTSKETGETETVRSYLTIPLNVMIDCQKKYGSQWRNCIETYLQEQQLVTSETKLLFILSPNDLVYLPTKEEIRNGISTIDRKRIYKFVSCTGNEGHFIPEIIATPIVQTTELGSNNKAQKAWTGEMIKETCLPIKVDRLGNNIELNGKKL

SEQ ID NO: 5734 - protein, 1538 aa, synthetic construct
  REGION 1..1538: note = Synthetic
MKKILGLDLGTNSIGWALTNNDFDNKLGNIEGLGSRIIPMSQDVLGKFDSGVSISQTAERTKYRGTRRLVQRFLLRRERLHRILNILDFLPKHYSEAIDFDKKFGQFKPEKEEKLSFYKNESGKNQFIFLDSHQEMLAEFQLINPDLKQVPYDWTIYYLRKKALTQKISKEELAWILLNFNQKRGYYQLRGEEQEDNKNKLEEFHTLTVVDVIEREKGKSGIWYNVILENGWIYKRESKIALFDWIGKQKNFIVTTELNDDGTVKLNKDNEEKRSFRSPKEDDWGLVKIRTEQTINQSEKSVGTFIYDALLKNPNQKIKGELVRTIERKFYKDELSKILKAQIAFHHEILSDKNLYKKCIDELYRHNDSHKNNIKDKGFDYLFLDDIIFYQRPLKSKTSLISDCSLEFVPIKDENGILVKDDNGKQVVKPLKCIAKSNPIFQEFRLLQFVKNLKIYKKEIVNDVDVTHDFLKTEEDVVELFNWLNDKAEISQKQFLAYPKFKLKEDKYRWNFVEDKIYPCNETRNQFLNAVAKIDVDKSFFDAKNTQDLWHILYSVNDKTELYSIKPDTGVQSGALSTFAKRHNLSDDFVLNFSKIKPYKKEYGSFSEKSIKKLLPLMRFGSYWDEKNIDSKTLARIDKIQTGEFDENMRTRVREKAIHLSKTTDFQGLPLWLASYIIYDRHSEASDVSKWKTPADIQNFLKYDFKQHSLRNPIVEQVITETLRVVKDIWQHYGDGKENFFTEIHIELGREMKNDKATRERMTKKISENENTNLRIKAILTELKNDGLNDIRPYSPSQQDILKIYEEGVYSNENKKEKLEEIDKIRKNAKPTPSEIIKYKLWLEQGYISPYTGKLIPLSELFTTKYQIEHIIPQSRLFDDSLSNKVICESEVNELKSNMTAYEFIQNNEDRIVILTGGKTVKIFTKDAYNQHITAYYSKNKSKQKRLLSEEIPEKFIERQLNDTKYISKIVKNLLSRIVREEQEQEVTSKHIVSLNGSITSRMKQDWGLNDVWNNIITPRFERLNALTNSNDFGQFELKKDAYGNKGKQIFQTTVPDAIAKGFTKKRIDHRHHALDALVIACVSRTHINYLNNLNARDTDDKAVKHELRNKLCFKTKPDSNGNYKWEFYKPWKDFTTEAEDKLNTTIVSFKQNTRVINKTVNKYTNYKDEKGNLNIGTNGLVEKKIITQTKGDNWAIRKPMHAETVSGKVFLKRIKQSPITIANAIEQIEFIVDKEVKKQLASKIKQYPNNMVGLKKHLKAFPVMIDGKAIDKVQVYETIEATATRKTLDNSFDEKTINSITDTGIQKILLNHLKQEMYQNAIDENGKKIPPHESAFSEYGLEMLNKNIKKLNNGKAHQPIKKVRVFMEGTGKFAVGTNGNKKDKYVVAAKGTNLFFAIYQDEKGKRNYKTIPFNEVIERQKQSLSAAQETDENGNRLLFTLSPNDLVYLPTEDEKENLTTINFDKLSKEQVLRVLKMVSFTGNQAFFVSNNIATSIVDKMEFSALNKMEKSIDGTMIKSLCLKLEVDRLGKIKKIIR

SEQ ID NO: 5735 - protein, 1619 aa, synthetic construct
  REGION 1..1619: note = Synthetic
MEKKILGLDLGTNSIGWALIEHSFDEKKGKILGMGSRIIPMDAAKVGEFERGNPVSATADRTKFRSVRRLYERDVLRRERLHRVLNILGFLPTHYAENIDFENRPGQFKKDKEPNLPYQEISNKKYDFIFKDSFQEMVDDFRITQPQLFYFKANGSESKIPYDWTIYYLRKKALNEKIKKEELSWILLNFNQKRGYYQLRGEDEKVEDNKEITFEILEVNKVVDSGEKIKGSGAILYDIYFTNGWKYDKRITKTEDWVGKSKEFIVTTSVLVSGEISRSYKTVNSEKDWIAIKQKTEKDIESTNKTVGEYIYDTLLKNPSQKIRGRLIRTIERKFYKNELKQILEKQKEFHPELRDRDLYKSSIEELYTNNEAHRNNIANRDFTYLFLDDIIFYQRPLKSKKSLVSNCSFEFRYFKKEDGTVEKTGVKCIAKSHPLYQEFRLLQWLKNLRIFSKEDINEVDITNELLPTTTDREKLFEWLNDKTEIDQKSFLKYVPFNLEERIKMRLGERQFQLFKKDKEQGLDTYYRWNYVEDKKYLLNETRGEILKRFKKTGIDVNVLDKDIETHLWHILYSVEDKAEIDSALNSFAKRHYLPEGFVNEFKKYPRLDKEYGAYSAKAIKKVLPLMRFGKWWDWEAIDESTRQKIDKILTGEYDEKIKNRVREKAVDLKKEQDFQNLPLWLVSYIVYNRHSETSDVQYWKTAQDIELLKQHSLRNPIVEQIINETLQTVREIWEYYGEGKEKFFDEIHVELGRSLKEPAEKRKKVSERITENENTNIRIKSLLVELFNDDEIENVRPYSPMQQEILKIYEEGVYQNPDVTYSMVSESEINKIRKKNQPSSSDIKKYKLWLEQGYRSPYTGVIIPLSKLFTPAYEIEHIIPKAKFFDDSLSNKIICESEVNSLKDNQLAYSFIKNNRELKIELSHGRFVTLLSPEAYEANVKRYFGNNRSKQRKLLLEEIPDDFTERQLNDTRYISKVVKTLLSNILREEDEEEAIAKNVVASTGRVTAILKQDWGLNDVWNSLITPRFERLNRIGGYEKYGSWENKNGKVVFQVNTIEPDLLKLNKKRIDHRHHALDALVVACSSRNHINYINNDNASGKDKSKPRRFDLRNQLRIIEEEEVNSVVNGELQRKRIKVAKEFLKPWETFTQNAKEELNRIVVTFKKNNRVINKTVNYYQKWVKQPDETMKKVFVEQTKGDHWAIRKPLHKETFSALVNLKMQKTVNLSAALDNSKDIVNRSLRKKIEELISEGFEKKQIQKYFKGLGNRWAGEDISKVDIYTFTNDKENTMLVASRVKLDESFNEKNIESITDTGIRKILLAHLKKYKGLPDENGKPVTPESLAFSPTGIEELNKNILDLNGGKKHAPIYKVRKFEKFGAKFNVGATGNNKQKFVEAAKDTNLFFAIYLNEDGKRNYETLPLNEVVEHQKWRATLSRQEKDVTPLIPVNREKGKYLFSLSPNDLVYIPSVEEQANPERVDFCNLDTNQVKRIYKFVSCTGGEGHFVPSTNASEIIKNENGTNSKSERQQDFLDGNTIIDKNNQPIQIKSVCWKLETDRLGNIIKIVGEGINRMSFPDRNILKESIAYLYSNELQAFTGQNEVNEIDAEKISKLSPKEII

SEQ ID NO: 5736 - protein, 1284 aa, synthetic construct
  REGION 1..1284: note = Synthetic
MIYRRTSNIPLDWEGKTKEFIVTTDLEADGSPKKDKEGNIKRSFRAPKDDDWTLIKKKTEADIDKIKMTVGAYIYDTLLQKPDQKIRGKLVRTIERKYYKNELYQILKTQSEFHEELRDKQLYIACLNELYPNNEPRRNSISTRDFCHLFIEDIIFYQRPLKSKKSLIDNCPYEENRYIDKESGEIKHASIKCIAKSHPLYQEFRLWQFIVNLRIYRKETDVDVTQELLPTEADYVTLFEWLNEKKEIDQKAFFKYPPFGFKKTTSNYRWNYVEDKPYPCNETHAQIIARLGKAHIPKAFLSKEKEETLWHILYSIEDKQEIEKALHSFANKNNLSEEFIEQFKNFPPFKKEYGSYSAKAIKKLLPLMRMGKYWSIENIDNGTRIRINKIIDGEYDENIRERVRQKAINLTDITHFRALPLWLACYLVYDRHSEVKDIVKWKTPKDIDLYLKSFKQHSLRNPIVEQVITETLRTVRDIWQQVGHIDEIHIELGREMKNPADKRARMSQQMIKNENTNLRIKALLTEFLNPEFGIENVRPYSPSQQDLLRIYEEGVLNSILELPEDIGIILGKFNQTDTLKRPTRSEILRYKLWLEQKYRSPYTGEMIPLSKLFTPAYEIEHIIPQSRYFDDSLSNKVICESEINKLKDRSLGYEFIKNHHGEKVELAFDKPFEVLSVEAYEKLVHESYSHNRSKMKKLLMEDIPDQFIERQLNDSRYISKVVKSLLSNIVREENEQEAISKNVIPCTGGITDRLKKDWGINDVWNKIVLPRFIRLNELTESTRFTSINTNNTMIPSMPLELQKGFNKKRIDHRHHAMDAIIIACANRNIVNYLNNVSASKNTKITRRDLQTLLCHKDKTDNNGNYKWVIDKPWETFTQDTLTALQKITVSFKQNLRVINKTTNHYQHYENGKKIVSNQSKGDSWAIRKSMHKETVHGEVNLRMIKTVSFNEALKKPQAIVEMDLKKKILAMLELGYDTKRIKNYFEENKDTWQDINPSKIKVYYFTKETKDRYFAVRKPIDTSFDKKKIKESITDTGIQQIMLRHLETKDNDPTLAFSPDGIDEMNRNILILNKGKKHQPIYKVRVYEKAEKFTVGQKGNKRTKFVEAAKGTNLFFAIYETEEIDKDTKKVIRKRSYSTIPLNVVIERQKQGLSSAPEDENGNLPKYILSPNDLVYVPTQEEINKGEVVMPIDRDRIYKMVDSSGITANFIPASTANLIFALPKATAEIYCNGENCIQNEYGIGSPQSKNQKAITGEMVKEICFPIKVDRLGNIIQVGSCILTN

SEQ ID NO: 5737 - protein, 1455 aa, synthetic construct
  REGION 1..1455: note = Synthetic
MKHILGLDLGTNSIGWALIQQNFENKQGEILGMGSRIIPMDQKILGDFGAGNSISQTAERTGYRGVRRLRERHLLRRERLHRILHILGYLPEHYDAQIDFIKRFGKFIPEAEPKLAYSKDGFLFQNSFYEMLEEFKNFQPDFLKDKNGNDCLIPYDWTIYYLRKKALTQKIEKEELAWIILNFNQKRGYYQLRGEEEEENPNKLVEFHSLKVVDVVADETKNNKGEIWYSMHLENGWIYRRSSKTELFDWKDKVKEFIVTTDLNDDGTEKLDKEGNVRRSFRAPSPDDWTLLKKKTEKDINDSHKTVGTYIFDNLLLNPKQKIKGKLVRTIERKFYKDELKQILAKQKEFHSELQDEDLFMDCVRELYRNNEQHQQMLSAKDFVHLILEDILFYQRPLRSQKSSISNCSLENRKSKDGVIFPIKVISKSNPYYQEFRLLQWLQNLVIYRKEDDTNVTKELLPNQNDWEELLEFLNTKKEIDQKQLVEFLLKRKLEIKKVPKTETERYRWNYVEDKTYPCNETRYLIQSRLDKTENVPAYFLNFENEMALWHIIYSVNDKTEYEKALKKFAEKHNLNVDSFFENFRKFPPFKSDYGSFSEKAIKKLLPLMRFGKSWDEDEIVKGSNTYFRNIENLLGTLIQKDEKISDKDRKKWNKTVNQKLWEELRNFQNAEIASFQGLRLHIAQYLVYGRHSEAAVSGKWNSVKDLEEYLNEFKQHSLRNPIVEQVITETLRVVKDIWTKYGNGAKDYFSEIHIELGREMKNTADERKRLTSQVTENENTNLRIKALLAELALDRDVENVRPYSPMQQEILKIYEDGALSSEAEIEEDILKISKTAQPSKSELIRYKLWLEQRYRSPYTGQIIPLNKLFTHEYEIEHIIPQSRYFDDGFNNKVICEAEVNKLKDKQLGFEFIKNHHGYKVSDRISILEVADYEEFVKQSYAKNRAKRNKLLMEDIPEKMIERQLNDTRYISKYISNLLSNIVRDDKEGSNDDGFNSKNLLPGNGRITSRLKQDWGLEAVWNDLILPRFERMNQLTNSTDFTAWNEKHQKFLPTVPIELSKGFSKKRIDHRHHALDALVIACATRDHINLLNNESAKSELKRYDLQHKLRLQETYLDKDGKERTAFKAFIKPWKNSTMEAKNALEKIVVSFKQNTRVINKATNYYEKFVEKNGEKVKGIVKQEGTNWAIRKPLHKETVSGKVQLDRIKSAKGKILTATRKSLDSSFNEKTIGSITDTGIQKILLNYLKAKGGKPELAFSPEGIEEMNQNIALYNDGKQHQPILKVRVFEQGSKFALGETGNKKDKYVEAAKGTNLFFGVYADKEGKRSYDTIPLNIVIERQKQGLSSVPETNEKGYRLLFSLSPNDLVYVPEEGEIFDKVRFDCKRIYKMVSSTGGECHFVHNSISSLIKNYDAKTKIGELGSLNKLEVTIDGIYRIKEVCIKLKVDRLGNISKA

SEQ ID NO: 5738 - protein, 1508 aa, synthetic construct
  REGION 1..1508: note = Synthetic
MKKILGLDLGTNSIGWAVINASQKEDNTDSLQNISSCGSRIIPMDAAILGDFDKGNSKSQTAERTRLRGVRRLLERSLLRRERLHRVLSLMGFLPEHYAQQIDRYGKFIPDSEPKLPWIKTKNGKYQFIFQDSFLEMLTDFQLRHPELVANGKKVPYDWTIYYLRKKGLTQKISKEELAWIILNFNQKRGYYQLRGEEEEEDSKKRVEYYALRVVSVENTGEKKGKDTWYNVHLENGWIYRRSSNLPLDWNGKIKEFVVTTELDETGNPKVDKDGNVKRSFRAPKEDDWNLLKKKSESIIDQSKLTVGTYIYESLLNVPNQKIRGKLIRTIERKYYKDELKAILDAQKNFHPELNDRDLYYACVNELYPSNESHREILSTHDFTYLLIEDMLFYQRPLKSKVSLIADCPYEARIYKDKEGNKCSVALKCIAKSHPLFQEFRLWQFISNLRIYQREKKIGTSLKTDVDVTSEFLRNEDDYVALFDWLYEQKDISQKKLLGYKPFQLKKNEQINYRWNYVEDKLYPCNETRWAITSRLEKIGIPSSFLTKEMEESLWHILYSITDKQEIEKALQTFADKHQLDTAFVSAFAKMPPFEKEYGAYSQKAIKKLLSLMRMGKYWSEKNIDPKTKERIEKILSGVCDETIRMRVRDLAFHLQEITSFKGLPLWLACYVVYDRHSESKDIDKWEKPSDIDEYLKAFKQHSLRNPIVEQVITETLRTVRDIWKQEGKFDEIHIELGREMKNPADKRAKMTAQALENENTNLRIKALLTEFMNPEFEIENVRPYSLSQQEILRIYEDFALSNEPNIPDDVALILKKFRESDVHKRPTRSEVLRYKLWLEQKYRSPYTGEIIPLGKLFTPAFEIEHIIPQSRYFDDSLTNKVICESAVNKLKDNSLGYEFIQKHHGEKVALGNGKQTTIFSVEDYEAFVKQHYAANRAKMEKLLLEDIPEKFIERQLNDSRYISKVVKSLLSNIVREENEQEAISKNIIVCTDGITDRLKRDWGIMDIWNKIILPRFQRLNKLQGTNDFTTISAQGHEIPAMPLYLQKGFNKKRIDHRHHAMDAIIIACANRNIVNYLNNASALKGSTITRYDLQHILCEKTKSDANGNYQWVLRKPWETFPQDVYQALKEIVVSFKQNQRVINRTTNHYQHYDATGKKVLVKQTKGDSWAIRQPIHKDTVFGEVNLRMKKTVSLNEALKRITSIVDKDLKHKLQELVKSQYNVKQIKKYFEDQADVWQDINLKKIEIYYYTQETKDRYFATRKPLDTSFDRKKIEESVTDTGIQKILLNHLERNQGKAEIAFSPDGIDQMNQDIISLNEGKKHQPIYKVRYYEKADKFAIGKAGNKSRKFVEAAKGTNLFFAVYETTEEDKQTGNLTKKRSYASIPLNVVISRQKRGLPSAPENENGDSPVFVLSPNDLVYVPKQEELNTGDIQFPIDRNRIYKMVSCTGNEAHFIPVYIANPIIQTVELGSNNKAQKSWTEEMIKEVCIPLRVDRLGNISLLNQSE

SEQ ID NO: 5739 - protein, 1025 aa, synthetic construct
  REGION 977..1025: note = misc_feature - Xaa can be any naturally occurring amino acid
  REGION 1..1025: note = Synthetic
MEKRILGLDLGTNSIGWALIKHSFDEKKGEILGMGSRIIPMDAAKVGEFERGNPVSATADRTKFRSVRRLYERDVLRRERLHRVLHILDFLPTHYAENIDFENRPGQFMKNKEPKLPYQEISNKKYDFIFKDSFQEMVDDFRITQPQLFYLKANGSESKIPYDWTIYYLRKKALSEKIKKEELAWILLNFNQKRGYYQLRGEDEELEDNKEITFEILKVDKVIDSGEKIKNSGAILYDVYFENGWKYDKRVTKTEDWAGKTKEFIVTTSVLASGEISRSYKAVNSEEDWIAIKQKTEQDIESTNKTVGEYIYDTLLKNPSQKIRGRLIRTIERKFYKKELKLILEKQKEFHPELRNRDLYKSSIEELYTNNEAHRNNIANRDFTYLFLDDIIFYQRPLKSKKSLVSNCPFEFRYFKKEDGTVEKTGVKCIAKSHPLYQEFRLLQWLKNLRIFSKEDINEVDITNELLPTTTDREKLFEWLNDKTEIDQKSFLKYVPFNLEERIKMRLGERQFQLFKKDKEQGLDTYYRWNYVEDKKYPLNETRGEILKRLKKTGIDVNVLDKDTETHLWHILYSVEDKAEIESALNSFAKKHNLPEGFVNEFKKYPRLDKEYGSYSAKAIKKVLPLMRFGKWWDGEAIDEFTRQKIDKILTGEYDEKIKNRVREKAVDLKEEQDFQNLPLWLVSYIVYNRHSETSDVQYWKTAQDIELLKQHSLRNPIVEQIINETLQTVREIWEYYGEGKEKFFDEIHVELGRSLKEPAEKRKKVSERITENENTNIRIKSLLVELFNDDEIENVRPYSPMQQEILKIYEEGVYQNPDVTYSMVSESEINKIRKKNQPSSSDIKKYKLWLEQGYRSPYTGVIIPLSKLFTPAYEIEHIIPKAKFFDDSLSNKIICESEVNSLKDNQLAYSFIKNNRELKIELSHGRFVTLLSPEAYEANVKRYFGNNRSKLRKLLLEEIPEDFTERQLNDTRYISXXXXXXXXXXXXXXXXXXXXXXXXXXXXXXXXXXXXXXXXXXXXXXXXX

SEQ ID NO: 5740 - protein, 1040 aa, synthetic construct
  REGION 1..1040: note = Synthetic
VTSEFLKDEADYAALFDSLSKKAEITQKTFLAEPVLNLDKKRRDAYRWNYVEDKTYPCNTTHADMVARLRKAGISEDVLTADMELSLWHILYSISDKKELTKALTKFASQRHLGDAFVAEFEKMPPYASDYASYSLKAIRKLLPLMRMGHYWQEEAIDPLTRNRIEKLLTGEWDEKIHLRVREKSMHLTELSSFRGLPLWLACYIVYDRHAEAREITRWENPGAIDDFLAEFRQHSLRNPIVEQVIMETLRVVRDVWKQEGRIDEIHVEMGREMKNPADKRKKMTAQALENEYTNLRIKALLTEFLNPEFGIENVRPYSPAQQEILRIYEEGVLAETSDKDLPSDIADILKKFKEERIEKRPSRSEVQRYKMWLEQKYRSPYTGKPIPLGKLFTPAYEIEHVIPQSRYFDDSYTNKVICEAAVNKLKGNLLGYEFIKRHHGEVVELGGGESVSIFSVAAYEQFVKEHYANNRIKKEKLLMEDIPDGFIERQLNDSRYISRVVKSLLSNIVREEGEQESTSKNVIVCTGGVTDRLKKDWGMGDVWNQIILPRFRRMNKLTDSKDYTAISLNGNLIPAVPLALQKGFSKKRIDHRHHAMDAIVIACANRNIVNYLNNASALSEARTARTDLQRLLCDKKKTDANGNYQWLIRKPWDTFTQDAYQVLQDIVVSFKQNLRVINRTTNYYQRYDESGKKVYVPQTGGDSWAIRKPLHKDTVYGEVNLRREKTVALKDVLKMPERIVDKSFKYKLKELLAQQYGVKEISAYFEKNKSDWPDIDLKKIKVYYFTGETKDRFFATRKPLEDSFDQKKIENGVTDTGIQKILVNHLLQNGNNAELAFSPDGIEAMNLHIASLNGGKPHQPIYKVRVYEKGDKFAVGDKGNKYKKFVEAAKGTNLFFAVYEYPQIDKETGQVSRKRSFASVPLNQVIDRLKRGLSPAPEDEKGNAPAFVLSPNDLVYLPTKEEREKGVIESVLDKSRIYKMVSCTGNEGYFIPCNISSPIAPVIELGSNNKAQRSWTDDMIKEVCIPIGVDRLGNILLHK

SEQ ID NO: 5741 - protein, 1507 aa, synthetic construct
  REGION 1..1507: note = Synthetic
MKTILGLDLGTNSIGWAVINSTIEEEVKKVWISLVGSRIIPMDAAILGDFDKGNSISQTAERTRFRGVRRLRERQLLRRERLHKVLKVLGFLPSHYLKEIDFEKHPGKFQANAEPKLAWIKNEQGKSVFLFQASFNEMLTDFAKYQPALVSEGKKVPYDWTIYYLRKKALTEMISKEELAWILLNFNQKRGYYQLRGEEEEDSAGKLVEYHELKVVSVEATGEKKGQDMWYNVHLENGWIYRRSSNIPLNWEGQTKEFIVTTDINADGSPKLDKFGEVKRSFRAPKEDDWMLMKKRTEADIANSRKTVGSYIYDTLLQKPQQKIIGKLVRTVERKFYEEELRLILQKQCAFHAELQDRNLYKTCVEALYPANEVHRKNIANRDFVYLLMNDILFYQRPLKSKKSLIDNCPYEENEYTDRETGEIKKAPLKCIAKSHPLFQEFRLWHFLSSLRIYQKEKEVNGSLHTDVDVTAEFLKTENDYTALFDWLNSRKEIDQKAFLKYPEFGLKKIADNYRWNYVEDKAYPCNETRNAILTRLAKAGVSAEFLSFEKEVALWHILYSVSDKQEIEKALKTFADKNGLDEAFVEAFKKFPPFKAEYGAYSAKAIKKLLPLMRCGKYWDADLIDDKTKKRIEKILAGEFDEKISVRVREKAISLSDISCFKGLPLWLACYIVYDRHSEVKDITKWETPADIDAYLKTFKQHSLRNPIVEQVITETLRVVRDIWKRVGKIGEIHIELGREMKNPADKRKRMTAQILENENANLRIKALLAEFINPEYEVENVRPYSPSQQEILRIYEDTVLKAEEQIPDYIDDILKKFNTSNLPSKSEILRYKLWLEQKYRSPYTGEMIPLGKLFTSAYEIEHIIPQSRYFDDSFSNKVICESAVNKLKDNQLGHEFIKEHHGEIVDVGFGKKVEIFSLEKYEKFVKDHYSKSVMKMKKLLMDDIPEQFIERQLNDSRYISKVIKGLLSNIVREKNENGEYEQEPVSKNIVVCTGSVTDRLKKDWGMNDVWNSIVYPRFERLNTLTGTQRFGHWENKEGKKVFQTELPLEYQKGFSKKRIDHRHHAMDAIVIACATRNHVNYLNNESASRNAKISRYDLQRRLCDKSRIDENGNYRWIIKKPWDTFTQDAKDALSGIVVSLKPNLRVINKTTNVYQHFDNDGNRVYEKQKVGDSWAIRKPMHKDTVFGAVNLRKIKTVRLSAALDIPTMIVDKKLKSKVLELLSYKYDKKRIDRYFKENAHLWKDLDMAKVVVYYFTENSSEPLVAVRKPLDTSFNEKKIKESVTDTGIQKILLNHLNSKNGKADLAFSAEGIDEMNRNLIQLNDGKKHQPIYKVRVSEPRGNKFSVGASGNKKDKFVEAAKGTNLFFAIYLAEAGKRTYETIPLNIAIEREKQGLTPVPDKNENGDKLLFWLSPNDLVYLPTEEEREFGRINEPIDRTRIYKMVSSSGNQCFFIPQSISNVIIPTVELGANNKAEKSWNGEMIKSICIPIKVDRLGNIVEIKMLQ

SEQ ID NO: 5742 - protein, 1540 aa, synthetic construct
  REGION 1..1540: note = Synthetic
MNKILGLDLGTNSIGWALVGTDEEGNPIRIYKSGSRIIPMSQDVLGNFDRGNSISQTAERTSYRGVRRLRERHLLRRERLHRVLHLMGFLPSHYEEAIGWDKGDNKTFAKFYSDTEPKLPWRKNAEREHEFLFNTPYNEMLVDFRKNQPQLFKIKKNGQESLIPYDWTIYYLRKKALSKPISKKELAWIILNFNQKRGYYQLRGEEEEENSNKLIEYHALTVVKVIADEPQKGKSDIWYNAELENGWVYRRSSKTPLFDWESKVKEFVVTTDLNADGSLKVDKEGGVKRSFRVPSEDDWMLVKKKTESDIEKSDKTVGCYIYDTILQNPSQKIRGKLVRTIERKFYKKELTEILNKQKEFHSELQNKELYQECIKELYPHNEAHYDSLLVKDYTDLFVNDIIFYQRPLKSKKSLISNCPYEYRVYRNDSGIVERVPIKCIAKSHPLYQEFRLWQFIHNLRIYERQREVNGKPETDVDITAEFIPTTEDRVKLFDWLNNKKEIKQDTLLQSYFKIKKKKGDDKFPYRWNYVEDKEYPCNETRALILSRLTKLNLSEDFLTKEMELALWHILYSVEDKEEIKKAFKSFAQKHNLDDSFVDQFIKFPPFKKDYGSYSAKAIKKLLPLMRIGKYWDEKAISGNTRSRILSINERLEDMRSSGKKIEDVSDDDIPKQVLKSFDKVNGVYSGLNTYQACYAVYGRHSEASEITKWKTPQDIDDYLNEFKQHSLRNPIVEQVITETLRVVRDIWKKYGDFSEIHIELGREMKNPADKRAKMTTQISENENTNLRMKSLLAELKNHNDVENVRPYSPSQQEILKIYEEGVLNSVSEIPEEIIKITKSSQPSQTELVRYKLWLEQKYRSPYTGEIIPLGKLFTSAYEIEHVIPQSRYFDDSLSNKVICESEVNKLKGNLLGYEFVKNHHGVKVELNFNKTVEIFSINEYEEFVKGNYGKNRGKMKKLLLEDIPKSFIERQLNDTRYISKVVKGLLSNIVREDGEQEATSKHVIPCTGGVTTILKQDWGLNDVWNKIVTPRFERMNELTNTSLFGQWENKEGKRIFRTEVPLELQKGFNKKRIDHRHHAMDAIVIACATRSHVTYLNNESSKANAKEIRDGLKHKLCFKSKTDETGNYKWQFHKPWDTFTQDVQDTLENIVISFKQNLRVINKTTNRYQKYEEEKKILKSQEKGDSWAIRKPLHKDTVFAKVSLQKIKCVKLAMALKDWKNIVDKQLKKEIRRLILSYGKFDAEILNKYFKDRKYIFKDVDISKVDVYYFETEYVATRKNLDTSFDRKSIESITDTGIQKILLNHLGVKNNNPELAFSAEGIDEMNQRIVELNGGKQHQPIYKVRMYEPLGNKFQVGRIGNKKDKYVEAAPGTNLFYAIYQSEDKKRIYDTIPLNIIIERQKKELFPVPENKEDKDNLYKLLFWLSPNDMVYLPTEKEWANPDLFNFNNMTKNQRKKLYKFIDGSGTTANFIPNTVANIIFSIPKKDSGKYSMGNRIVQNEFGIGSPQSKNQKAFTGEMIKERCWKLKINRLGDIIECIK

SEQ ID NO: 5743 - protein, 1196 aa, synthetic construct
  REGION 1..1196: note = Synthetic
LLQSPQQKIKGKLVRTIERKFYKDELRLILDKQQAFHPELQDRELYKACLDVLYPMNVAHKNNVANRGFVYLFMEDILFYQRPLKSKKSLIDNCPYEENQYIDVTTGEIKKAPIKCIAKSHPLYQEFRLWQFIDNIRIYQKEKKVDGKLLTDIDVTTEYLSSKDDYVALYEWLCVRKEIEQKTFLKYPAFGLKKEIENYRWNYIEGKSYPCNETRSLILHYLEKAGISSTFLSTKIEESLWHILYSVEDRIELETALRTFASKYQLSCNFVEVFKKFPPFKKEYGAYSAKAIKRLLPLMRMGKYWKVDAIDGNTAERIEKILSGECDEKILNKVWEKTIHLSETSDFQGLPLWLACYVVYNRHSEVKEVAKWKSPEDIDIYLKSFKQHSLRNPIVEQVITETLRVVRDIWKRVEQIDEIHVELGREMKNPSEKRRQMTERMLENENANIRIKALLTEFMNPEYEMENVRPYSPSQQEILRIYEDTVLNGAGDIPEDIEIILKKFKENDIKKRPGKSDFLRYKLWLEQQYRSPYTGEIIPLGKLFTTAYEIEHVIPQSRYFDDSFSNKVICESEVNKLKDNMLGYEFIKKHAGEIVELGFGKSVKIFSVEAYERFVGENYYKAGSKKSKLLMDDIPEKFIERQLNDSRYISRVVKGLLSNVVREEDANGEYESEAISKNVIVCSGSVTDRLKKDWGVNDVWNNIVYSRFERLNRLTESQQFGHWENREGKRFFQTELPLEYQKGFSKKRIDHRHHAMDAIIIACATRNHVNYLSNESASKHARIARYDLQRMLCDKSKADRGGNYKWIIQKPWATFTQDVYRTLLDIIVSFKQNLRVINKMTNYYQAYDDAGKKVFKKQKKGDSWAIRKSMHKDTVFGQVNLRKIKEVRLSVALESPEKIVDKKIKEKVLQLFAYQYDKKKIEKYFKENASLWKEVNLAKIPVYYFTDESSELLVAVRKNLDTGFTEKKIRESVTDTGIQKILLNHLSNKGDKPELAFSPDGIDEMNRNLVILNGAKPQQPIYKVRVCEPLGNKFKVGTNGNKSAKYVEAAKGTNLFFAIYVTDDGKRTYETIPLNVVIEREKLGWLPVPEKNDKGGNLLFWLSPNDLVYLPTEEELMNGIISDSIDRNRIYKMVSCTGNEGHFIPENISNPIIPTLELGSNNKAQRAWTDEMIKETFIPIKVDRLGQITEIINKIR

SEQ ID NO: 5744 - protein, 1463 aa, synthetic construct
  REGION 1..1463: note = Synthetic
MMTKNILGLDLGTNSIGWALIKQDFENKQGEILGMGSRIIPMSQDILGDFGKGNSVSQTADRTKYRSVRRLRERFLLRRERLHRVLDVLNFLPKHYASQIDFEKRFGKFKFETEPKLAWENSDGKFSFLFQNSFNEMLEDFKAAGQDLKIPYDWTIYYLRKKALSHKIEKEELAWILLNFNQKRGYYQLRGEEEEENPNKRMEFYSLKIVDVVADEPQKGKSDIWYSMILENGWVYRRSSKIPLFDWKDKTRDFIVTTDLNDDGTIKTDKEGNEKRSFRAPSENDWTLVKTKTENEIDQSHKTVGTYIYETLLQNPKQKVKGKLVRTIERKFYKDELRQILEKQKEFHSEFQNDDLYNDCVRELYRNNEAHQLTLSKKDFVHLLMDDLIFYQRPLRSQKSSISNCTLEFRKYKDENGIEHTQYLKAIPKSNPYYQEFRLWQWIYNLNIYRKDDEANVTNDFLNNIEDFENLFEFLNNRKEVDQKALLKHFKLNEKTHRWNFVEDKKYPCNETRAMISSRLEKVENSPVDFLTREIEQKIWHIIYSVNDKIEYEKALKSFANKNDLDENSFVEAFRKFPPFKSEYGSFSEKAIKKLLPLMRLGKYWDENEIVKHSDTYFKNIENLLGNLSMRDQNISEEDREKWNKSINLKLQEELKDFQTAEIDLFQGLRLHIAQYLVYGRHSEASLIGKWNSADDLEAFLKDFKQHSLRNPIVEQVITETLRVVKDIWLKYGNGAKGFFDEIHIELGREMKLPAKEREDLTRKITENENTNLRIKALLAEMMNDSSVENVRPFSPMQQEILKIYEDGVLNSDIEIEDDILKISKTAQPSPSDLKRYKLWLEQKYRSPYTGQIIPLNKLFTAEYEIEHIIPQSRYFDDSFSNKVICEAAVNSLKGNKLSFEFIKDPVFQTVEIGFGRTVSILKPDEYEDFVKKHYANNRGKRNKLLLEEIPEKMIERQMNDTRYISKYISGVLSNIVRVEDGSDEGVNSKNIVPGNGKITTQLKQDWGLNDVWNDLILPRFERMNQLTNSTDFTAWNETHQKFLPTVPIEFSKGFSKKRIDHRHHAMDALVIACATKDHVNLLNNQSAKSDTKRYDLKMKLMKFEKVAYNHPQTGERIEREVPKQFLKPWNNFTVDAKDSLEKIIVSFKQNLRVINKATNYYEKYVEKDGVKTKQRVDQKGTNWAIRKSLHEETVSGKIDLPWVETSKGEFITATRKPLDTSFNIDKIKKITDTGIQKILKNYLEAKDNNPELAFSPEGIEDLNKNIEKYNDGKPHQPIIKVRVYEKGKGRFALGQTGNKVDKYVQGSPNLFFAIYKDENGKKSFESIRLDIVIERMKQMLSPVPEINSNGDELHETISPLDLVYIPTEEESENINAIDFDTIDKSKLERIYNVNDFSGYTVYFSQNSFAKNIYPKEMDMSWNEKKQKSSGSFDSKTASFSGKSIKESFVKLKIDRLGNISKA

SEQ ID NO: 5745 - protein, 1296 aa, synthetic construct
  REGION 1..1296: note = Synthetic
MKKILGLDLGTNSIGWAVINSLVDDEGKEKLTSISSCGSRIIPMDAATLGDFDKGNAKSSVAERTRLRGIRRLLERSLLRRERLHRVLSVMGFLPEHYASQLDRYGKFLPETEPKLAWYKDNTGSYRFLFQDSFNEMLEDFRLYHPELVAEGKKIPYDWTIYYLRKKALSQKIAKEELAWILLNFNQKRGYYQLRGEEEQEDNKKSVEYYALKVVAVEDSGERKGKDIWYNVKLENGWIDRRASSVPLDWTGKVKEFVVTTDLDDAGNPKKDKDGNVKRFFRAPKENDWGLLKTKTQTQIDESGQTVGAYIYDSLLRMPDQKIRGKLVRTIERKYYKDELRKILLKQTEFHAALQDHNLLLSCIEELYPNNEAHRRLLSSSSFTYFLLEDILFYQRPLKSQKGLIDDCPYESHVYRDKKDGSLHRTPLKCISKSHPLFQEFRLWHFLSFLRIYQRERMIDGSLKLDVDVTNEFLQNEDDYVKLFDWLNGRKEIDQKTILAYKPFGLKKNEQPKYRWNYVEDKSYPCNETRADMISRLSKAGVSEGFLTEEREEALWHILYSISDKKELTKALGTFAEKNGLNEAFVEQFSQMPPFESNYAAYSLKAIRKLLALMRMGKYWNEQDIDKQTRSRIEKILTGEYDETIRTRVREKAIHLTDISSFRGLPLWLACYVVYNRHSEAKELVKWETPADIDHFLSKFRQHSLRNPIVEQVLMETLRTVRDIWKQEGQIDEIHVELGREMKNPAKERARITAQALENENTNLRIKALLTEFMNPEFEIENVRPYSPGQQEILRIYEEGVLSGVAEKDLPEDIISILKKFKENDVKKRPTTSEVLRYKLWLEQRYRSPYTGRIIPLGKLFTPAYEIEHVIPQSRYFDDSISNKVICESAVNKLKDNCLGYEFIKKHSGEIVELGNGEKATVFTSEEYEHFVKESYLGNGKKMKKLLLEDIPDNFIERQLNDSRYISKVVKSLLSNIVCEEGEQEGMSKNVIVCTGGVTDRLKKDWGVQDVWNRIILPRFLRLNKMTDSTDFTSVSTNGHLLPALPLHLQKGFNKKRIDHRHHAMDAIVIACADRNIVNYLNNASARKGSEISRYDLQHLLCDKVKTDSNGNYKWMLRKPWDTFTQDVYTALTNIVVSFKQNLRVINRTTNYYQHYNESGEKKMIPQVKGDRWAIRKPMHKDTVYGEVNLRREKTLPLKDVLNNPSIVVDKSLKSKLHELLKAQYDLKAITKYFEAHQDVWADINLKKIKVYYFTKETNERFLQHVSHWIQALIRKRFKRKLQIQVYKGFCYVICS

SEQ ID NO: 5746 - protein, 1582 aa, synthetic construct
  REGION 1..1582: note = Synthetic
MRDRFACFHNGIILIVICFRIMEQKYTKKSYKKTLLIKILFFNFMPVLKHLKYSIMKKILGLDLGTNSIGWALIQQDFDTKKGEILGMGSRIIPMTQDVLDTFSGGKPLETQTAARTSYRGIRRIRERHLLRRERLHRVLNILGFLPDHYANQIDFEKRLGQFLDEKEPKLVYKNKEFIFKESFEEMLNDFKQSQPSLFYKKSNGKETKIPYDWTIYYLRKKALTQKIEKEELAWIILNFNQKRGYYQLRGEEEEENLNKLVEFHSLKIVDVIAEEKPNNKGDLWYSLYLENGWIYRRSSKIPLYDWKDKVRDFIVTTDLNDDGTIKKDKEGNERRSFRAPSEDDWTLLKKKTEQEIEKSNKTVGTYIYENIVQNPSQKIRGKLVRTIERKFYKEELIAILKKQIELQPELFTDDLYNDCVRELYRNNEAQQLVLSKRDFVHLFVDDIIFYQRPLRSQKSSIGNCSLEYRVYKDKDGNQVKEYLKAIPKSHPFYQEFRVWQWLSNLKIYRKEDDSDVTNHFIKNDEDKVALFEFLMEQKEVGHKDILKHLLTPVLKEQYPSAKTAAFNKEVDKEIAKYRWNYVFDDSKEKEEDKSKKYPCNTTGYEIRRRLVKVSNVPINFLTPQIEQHLWHIIYSVTDKKEYEAALKSFANKYHLEENSFVEEFRHFPPFKSEYGAYSEKAIKKLLPLMRLGKYWCWDAIDSKTQGRIDKIISGEYDETIKNRVREKAINLTDNTHFQGLPIWLASYIVYDRHSEADIAGKWNSVTDLEQYLEDFKQHSLRNPIVEQIVTETLRVVRDIWKYYGQGAKDFFNEIHVELGRDMKNNADDRKWLTKQVTNNEATNLRIKALLTELKENSDGKLAVENVRPYSLMQQDALRIYEDGVINSKIELPEDIIRISKSAQPSKTELQRYKLWLEQKYRSPYTGQMIPLGRLFTEDYQIEHIIPKSRYFDDSFNNKVICESAVNQLKDNQLGLEFIKNHQGEKVECGMGKVVEILKEEAYQTFVKEHYSKNKTKRQNLLLDEIPEGMISRQMNDTRYISKFISGLLSNLVRAEKDDDGINSKNLIPGNGNITTVLKKDWGMDAVWNDLILPRFERMNQLTNTTAFTYWNEQYQKYLPVDYSPIDSKRIDKKRIDHRHHAMDALVIACMTRDHVNLLNNQSAKSETTRYDLQNKLRNKSKETWIDKKTNKQVERDVFKEFKKPWDNFTMDAKIALENIIVSFKQNLRVINKATNYYEKWVEKEGKKVKAKVKQEGTNWAIRKPLHTPMPYGKKSYFFDLLKIAESVGKREYIIDDEIKTKVEKVLVECNGKITEAQKKLKQFPLIDNNGNPIIQTTFRINTEKFRRRQPISLLSNRGQGGIKTIEDAKKIIYKIVDFKIQKDLLKHIEECDDDLDKAFSPEGIENFNSKRKIPIYKIPIGESGSGRFCVGTKISTKHKWVEADKGTNLYFAIYESNDGKRSYDSIPLNIVIERLKQGLPPVDFRSENDFYLTPNDLIYVPNEDEKINIKNLKPSEFGEEQKKNIYKVVSFTGNRLSCIPYSVASPIVNKVEFTQLNKIEFTKEKESLIKLKIDRLGNISL

SEQ ID NO: 5747 - protein, 1233 aa, synthetic construct
  REGION 1..1233: note = Synthetic
MKHILGLDLGTNSIGWAVINATTDENTHKEQLIGINAAGSRIIPMDAAQLGDFNKGNTVSQTANRTQYRSTRRLHKRKKLRRERLHRVLQLLGFLPPHYAAQLDRYGKFIANSEPKLAWVKNTNHLYHFIFQESFQEMLNDFTQADGSAKKIPYDWTLFYLRKKALTQKIKKEELAWILLNFNQKRGYHQLREEETEKPTSKTRLYFDSQTITDIVDTGETYKGLKIFTLTLANGEKGKWYGKNIPDWKGQKKDIIVSIDLDKNGNDKCDESGEPIRRFKIPTEQEWEEQWGLVKAKTEKDLNTSGKKVGTYIYDTLLQAPDQKIRGKLIRTIERKYYKEELYQILTTQEKFHPELQDKNLLQACIEELYPSNEAHRNTISKYSMSKLLVEDVIFYQRPLKSKKSLISDCPYEEHTYVDKETGEIHTVPVKCIAKSHPLFQEFRLWQFLSNLRIYQKEGTLNGKLTTDIDVTNEFLKNADDYVNLFDWLNQKKEIKQDAFFKYPAFGLKKNAANYRWNYVEDKTYPCNETHSRILFHWVKTDIDQSLLTIDLEEKLWHILYSISDKNELQKALQHFADKNKLGHKFVDTFQQIPPFKKDYGSYSAKAIKRLLPLMRMGKYWHPESIDNTTLTHIHQILNGEKDEVTASRIKGKAIHLDNLSSFQGLPTWLACYIVYNRHSEIKNITKWQQPSDIDAYLQSFKQHSLHNPIVEQIIMETLRTVRDIWKQIGHIDEIHVELGREMKNPADKRKKLTQQIQENENTNLRIKALLTEFVNPEFEIENVRPHSPSQQDLLRIYEEEVLNESAKNMPEDIATILKKFNETDAKKRPSTSDVLRYKCWLEQKYRSPYTGAMIPLGKLFTPAYEIEHIIPQSRYFDDSFTNKVICEAEVNKLKGNMLGYEFIKNNSGKIVELGFGQKVKIQTVEDYELFVKEHYSYNPVKMKKLLMEDIPEQFIQRQLNDSRYISKFIKSLLSNIVREEGESEATSKNIIVCTGGVTDRLKKDWGVNDVWNKIILPRFLRLNEITNSNLFTTTNTNNKIIPTMPLALQKGFNKKRIDHRHHAMDAIVIACANRNIVNYLSNESASKNAKISRLDLRQILCTRTKPDTFGNYQWIINKPWETFTQDVHTILENMIVSFKQNLRIINKTTNHYFRYQNGKKVQCVQETGDCWAIRKPMHKETVYGEINLRKITTVPLKSALENPQRIVEKDLKKKNKRIIATRIKRKANKKIF

SEQ ID NO: 5748 - protein, 637 aa, synthetic construct
  REGION 1..637: note = Synthetic
LTQKIEKEELAWILLNFNQKRGYYQLREEETEKASSKTRQYFDSQIVTDITDTGQIYKGLKIFTITLENGEKGKFFSKNMPDWKGQKKDIIAIIDLDKNGNDKYDENGELSRRFKIPTEQEWEEQWELIKTKTQKDLDTSHKTVGAYIYDTLLQTPSQKIRGKLIRTIERKYYKDELNQILKKQEEFHPELRDSNLLEACIEELYPNNEAHRNAIAKYSISQLLIEDILFYQRPLKSKKSLISNCPYEEYTYTNKETGEICTSSLKCIAKSHPLFQEFRLWQFISNLRIYQKEGTINGKFTTDIDVTNQFLKTEDDYANLFDWLNQKKEIRQDTFLKKPAFGLKKNIANYRWNYVEDKTYPCNETHYKILSYWEKAGIEQSALTSEIEEKLWHILYSISDKNELRKALQHFADKNYLSDKFADTFQQIPPFEKDYGSYSAKAIKKLLPLMRIGRYWKAENFDSTTLDRIEKILTGEFEENIKNRTREKTIYLDNLYSFQGLPTWLACYIVYNRHSEIKDVTKWQQPSDIDAFLNAFKQHSLHNPIVEQIIMETLRTVRDIWKQTGHIDEIHVELGREMKNPAEKRRKLTQQIQETKTPICVSRHFLLNLPIQNLELRTYARTLQASKIYCVYMKKKF

SEQ ID NO: 5749 - protein, 1551 aa, synthetic construct
  REGION 1..1551: note = Synthetic
MKKILGLDLGTNSIGWAVMNADVVRRENETTYLQPKGISAAGSRIIPMDEATLSDFDKGNTKSQTAERTGFRGGRRLLERNLLRRERLLRVLNLMNFLPEHYAKQIDRYGKFINHSEPKLAWAKGIDGKFEFLFKESFNEMLADFATNQPQLVADDKKVPYDWTIYYLRKKALSKRLTKEELAWILLQFNQKRGYYQLRGEEEEEQQDKIVEFLAQKVVRVEATDEKKGDDVWYNVYLENDMVYRRTSRIPLDWEGKIKEFIVTTDLEKDGTPKKDKDGNIKRSFRAPKEDDWTLLKKKTEYDIDNSKKTVGCYIYDSLLTNPNQKIIGKLVRTVERKYYKDELKQILDAQKAFIPELKDETLYKACIEELYPNNEAHRNNIAKPDFANLFINDILFYQRPLKSKKSLISDCPYESHFDKDGVEHPIKCIAKSNPLFQEFRLWQFVQNLKIYQRERTISDGQLDLFGNVSAGKLQTDVDVTAELLKTEDDYVALFDWLNDRASIKQDTLLNSYFKFKKEKDKDQYPYRWNYVEDKEYPCNETRAEILKGLDKCGIATNFLTKEREMQLWHILYSVEDKNDIIKALKKYAEKNHLPESFAEVFGKIKPFAKDYGSYSEKAIKKLLPLMRIGKYWSVDAFDTKTKERIEKIITGEYDENIKNRVREKAIDLTDETHFKGLPIWLACYIVYDRHSEAKEIDKWNKPEDIDNYLKEFKQHSLRNPIVEQVVTETLRTVRDIWRKEGQIDEIHVELGREMKNPADKRKRMTENILQNENTNLRIKAMLMEFTNPEMGIENVRPYSPSQQDILRIYEENALDNLTKDDKEFEFVSKISKTAQPSKSDIVRYKCWLEQKYRSPYTGEMIPLAKLFTNAYEIEHVIPQSRYFDDSFSNKVICEAEVNKLKDRQLGFEFIKNHKGEKVQISQGNTVEILSVEAYEKFVKDHYNNNRAKMKKLLMDDIPDDFIERQLNDSRYISKIVKGLLSNIVREKLPDGEYEQDAVSKNLISCNGSITDRLKKDWGMNDVWNSIVLPRFKRLNELTGKYVFTAISSEGHEIPAMPLELQRGFNKKRIDHRHHAMDAIVIACATRSHIQYLNNESAKTENRKLQHGLAKQLCSFKEVEFKKKIKNKNGVWVESEEKTKKNVPDKFLKPWNSFTTDAKQALENIIVSFKQNLRVINKTTNNYQHYDESGKKVMVKQGRGDSWAIRKSMHKDTVFGEVNLRFKKTVSLNEALKNPKAIVNKDFKAKILELLKAGRDAKYIKKYVEDNKDVWSDIDVKKIDVYHFTKETNDRYFATRKPLDISFNQKKIEESVTDTGIQKILLAHLEAKGNNPELAFSPDGIDEMNRNIVALNNGKFHQPILKVRVYEKAEKFAVGQSGNKPSKFVEAAKGTNLFFAVFATNVEDKETGEPKVVRSYLTIPLNVMIDCQKKFGSKWYSNIEAYLRENKMISDEVKLLFILSPNDLVYLPTKEELKGGIKVVDKNRIYKMVSSTGNRLYAIQFNIAKCIVDKVEYTQLNKVEFSDDKLSIKEVCVPLKVDRLGNITEINNKKL

SEQ ID NO: 5750 - protein, 1481 aa, synthetic construct
  REGION 1..1481: note = Synthetic
MKTILGLDLGTNSIGWALIAKSENEKDGKILGIGSRIIPMSQDILGDFSKGNSISQTAERTGYRGVRRLRERHLLRRERLHRVLNVLGFLPNHYANLIDFEKRLGQFKAETEPKLAYQEIGNEEKQKNKYDFIFKESFKEMLNDFREHQPKLLENDRKIPYDWTIYFLRKKALTQKIEKEELAWILLNFNQKRGYYQLRGEEEEENPNKLVEFYSLKVIDVQADEPQKGKEDIWYSLVLESGLVYRRSSKTPLFDWKDKVKDFIITTDLNDDGTIKIDKDGKEKRHFRAPSEDDWTLIKKKTETEIDSSGKTVGTFIYDTLLQNPKQKINGKLVRTIERKFYKDELKQILQKQQEFHSELQSEDLFNNSIRELYKYNEAHQFLLSKRDFVHLFLDDIIFYQRPLKSQKASISNCSFEYKKYNVNGEEKTIYLKSIPKSHPLYQEFRLWQWIYNLRIYKKDDDYDVTNDFLKNNEDYEDLFEYLNNRKEVDQKALLKHFKLKDKTHRWNFVEDKKYPCNETRTLIKTRLEKVENLPDNFLTEETEKQLWHIIYSVTDKIEYEKALKTFAKKHRLEANSFVENFKKFPPFKSEFGSYSAKALKKLLPLMRIGKYWNDIEVTTEVKDRVNSILERLQAINFNEKEIENVADDDVQKQVLKSFLKQKDFTKGLQLYQASYLVYGRHSEAAIAGKWYSVSDLEEYLKEFKQHSLRNPIVEQIITETLRVVKDIWQQYGKGDKDFFEEIHIELGREMKNTAEDRKKITNQVIENENTNLRIKALLLELKNDSSIENIRPYSPIQQEILKIFEDGILSSDIEIPDDIVKISKTAQPSSSELQRYKLWLEQKYRSPYTGQMIPLNKLFTADYEIEHIIPQSRYFDDSFNNKVICEAAANKLKDNQTGLEFIKNHHREIVQTGLGKSVKIFEVKDFEDFVKSHYAKNRSKRNKLLMEDIPEKMIERQINDTRYISKFISAVLSNIVRSDHNDDGINSKNIIPGNGKITNILKQDWGLNDVWNDLILPRFKRMNRLTNSTAFTLYNERYQKHQPTVPLELSKNFQKKRIDHRHHALDALVIACATRDHVNLLNNKYAKSDERFDLNRKLRKFEKVSYIHPKIGKRVEKEIPKDFLKPWANFTVDAKKILETIVVSFKQNLRVINKTTNKYESYKDENGNLRIGKDGKPVKDVISQISGDRWAIRKPMHKETVSGKIVLNRITVPNGKILTATRKSVDTSFNLKTIESITDTGIQKILKNYLSSKENNPELAFSAEGLEDMNKNIEKYNNGKPHQPIYKARLFELGSKFQLGQTGNKKAKYVEAAKGTNLFFAIYQDEDGKRSFETIPLNIVIERQKQGLHSIPEINEKGDKLLFHLSPNDLVYVPSEEDIENPISIDFSNLSTEQLKRVYKFTDGSGTTMNFIPANIASLLFDLSKKEQEKIGVNLLIQNELGVGSPQSKNQNSLEGIQIKSVCWKLKVDRLGNINSVIGK

SEQ ID NO: 5751 - protein, 1151 aa, synthetic construct
  REGION 1..1151: note = Synthetic
LLLACIEELYPNNEAHRRLLSTSDFIYFLVEDILFYQRPLKSQKGLIDDCPYELHVYRDKKNGSLQHVPLKCVSKSHPLFQEFRLWQFLASLRIYQRERQVDGSLKLDVDVTNEFLQSEDDYVKLFDWLNDRKDIDQKTFLAYKPFGLKKNELSQYRWNYVEDKSYPCNETRADMVSRLNKAGVPEEFLTREKEEALWHILYSISDKKELTKALGTFAEKNGLNETFVEIFSKMPPFESDYASYSLKAIRKLLALMRMGKYWDEQAIDEQTRSRIEKILTGEYDETIRTRVREKAMHLTDISSFRGLPLWLACYVVYDRHSEAKELVKWETPDDIDHFLHKFKQHSLRNPIVEQVIMETLRTVRDIWRQEGRIDEIHVELGREMKNPSKERARITAQVLENENTNLRIKALLTEFMNPEFEIENVRPYSPAQQEILRIYEEGVLSGVAEKDLPDDIASILKKFRENDVKKRPTTSEVLRYKLWLEQRYRSPYTGRIIPLGKLFTPAYEIEHVIPQSRYFDDSLTNKVICESAVNKLKDNCLGYEFIKKHSGEKVELGNGETATIFSVEEYERFVKDSYLGNSKKMKKLLLEDIPDNFIERQLNDSRYISKVVKSLLSNIVCEEGEQEGMSKNVIVCTGGVTDRLKKDWGVQDVWNRIILPRFLRLNKITDSTDFTSVSTNGHLLPAVPLHLQKGFNKKRIDHRHHAMDAIVIACAGRNIVNYLNNASARKGSEISRYDLQHLLCDKVKTDANGNYKWILRKPWETFTQDVYVALTDIVVSFKQNLRVINRTTNHYQHYNEDGEKKMIPQTKGDRWAIRKPMHKDTVYGEVNLRKEKTLPLKDVLNNPSIVVDKSLKNKLYELLKSQYDLKAITKYFETHQDVWADVNLKKIKVYYFTKETNERFFATRKSLDSSFNQKKIEEEVTDTGIQKILLRHLQQNGNNPDIAFSPDGVERMNQNMTILNNGKWHQPIYKVRTYEKADKFAVGESGNKVKKFVEAAKGANLFFAVYESMQEDEATGKEVRKRTFATIPLNEVIKRKKQGLSVAPEDSKGNLPIFVLSPNDLIYLPTEEERNSGKIIQPLDRERIYKMVSSSGNQCFFIKAFVASSIWDKKEYSSLNKMERAVTDEMIKEICIPVKVDRLGNASLIKI

SEQ ID NO: 5752 - protein, 1480 aa, synthetic construct
  REGION 1..1480: note = Synthetic
MRTILGLDLGTNSIGWALIDDENKKIIRAGCRIIPMDGQAMSNYETGNLQSSASVRTSFRVTRRLYQRAELRRERLLRVLNIMGFLPEHFKNQIDFVDHPGQFKNHSEPLLPYRKNKEGRNEFIFMDSFHEMLADFKVYHPELLANGKKIPYDWTIYFLRHKALSHPISRQELAWIILNFNTKRGYYQLRGNEETETKNGEEYKILKVTKVEDTGADKKRKNMHWFEITYEGDIKQKRLSVAPPKSVGDTAELIVTTKTKKDGSLSVSLREPKEGDWTLMKKRTESIINHSGQTVGEYIYTTLLKEPDSKIRGNVVRTIERQYYKDELIKILETQKKFIPELQNHSLMEKCVNELYHQNEVHRDAISKDSFTRFIVDDIIFYQRPLKSKKGEIADCPFEKYRYKDGEGNIIEKGIKCTSKSDPLFQEFRLWQFIQNLKIFAREKEVDGKLRTDVDVTCDFIKSSEAIVALFDWLSRQKEITEDKLLKSQIFDLGKNASRYRWNYVEGRAYPCCPTHAEIISRLSKVKGIPSLSREQEMDLWHILYSVDDAIDLEKALGHYAEKNSLDVSSFKEAFKDMEPFDNDYASYSQKAIKKLLPLMRCGKYWTGDKIGTYTHQRIDNIMNGVVDGNISDRVREKAVAMRSLEDFQYLPLWLASYIVYNRHSEAFDTSIWKTPDDIDNYLNTEFKQHSLRNPVVESVIGEAIRVVRDIWKTYGKISEVHIEMGRDLKQTKDQRVKTNERALENQITNIRIKRLLGEFMKPQYQVENVRPQSPSQAEILKIYEDGILNSGVDVPDEIETILRNLGNLSKEVSGSDIMRYRLWLEQGYQSPYTGQVVPLSKLFTPAYEIEHVIPQSRYFDDSISNKVICESEVNKAKGNMLGYEFIQQQGGAIIVGNGGKQHKILDTKQYEDFVKQHYANNRGKLKKLLMDEIPDDFIQRQLNDSRYIARKALEIFSHLVREEGEQEAISKNVVSTNGSITTRLKKDWGMNDVWNDIVGPRFERLNRITKSEAFGSWVNKDGKRYFQTDIPLELSRNFSKKRIDHRHHAMDAIVIACTTKDHVNYLNNSASLSSKGEIRYDLQHKLCNKVKTDANGNYVWRFRKPWDTFTQDAHRVLDGIIASFKQNLRVINKMTNYYWKYVDGKKQLVRQTKGDGWAVRKSLHKATVYGAVRLQNKKTVKLKDALENLSTIADKDVRKAIKNVVELYHGKVDNKTLLKYFKDRQYKVGNKDISKVEVYDLPSQPDMAATRVPIDTSFDQKAINSVTDSSIRAILTHHLKNYRDKSGKDHPELAFSPEGLVRMNENIQVLNRGKLHKPIVKVRKFEPLGMKFNVGEYGTKQEKYVEVDKGTNLFFAIYVDEDGSRSYDSIPFNVAVERMKNGLHPAESKLPDGRTLLFTLSPYDLVVLQHDGEWNNQLFRFVSSTGNRASFIPVNVASPIANKLEFGALNKIELTDDRLSIKQYCIKVSVDRLGNIINL

SEQ ID NO: 5753 - protein, 1544 aa, synthetic construct
  REGION 1..1544: note = Synthetic
MKKILGLDLGTNSIGWALIEQDFDQKSGNIIGMGSRIIPMDQTSIGDFEKGNPVSQTADRTNFRGIRRLRERFLLRRERLNRVLYQLGFLPQHYSDQIDFEHHFGKFLNDKEPKIAYKLNIDTNRCEFIFKSSFEEMIEEFQKCQPKLFLNNKKIPYDWTIYYLRKKALSSPISKEELSWLLLHFNQKRGYYQLRGEDENENTNKLIEFHALKVVDVQDSGDRKNKEEIWYNVILENGWVYRRTSRLPLDWVGKIKEFIVTTELNDDGSFKMDKEGKEKRSFRSPGADDWTLLKKKTEDEIEKSNQTVGSYIYNTLLQSPEQKIKGKLVRTIERNFYREELKLILEKQQAFHPELLNKANYKLCLEELYKNNEDHRATYKDKDFVHLFVNDIIFYQRPLKSKKSEVSDCRYEFRTFIDEHGIKQTKILKCIARSHPLFQEFRLWQFLQNLKIYQREKYIDGRLYTDVNVTSDFLKTEDDWVELFDFLNDRKEIDQKAFLKYPAFRLKKNVDLYRWNYVEDKTYPANETRSQMLTKLKSSNLAPEFLTKDVEEHLWHILSSVEDKIEIGKALATFAKKYSLSGEFIENFRKFAPFKKEYGAYSAKAIKKLLPLMRRGKYWSEDGISPNTRIRLEAITERLKSINYDKNRIDEITDDDIPKQVLKSFLDCQNPFKALNTYQACYAIYGRHSEESDVVKWTTPNELDYYLKHTFKQHSLRNPIVEQVVTETLRVVSDIWQQFGNGNIDFLDEIHIELGREMKNTADQRKRITETVSVNENTNLRIKALLIELKNDPSIQNVRPYSQSQLEILKLYEEGVLNATEAIPEEISKISKNSQPTSNELTRYKLWLDQQYQSPYTGEIIPLGRLFTSSYEIEHIIPQSLYFDDSLSNKVICESVVNKDKDNRMAYSYIQQNQGKIIELDFGKQVKLFTLDAYEDFVKTRFLKNKSKLKKMLMEEIPEDFINRQLNDTRYISKLIKNLLSNVVREEGEVETTSKNVCVCSGSITSILKQDWGLNDVWNELITPRFERLNEITKSPKFGQWTNKEGKRVFQTEIPLELQKGFSKKRIDHRHHAMDALVIACATRNHINYLNNEHAHKKDDKVRFDLREKLRRIERMDIQKIENGQKIRRTINVAKEFIKPWESFTQDTRLKLSTTIVSFKQNLRIINKTCNWYQKWERQPDGSIKKIFTKQEKGDHWAIRKLMHKETVNGLVQLRFKKFVQLNAALDQWEMIVDKSLKNQIRILFKQGFEKSKIRKFFKVLEDKWDGKEISKVELYYFEKEMVASRSAITESFNSIGILSITDTASQKILLNHLVKYNEIKAGKIIEHPEIAFSPDGIDEMNRNISDLNDGKFHQPIFKVRTFETKGSKFKVGSTGNKVNKYVEAAKGTNLFFAIYQNNEDKRSYESIPLNIVIERQKQGLTPVPEINDKEEHLLFHLSPSDLVYIPTNEEQINNQSFGIQNISQIQNCNIYKMVSSSGSQCFFVRHEIASPIWNKVEFSALNKTERSIEGIMIKDVCYKLSINRLGFVKGIINGLITNNIIKD

SEQ ID NO: 5754 - protein, 1526 aa, synthetic construct
  REGION 1..1526: note = Synthetic
MKKILGLDLGTNSIGWAVVGENEEKKEILGIGSRIIPMSQDILGKFDSGNSVSQTAERTSFRGIRRLRERQLLRRERLHRVLHLMGFLPIHYDAVIDFEKRPGKFINYQEQKIAWKSTSNQRFEFLFKNSFDEMLEDFKKINPSFFSATGNNHERKIPYDWTIYFLRKKALQTKIEKEELAWILLNFNQKRGYYQLRGEDEEISNKNVAYHSLRVIDVTVDEPQKGKNDVWYNVILENGWVYRRSSRIPLYDWVSKTKDFIVTTELNDDGTIKKDKEGNERRSFRAPSDDDWTLLKKKTETEIEKSHKTVGTYIYDALLLNPDQKIKGKLVRTIERKFYKQELKAILEKQKEFHHELTDPELFRECLTELYQNNETHRNSNINKDFTYLFLNDILFYQRPLKSKKSLISNCKYEYRTYVDKPTGEIKKAPIKTIPKSHPLYQELRLWKFVKDLRIYEKDKIVDGKLKAEQDVTVEFLKTENDIVSLFDWLNNRNEIKQDTLLTSWFKIKRKKGEESLPFRWNYVEDKEYPCNETRSLIFSKLSKAGIIASDFMNEEKIIALWHILYSIEDKIEIEKALKTFAFKNNLNDEFVEIFKKFPPFKKEYGSYSEKAVKKLLPLMRIGRYWDKNRIDANTLLRIENIINGEVDNKIRERVREKAIHLTELEHFKGLPEWLACYVVYDRHSETSDLEKWNTPDELDWFLNSKNPEGFKQHSLRNPIVEQVITETLRTVRDIWKKYGDITEIHLELGREMKNPADLRKKLTAKITENENTNLRIKALLAELVNHNDIENVRPYSPNQQEILKIYEEGALNSSIEIPDDIAKISKAGNPSKSELIKYKLWLEQKYRSPYTGEIIPLGRLFTSDYEIEHIIPQSRFFDDSISNKVICESEINHEKDNDLGYEFIKNNEGRIIELSFGKKVRIFTISEYEAFVKQHYGRNRGKMKKLLLEDLPEDFIQRQLTDSRYISKVVKSYLSKIVREKDEQEATSKNVISCTGGVTATLRQDWGLNEVWNRIITPRFERLNELTQSNKFGQWTNKDGKRVFQIDVPPEQQKGFNKKRIDHRHHAMDALVIACATRNHINYLNNAHASGKDSKIRYDLRNKLRRIEEIEVEKTVNGQRIRKKLKVAKEFIKPWDTFTQDAQKSLENIIVSFKQNLRVINKTVNSYQVIENGRKIFKKQIKGDSWAIRKPLHKDTVSGIVNLRLKKLVNLSSAIDQWENMVDKNLKTKIKQLINEGLDKKKMLTFFAEKENKWMDNDVSKTEIYYFSNEKEILVASRETLNDSFNSKTIESITDHGIRKILLKHLAKYNEHKEGKIIEHPELAFSPDGIDEMNKNIISLNGGKYHKPVIKVRTFEPKGNKFNVGTTGNKKAKFVEAAKGTNLFFAIYQNSEGKRSYESIQMNIIIERQKQGLIPVPEINEKGEQLLFHLSPNDLVYVPKEEEIFDQLSDIHLRLHQNQQKMIYKFVSCTENEGHFVPNYYASPILKNELGSNNKNQNALNGIQIKSVCWKLEVDRLGNIQSIIK

SEQ ID NO: 5755 - protein, 1539 aa, synthetic construct
  REGION 1..1539: note = Synthetic
MTKKILGLDLGTNSIGWALIQQDFENKKGEILGMGSRIIPMSQDILSDFGKGNSVSQTANRTDYRSVRRLRERHLLRRERLHRVLNVLGFLPEHYAKEIDFKKHLGKILEEKEPKLVWKEVTKNKFDFVFKNSFNEMLHDFQKNKSELLNRKNKKGEDAKIPYDWAIYYLRKKALKQKIEKEELAWILLNFNQKRGYYQLRGEDDETVLNIKEYVELLKVIQIEKGEKDKKNDKKSWYNITLENGWIYSATFTSEPLWLNQEKEWLVTEEYDENGIIKIVKDKKTDKEGKQKRKFTPLPSFEEIDLMSKADQDKVYKKIKAKTEITIRNSGKTVGTYIYDTLLQKPNQKIRGKLVRTIERSFYEDELKQILERQIKLQPELFNRELYNNCVRELYRNNEMHQTILSKNGFVHLFLNDIIFYQRPLKSKKSSISNCTLEFRKYKDENGNEQTAPLKAVSKSHPLYQEYRVWQWLYNLSIYKKEDETNVTAEFLSSIKDYEKLFAFLMLQKEVDHKDIIGYFLKQKDDKLKGKALITETVKYRWNYVYNSEKDESKNYPCNETGYEIRRRLEKVENVPTDFLTAEIEQALWHIIYSVTDKNEFETALETFAKRHNLYYVPKSERNAENPDKKCFVENFKKFKPFDNDYGSYSLKAIKKLVPLLRLGKYWKWDAIDDKTKNRISKIITGEFDENIKNRVREKAIQLTSENCFQGLQLWLAQYIVYDRHSEGKDGKIWESIADLEKYLEEFKQHSLRNPIVEQVITETLRVVKDIWKKYGKSAKKFFDEIHIELGREMKNTAEDRAQITNQINENENTNIRIKLLLAELLNDQNVENVRPYSHSQQEILKIYEDGVLNSGVEIPNEVSEIFKKFKERDSKKQPTSSEVKRYKLWLEQKYRSPYTGEMIPLNKLFTADYEIEHIIPKSRFFDDGFNNKVICEAAVNKLKDNQLGLEFIKNNHGEIVELGQGKTVKVFSEDGYKDFVKQHYTTNHSKKNKLLLEEIPEKMVERQLNDTRYISKFISSILSNIVRSETNDDGINSKNVIPGNGKITATLKQDWGLNDVWNELILPRFERMNELTKSTVFTAYSEKQQKHLPTVPLDEFSKNFKKKRIDHRHHALDALIIACATRDHVNLLNNQHAKSETKRYDLQRKLRKFEDVEYDDKSGKRVKREVPKDFLKPWDNFTVDAKNKLEAIVISFKQNLRVINKATNKYESYKDENGNIRIGKNGKPEKDFIPQTQGDSWAIRKPMHKETVSGKVKLARIKVPKGKILTATRKKIDTSFDLKTIESITDIGIQKILSNYLKQEKFKGTNDKEEVLYNPEIAFSPEGIEELNKNIIKFNDNKPHQPIYKVRIYKETGEQFQVGQTGNKKYKYVTSAQGTNLFFAVYTNEKGKRDFETIPLNEVIEHQKWRATLPKEQQKATPLIPIKPINGTLLFYLSPNDLVYVPTKEEQENSTRIDFGNLMRRRLFVVNDFSSTCYFTPNHIAKNIAPKEIDLSFDSKKNKLSGSFDTKTASFEGEQIKDICIKLQIDRLGNISKA

SEQ ID NO: 5756 - protein, 1531 aa, synthetic construct
  REGION 1..1531: note = Synthetic
MFSQRNNPYCELLSNLKQRYIKSFVFPNLYFKKILTKFGIDCKILAMKHILGLDLGSNSIGWALIEQDFDNKQGKILGLGSRIIPMDQGILGEFERGNKVSQTAERTKFRGVRRLRERHLLRRERLHRVLHLLGFLPPHYDAQIDFMKRFGKFMGDSEPKLAYNNEGFIFLESFNEMVEDFKKHQPQLFYIKSNGEESKIPYDWTIYYLRKKALYEKISKEELAWIILNFNQKRGYYQLRGEEEEKSTKNVEFYSLEITDVIADTPNNKGEIWYSIHLENGWVYRRASKISLEDWKGKVRDFIVTTELNEDGSIKLDKEGKEKRSFRAPSEDDWNLIKKKTEQNIVFSGKTVGEYIYDHLLQNPNQKIKGKLVRTIERKFYKEELKAILEKQVALQPELFTEELFVDCVRELYKNNEIHQNSLSSKDFVHLFLNDIIFYQRPLRSQKSNISSCSLEYRFCIDEETKQRRKTYLKVISKSNPYYQEFRVLQWLSNLKIYRKEDDKDVTSEFISSIENKETLYEFLMSEKEVSNKSVLEFLLMKSLKETYPFAKETELKKELKKEITKYRWNYVYEEENDNKKYPMNETGYEIRKRLKEVKNIPDNFLTKDIEYQLWHIIYSVTDKYEYEKALVKFAQKHNLDAESFVEHFKKIKPYPSDYGAFSEKAIKKLLPLMRFGKYWNYSNISEPVQARISDIINGVDNESIKTIVREKAEKFQLSQEADFQGLPLWMAQYIVYGIHSEAVDIQRWTSPSDLEEYLKGFKQHSLRNPIVEQVVTETLRVVKDIWEYYGKGEENFFGEIHIELGRELKKTAEERNRMTREINENEETNLKVKKKLQELFEDKSAENVRPYSPIQQEKYRLWLEQEKESPYTGQPIPLSKLFTDEYQIEHVIPQSRFFDDSLSNKVICEAAVNAEKGALLGLEFIKKHGGEILDIGLNKKVTILNEKEYKELVNKYFANNRAKKAKMLMEEIPEKMVERQLNDTRYISKFISQILSNIVRSPQEDNGVNSKNIIPCTGKITAALKQDWGLNDVWNDLILPRFERMNNLTQIELFTTYSEKYQKKIPTVPLEHAKGFQKKRIDHRHHALDALVVACATRSHINYMNNKHALDKHKAKEEKQNTRIDLRTVLCEKKYNDNAEDKYNWTFKKPWNTFTQDVRSALEMVVVSFKQNLRVINKATNYYEKWVEERGKMVKKKVKQEGINWAIRKPLHDDLPYGEIKYQTNYLKISENISKRKFIIDEFIRNQVERIYVENHSKNNLTQKYLKEYPVIDEKGKEVVSTDFRIEVIKYRKRKPISILSDRNSRTGITTIEKMLQAINKIADNVLKKELLLHLEQNNNDIDKAFAVEGIERFNSERKTPVYRLPFIEDGEKKIKLGSKGKYVEAAKGTNLFFGIYQGKGKRSYATIPLAEVIERQKQVLTSVPEFNEKGEKLLFSLSPNDLVYVPMEGEDVESINFTNLSKEQRERVYKTVSFTGSQCFFVRQDVATSIVNKMEYSSLNKMEKGIDGIMIKETCIKLKIDRLGNISKA

SEQ ID NO: 5757 - protein, 1553 aa, synthetic construct
  REGION 1..1553: note = Synthetic
MKNILGLDLGTNSIGWALVRSDKDSDNVERATGITAAGSRIIPMDAAVLGDFAKGNTKSQTADRTAARGIRRLAERHKLRRERLNRVLDVMGFLPDHYSSSLTRYGKFKDDVECKIAWRKDENGKWTFVFGDSFREMLADFAARQPEWLTRGKKVPYDWTIYYLRKKALSKPLTGQELAWLLLNFNQKRGYYQLRGEEEQMSEKGKLVEYYALKVVGVEDTGERKGKDTWFNILLENGMVYRRTASEAPDWIGKTKEFIVTTDLEKDGTPKKDKDGNVKRSFRMPKEDDWTLVKKKTESDIDKSGKTVGEYIYDTLLDNPTQKIRGKLVRTVERKYYKEELRRILETQKQFMPELTDKALYDRCIEELYQSNDAYRKSISSYDFTYLFIDDIIFYQRPLKSKKSLIDDCPYETRSYVDKQTGEVRQSPVKCVAKSNPLFQEFRLWQFVQNLRIFERQKKVGDSVKTDVDVTDEFIKSEDERVALFDFLNDRKDITQGVLLGTYFKVRKPKGKEGEYPYRWNYVEDKTYPCNETRALMLKGLKDAGVDAAFLTVAHEHRLWHVLYSVEDKQEIRKAMAGFARKYNKRADKVKDKSGHVIELNDKFVEVFSSLPPFKKDYGAYSEKAIKKLLALMRMGKYWSVAAIDKHTLARIDKIITGEYDEGIRTRVREKAISLTDVSHFRGLPLWLACYIVYDRHSEAKDITRWSSPADIDRYLKDFKQHSLRNPIVEQVMTETLRTVRDIWKQYGKIDEIHIEMGRDMKNPADVRAKISKRMAENENANLRVKTLLTEFVNPDFDIANVRPYSPTQQELLRIYEEGVLDSVDEVPDDINEIMAKFNQSDVAKRPTHGEVMRYKLWLEQHYQSPYTGRIISLSRLFTDDYQIEHIIPQSRYFDDSLSNKVICEAAVNQLKDRMLGYEFIKNHHGEKVDLGMNVTATILTVEKYEELVQKNFRKNPVKMKKLLMDDIPDKFIERQLNDSRYISKKIKSLLSNMVREEGEQEDISKNVITCNGTITDRLKRDWGVNDVWNHMILPRFQRLDAHTDSHRFTTTNTNGHTIPDMPLDLQKGFSKKRIDHRHHAMDAIVIACTTRNHVNLLNNEAAMSKNNAMRYQLSHKLRRYEDVTKTQDGRTRTISVAREFIKPWPGFCGDVEQALQGIVVSFKQNLRVINKTVNKYQKIVYDEERHCKVKKMVRQEEHDGRHLLAIRKSMHKDTVYGEVNLRRIREVSLKEAVANPKAVVDKDLKKKLKAMVELGYELKRIQQYFDDNKDAWQDINLKKIKVYYFTKDTRDRYFATRSGNDLVALFNKTMKKEEVEKQIGKITDTGIQKILRRHLETNGGDYKKAFSPDGVDEMNRNIRQLNNGKAHQPIYKVRVFEKADKFAVGVRGNKAAKFVEAAKGTNLFFAVYQKEVKDSATGGTTMKRVFDTVPLKIVIDRLKQGLTPAPEEKEGAKLLFVLSPNDLVYLPTASERESGTIQQPLDRKRIYKMVSSSGNQCFFLKYNVASPIVDKFEFSSLNKMERAITGEMIKESCIPIRVDRLGNIIEINNKKL

SEQ ID NO: 5758 - protein, 1548 aa, synthetic construct
  REGION 1..1548: note = Synthetic
MKKILGLDLGTNSIGWALTNNDFDNKLGNIEGLGSRIIPMSQDVLGKFDSGVSISQTAERTKYRGTRRLVQRFLLRRERLHRILNILDFLPKHYAETIDFEKKFGQFKPEKEEKLSFYKNESGKNQFLFLESHQEMLAEFQLINPDLKQVPYDWTIYYLRKKALTQKISKEELAWILLNFNQKRGYYQLRGEEQEDNKNKLEEFHTLTVVDVIEREKGKSGIWYNVILENGWIYKRESKIALFDWIGKQKNFIVTTELNDDGTVKLNKDNEEKRSFRSPKEDDWGLVKIRTEQTINQSEKSVGTFIYDALLKNPNQKIKGELLRTIERKFYKDELSKILKAQIAFHHEIFGDRNLYKKCIDELYRHNESHKNNIKDKGFDYLFLDDIIFYQRPLKSKTSLISDCSLEFVPIKDENGILVKDDNGKQVVKPLKCIAKSNPIFQEFRLLQFVKNLKIYKKEIVNDVDVTHDFIKTEEDLVELFNFLNDRKEIDQISLIKHLLRPLKLKGKLLDAEVAKLRWNFVEDKIYPCNETRNQFLNAVAKIDVDKSFFDAKNTQDLWHILYSVTDKIEITKAITTFAKKHNLPDEFITNFSKLKPYKKDYGSFSEKAIKKLLPLMRFGSYWKESNIDIKTLARIDKIQTGEFDENMRTRVREKAIHLSKTTDFQGLPLWLASYIIYDRHSEASDVSKWKTPADIQNFLKYDFKQHSLRNPIVEQVITETLRVVKDIWQHYGDGKENFFTEIHIELGREMKNDKATRERMTKKISENENTNLRIKAILTELKNDGLNDIRPYSPSQQDILKIYEEGVYSNENKKEKLEEIDKIRKNAKPTPSEIIKYKLWLEQGYISPYTGKLIPLSELFTTKYQIEHIIPQSRLFDDSLSNKVICESEVNELKSNMTAYEFIQNNEDRIVILTGGKTVKIFTKDAYNQHITAYYSKNKSKQKRLLSEEIPEKFIERQLNDTKYISKIVKNLLSRIVREEEEQEVTSKHIVSLNGSITSRMKQDWGLNDVWNNIVTPRFERLNALTNSNDFGQFELKKDAYGNKGKQIFQTTVPDAIAKGFTKKRIDHRHHALDALVIACVSRTHINYLNNLNARDTDDKAVKHELRNKLCFKTKPDSNGNYKWEFYKPWKDFTTEAEDKLNTTIVSFKQNTRVINKTVNKYTNYKDEKGNLNIGTNGLVEKKIITQTKGDNWAIRKPMHAETVSGKVFLKRIKQSPITIANAIEQIEFIVDKEVKKQLASKIKQYPNNMVGLKKHLKAFPVMIDGKAIDKVQVYETIEATATRKTLDITFDEKKIEKITDTGIQKILLNHLKQEMYQNAIHENGEKIPAHEVAFSENGLDELNKNLTTLNNGKKHQPIKKVRVFEEGGKFRLGQTQNKADKYVEAAKGTNLFFAIYQDEKGKRNYKTIPFNEVIERQKQGLSAAQETDENGNRLLFTLSPNDLVYLPTEDEKENLTTINFDKLSKEQTERIYKFVSCTSGEGHFVSNNYSKEIISNENGSNNKNERMLELNNSNTIYDEKEKPVMIKSVCWKLEVDRLGKIRKIIR

SEQ ID NO: 5759 - protein, 1518 aa, synthetic construct
  REGION 1..1518: note = Synthetic
MKIVLGLDLGTNSIGWALIKQNFENKEGEILGLGSRIIPMSQDIMGKFDAGQSISQTAERTGYRGARRLRERFLLRRERLHRVLNILSFLPEHYSLNIDFTKKTGQFISETEPKLVYNGSNQFIFKTSFEEMLGDFRKEQPKLVNNDKKVPADWTIYYLRKKALTQKIDKEELAWLLLHFNQKRGYYQLRGEEEEENPNKLIEFHSLKVVEVIADEQEKGKPDLWYNIILENGWIYRRASKTPLFDWKDKTRDFIVTTDLNDDGSVKTDKEGNEKRSFRAPAETDWTLVKKKTESEIDNTNKTVGEYIYDTLLQSPNQKIKGKLIRTIERKYYKQELKRILEKQSEFHPILQDEKIYLSCIEELYPHNESHRSNISKKNFVHLFLEDILFYQRPLKSQKNLINGCPFESTRYIEDGIQKTKALKCIPKSHPLFQEFRLWQWLQNLKIYNRDTDQNLTSDFLSAEENYIALFDFLNKRKEIDQKALLKHLKLSEKTHRWNFVEDKKYPCNETYSMIQSRLEKVKSVPNDFLTSETEFQLWHIIYSVNDKIEYDKAIRSFAVKHSLDIETFVENFRKTPPLKNEYGSYSAKAVKKLLPLMRMGKCWSWNNINEQTKIRIERLQTGEFDENIKNRVREKAIHLKENNDFKGLPIWLVSNIVYDRHSESSDNKKWKSVSDLEAYIKSFKQHSLRNPIVEQVVTETLRVVNDIWKHYGKGEENFFNEIHIELGREMKNPADKRKKMTSQISENENTNLRIKALLAEMLYDTSVENVRPYSPMQQEALKIYEDGVLNSNIEIPEDIVKISKSPQPSKTELLRYKLWLEQKYRSPYTGNIIPLSSLFTLEYEIEHIIPQSRYFDNSFSNKVICESAVNKLKDNKTGKEFIKDHHGQIVEISFGKTVKIFEEEVYEEFVKDHYSKNRTKRNKLLMEEIPEKMIERQLNDTRFISKFVMSTLSNIVREENSNDDGVNSKNILASNGQITSTLKQDWGLNDVWNDLILPRFERLNELTNSKNFTSYNKRYQKNLPSIPLELSKGFQKKRIDHRHHSVDALIIACATRSHINFLNNQNALEKNKSKEEKQRSRNDLRTALCKKEYNEGSEKNYRWIFKQPWNNFIIDSKNKLETTIISFKQNIRVINKTTNLYESYKDENGNLRLDKNGKPKKEKIKQIKGESWAIRKSMHTPMPYGKKEYYFDVLKIADNVGKLDLIIDETIKLKVQSRLRQLNNKITETQKYLKNNPLKDQNDKPVLTSAFNIKTEKFRRKQPISKLSNRGQGGVKTIEDAMKFIEKIADLKLQQDLIMHLNFNEHDLEKAFSSEGLERFNQNRKVPVFNVPIAENGSSRFLVGNRIGTKHKWVEAAEGTNLFFAIYVDENNKRSYTSIPFNIVIERQKQGLVSAPEIDSKGNKLLFYISPNDLVYVPNLEEIENPNLVDFKYLSKEQVQRIYKFVSCTGGEGHFVSHNYSKEIVSNENGSNNKNERMLEYVKLNTIYDDKLKPMMIKSICWKLSVNRLGQITKIIR

SEQ ID NO: 5760 - protein, 1464 aa, synthetic construct
  REGION 1..1464: note = Synthetic
MKRILGLDLGSNSIGWGLIEQDFGQREGKIIAAGSRIIPMDQGLLGDFEKGNTVSQTAERTFYRSVRKLRQRHLLRRERLHRVLHILGFLPTHYDKQIDFSKRYGKFIGNVEPKLAYKEGKFLFMDSFQEMLSDFKSHQPDLFYTKKNGEESKIPYDWTIYYLRKKALSQKISKEELAWIILNFNQKRGYYQLRGEEEAENPNKEVTYYSLMVTEVTAEAPNKKGEIWYSIQLENGWVYRRTSKIPLDNWRGKSRDFIVTTELKEDGSVKRDKEGKEKRSFRAPDENDWNLLKKKTEQDINTSQKTVGTYIYDHLLQNPNEKIKGKLVRTIERKYYKEELKAILEKQIALQPELFTDQLFADCIRELYSKNEAQQRNLAARDFVHLLAEDIIFYQRPLRSQKSTIANCSLESRSYIDKNSHTRKEASLKVCPKSNPYYQEFRVLQWLQNLKIYEIESDREVTHEFIKTLEDKQQLFDFLMAQKEIDCEELLKYFLSLTYPNAKEKALKSELKKWKDTYRWNYVYDIGEKSSKKYPMNETRYDLKRHLEKVANLPDDFLSSEVEYMLWHLIYSVTDKVAYEKGLKKFAQKHHLDEDSFVESFKKFKPYPSEYGSFSEKAIRKLLPLMRFGSYWDFNHIDKNTQKRIEDLITGVENEEIRTILREKAEKYQLEKETDFQNLPLWLAQYIAYNRHAEASSLEKWTSMNDLETYLNEFKQHSLRNPIVEQVVTETLRVVRDIWQQYGQGKADFFDEIHIELGRELKKTAKEREELSKQNQKNEDTNLRIKALLAELGEDSTIENVRPYSLMQQELLKLYEEGVFSSSMEIEDDIEKIHKKATPSKAELQRYKLWLEQKYKSPYTGQIISLKRLFTEDYEIEHIIPQSRYYDDSLSNKVICESAINKLKGNQLGLEFIKNHYGEKVHAAGKEVSIFTEEQYKEFVKNHYTNNSGKMKKLLLEDIPEKMVARQMNDTRYISKYISEILSKIVRANERDEGVNSKNVILCTGKITTALKQDWGINDVWNDLILPRFERMNDLTQTSLFTSYNEKYQKYLPTVPMEYSNGFQKKRIDHRHHAMDAIIIACATREHINYINNQHALEKGKNKEEKQKSRIDLRTILCEKKYNDNAEENYNWIFKKPWDTFTQEVRAALEGIVVSFKQNLRVINKATNYYERWVEENGKLIKKMVKQEGTNWAIRKPLHKETVSGKITLEREKVSKGKILTATRKAIDSTFTEKVIQGITDTGIQKILLNYLKFKKSPEIAFSPEGLEELNKNISLYNDGKPHKPIRKVRIFEQGSKFPLGEVGNKATKYVEAAKGTNLYFGVYQGKDKRSFATIPLNEVIERQKQGLSSVPEYNEKGDPLLFSLSPNDLVYIPIEGEIIEDIDFQNLSNEQKERIYKAASFTRNECFFIKSSIAFLIKNYDAKTKIGELGSQNKLEVTICKGIRIKEVCIKLKVDRLGNISKA

SEQ ID NO: 5761 - protein, 1462 aa, synthetic construct
  REGION 1..1462: note = Synthetic
MKRILGLDLGTNSIGWALINLDFNQKHGEIIGLGSRIIPMDQGVLGNFDAGQSHSQTADRTKFRGVRRLYQRNTLRRERIHRVLNIMGFLPEHYKNDIDFEQHPGQFKPGKETKLNYKRNEKDRYEFLFMESYKEMLSEFRLNGVNENIPFDWTIYFLRKKALYEKISKNELAWIILNFNQKRGYYQLRGEEEVENHNDGKKKTFEILQVKEIIETGDIITSTGAKLYKVIFENDWEYDKSIVKVTEWQGKVKEFIVTTSSLKNGEIKRTYKEVDSEDDWTAIKAKTEKDIEQSGKHIGQYIYEALLKNRNQKIRGKLIKTIERKYYKAELEAILEKQTEFHPELRDKELYKRCINELYPENIGHQKNVQDKDEFFKYLFIEDIIFYQRPLKSKKSTIGNCQYETRYYIDKDTKEKKEAPLKGIPKSHPLFQEFRLWQFLSNLKIYEKEGFEQGKTVLNKDITTKLLPDENAWVALFDFLNELKEVEQHQVLKYFSDKKLIPRQTKEHPELRWNYPEDKKYPMNETKALFLGRLKNVKGIRPNDFLTPDIETHLWHIIYSVKDKNEYMKALGKFADRYGINKESFVEAFIKIPPFSNEYGAYSNKALRKLLPLMRMGKYWDEHKIKSTTLERIHKVLSGEYDPTIRDRVRENFFHFKSIDSFRGLPTWLASYIVYDRHSEVKTISRWKKPSDLDEYLMQFKQHSLKNPIVEQIVMETLRVVRDIWVHFGNGAEGYFDEIHLELGRSMKNPKQIRERISKKNAENETTNQRIKSILEELIHDGIENVKSYSPSHQEILKIYEEGVYSNSPEEYSKIKLEEIDKIRKTVSPSKREIQRYKLWLEQGYVSPYTGEPIALSDLFSKNYQIEHIIPQSRYFDDSLNNKVICESIINPNPYKDNQTGYEFIKNMGGSLVPELSTKQKTVKLFTLDEYEQHCKRYFRKNRKKLTYLLSEEVPEGFIERQLNDSRYISKFVKSLLGNLIRQEDEQEAAPKNLITVSGAITSTLKNDWGLNDKWNELVAPRFQRLNELTETTDYGYWDKKINSFRCQVPESIERGFNKKRIDHRHHALDALVIACCTKDHINYITSLNTERNNYSLVSKLRESEEIYVNGKKRKVAQAFKKPWKDFPIEAKGALDKTVVSFKQNLRVINKTNNKTWKWVEEHGVKKKKLVSQTKGDNWAIRKPLHKDTVSGKIDMDVPKGKVATATRSALTTITNQKHIDKIVDKQIREVILPNHLKNYKDEKGLPDFEAAFSPNGIEELNKNMTALNNGKPHSPIFKVPMYEIGSKFPVSENEKSPKNNKYVEAAKGTNLFFAVYWNDKKKKREYETIPLNVVIEHQKQVAHLPKNERTQVPPNPEKGKLLFTLSPNDLVYVPTDEEIENPGIVDTNKLTPLQIMRVYKTMSSSGRQCFFVRNDIAISIQNKLEFSVLNKMEKDIYGIMIKDRCWKLKVDRLGRIILIQR

SEQ ID NO: 5762 - protein, 1466 aa, synthetic construct
  REGION 1..1466: note = Synthetic
MKNILGLDLGTNSIGWALIDKENNKIIDMGSRIIPMSQDILGEFGKGNSISQTAERTNYRSIRRLRERYLLRRERLHRVLNILEFLPKHYSDQIDFETRLGKFKEDTEPKIAYKSTIDETNSKSRFDFIFKKSFAEMLEDFHQYQPELFANDNKIPYDWTIYFLRKKALTKKIEKEELAWILLNFNQKRGYYQLREELEEDTNKKEYVVSLKVIKIVKGEEDKKNKNRNWYSISLENGWVYNATFSTEPQWLMTEKEFLVTEELDENGQVKIVKDKKSDKEGKEKRRIIPLPSFDEINLMSKSEPDRIYKKIKAKTETAISNSGKTVGEYIYENLLQNPSQKIRGKLIRTIERKFYKEELKQILQKQKEFHPELQNDDLYNDCVRELYKNNEGHQFLLSKRDFIHLLLDDIIFYQRPLKSQKSLISNCTFEFKKYNVGNEEKIKYLKAIPKSHPLYQEFRFWQWIYNLRVYRKDDDQDVTNDYLNDPEKYADLFEFLSNRKEIDQKALLKYFKLKESTHRWNFVEDKKYPCFETRTLISTRLEKVKDLPPNFLTDQTELQLWHIIYSVTDKIEFEKALSTFAKRNKLDVTTFVENFKKFPPFKSEYGSYSGKALKKLLPLMRSGRYWKWDDIDEKTKTRIDKIITGEFDEDIKNKVREKSINLTTENHFQGLQVWLASYIVYDRHAEAATINKWDTIEHLENYIKEFKQHSLRNPIVEQVTLEALRVIKDIWKQFGKSAENFFDEIHIELGREMKNTADERKRLTSQINDNENTNVRIKALLAELKNDSNIENVRPFSPIQQELLKIYEDGVLNSEIEIPDDISKISKTAQPSSSELQRYKLWLEQKYRSPYTGQVIPLAKLFTTDYEIEHIIPQSRYFDDSFNNKVICEAAVNKLKDNQTGLEFIKNHHGEIVQTVFDNKVKIFEENDYRDFVKTHYIKNRSKRNKLLMEEIPDKMIERQINDTRYITKFISALLSNIVRAENNDEGLNSKNLIQVNGKITSLLRQDWGINDIWNDLILPRFLRMNQITNSDAFTRYNDKYQKYLPTVPLELSKNYQSKRIDHRHHALDALIIACATRDHVNLLNNKYAKSKERYDLNRKLRLFEKVVYTHPKTGEKIEREIPKNFIKPWDTFTVDTKNFLDTIVVSFKQNLRIINKATNQYQKWVKLNGRNVKKEVKQSGINWAIRKPLHKETVAGKVELKRIKVPKGKILTATRKNLDTSFDIKTIESITDTGIQKILKNYLSAKGNDPTIAFSPEGIEEMNKNITRYNNGKPHRPIYKARIFELGSKFILGLTGNKKAKYVEAAKGTNLFYAIYVDENNKRSFETIPLNIVIERQKQGLSSVPENDDKGNKLLFYLSPNDLVYVPDEDEIINESYLDVSNLSNEQKKRLYNVNDFSSTCYFTPNRIAKAIAPKEVDLNYDNNKKKLFGSYDTKTASVNGIQIKDICIKLKADRLGNISKANR

SEQ ID NO: 5763 - protein, 1517 aa, synthetic construct
  REGION 1..1517: note = Synthetic
MKKILGLDLGTNSIGWALVNQDTKNNAGNIIDIGSRIIPMSQEILGEFDKGNSISQTAERTGYRGTRRLRERHLLRRERLHRVLNILDFLPKHYANHIDFDRHFGQFIDYAEPKLVYDDKGEFIFKKSFDEMLEDFKIHQPKLLLNKYGKPALIPYDWTIYYLRKKALTKKIEKVELAWLLLSFNQKRGYYQLRGEDDEETPNKLIEFHELKVVKVEDSGDKKKDDVWYNVILENGWIYRRSSKIPLFDWKDKIKEFIVTTDLNDDGTFKTDKEGKVKRSFKAVNSEEDWIAIKKSTEDKIEKSHKTVGSFIYDTLLQNPDQKIKGKLVRTIERKFYKAELTAILEKQINEHSELQNNELYQECLKELYKNNNAHRNSISSKGFAHLFLNDIIFYQRPLKSKKSLISNCRYESRRYKNDEGKFIPVPIKCIAKSHPLFQEFRLWQWMKNLKLFLREDDSDVTSIFLKTEEDWVDLYEWLNNRKEVDQKAFLKYPAFNLKKQAEKYRWNFVEDKSYPCNETHSQIQTRLEKVENVPAYFLTKETEEALWHILYSIEDKIEIEKALKSFALKHNLGDDFIERFKKYPRIEKEYGAYSYKAIKKLLPLMRMGKYWKEENIHPQTRERIENILNGEFDEKIKNRVREKAILLKDIKDFKGLPLWLTGYIVYNRHSEEGEITKWHTANDISLLEQHSLRNPIVEQVINETLQVVRDIWKTYGEGKENFFDEIHIELGREMKNPADKRKQITLKNTENENTNLRIKALLIELLNDSNVENVRPYSPGQQEILKIYEDFVLNSESEIPDDILKISKTSLPSKSELNRYKLWLEQKYRSPYTGAVIPLNRLFTSDYEIEHIIPQSRFFDDSFGNKVICESEVNKLKDNQLGLEFIKNHHGEKVSLNYGKSVEIFSEEGYQDFVMKHYASSTGKMKKLLLEDIPEKMIERQLNDTRYISKVVKNLLSNIVREENEQETTSKNVLSSNGSITSILKQDWGLNDIWNDIITPRFVRLNQITNSSNFGKINPQTNKFLPQVPFELQKGFSKKRIDHRHHAMDAMVIACASRNHINYLNNEYAKADKKDTRYDLKSTLCLKKYNEGSKDNYKWVFKNPWNNFALDAKEILQTTLVSFKQNLRVINKTVNHHQKWVTQKDGSLKKEMVKQTLGDNWAVRKPLHKDTVSGLIQLRFKKTVSLSSALDNVESIVDKELKRKIKELFSQNPDKKKIQKFFKDLDNKWNKKDISKVEVYYWEKDNVASRVKLDDSFNAEKIQSITDTGIQKILFSHLKNHDEVKDGKIIEHPELAFSPDGIDILNKEIVKLNEGKNHQSIIKVRTYEPKGNKFNVGSIGNKKDKYVEAAKGTNLFFAIYVDEKGKRNYESIPLNIVIERQKQGLIAVPDKNEKGDSLLFYLSPNDLVYVPSEEEKERRNLSDFRNLNKEQLKKVYKFIDGSGDLANFIQSHSATVIFNISKKEQEKRGLNYPIQNEFGVGSPQSKNQKSFEGIMIKEFCWKLKVNRIGKITNIMG

SEQ ID NO: 5764 - protein, 1555 aa, synthetic construct
  REGION 1..1555: note = Synthetic
MKKILGLDLGTNSIGWALINQDDENKKNEIIKLGSRIIPMSEDILGKFDSGVTESDTAKRTSFRGVRRLRERHLLRRERLHRVLNILGFLPEHYAKEIDFEKRFGQFKKEAEPKIAYCINEKTKAFEFVFKNSFAEMVEVFKKYQPQLLEDGKKMPYDWTIYYLRKKALTQKIDKGELAWLLLNFNQKRGYYQLRGEDEEDAPNKLVEFHSLLVTDVIDSGDKKSKDEIWYNVHLENGWIYRRTSKIPLEWKGKTKEFIVTTDLNEDGTIKKDKEGKEKRSFRSPSEDDWTLLKKKTEFDIDKSKKTVGSYIYDTLLENPKQKINGKLVRVIERKFYKDELKQILETQVKHHPELQDKNLFAECLEELYEYNEAHRNSIGNKGFEHLFLNDIIFYQRPLKSKKSLISDCKFESRTYLLNGEKKTEPIKCVSKSHPLFQEFRLWQWMKNLRIYEKETDKDVTDEILSTEDNWINLFEWLNDRKEVEQEQLIKFSLLPLKLKPKVLTIEATKYRWNFVEDKKYPCNETRSQIVTRLAKVENVPVNFLTKEIEEALWHILYSVNDKLEIPKALKSFAVKHNLGDDFVEQFKKFPPYKNDYGSYSAKAIKKLLPLMRMGKYWNEENIHPQTKDRIDKILNSEFDETIKNRVREKAININNINDFIGLPLWLSSYIVYDRHSEDGEIKKWKTIKDLENYLNPKLEGSFQQHSLRNPIVEQVITETLRVVKDIWSFYGKGADNFFDEIHIELGREMKNPADKRSAMTKQITENENTNLRIKSLLAELMNDITVENVRPYSPSQQEILRIYEDGALSYESEIPDDILKISKTAQPSKNDLIRYKLWLEQKYRSPYTGEVIPIGKLFTTAYEIEHIIPQSRFFDDSFSNKVICESEVNKLKDKQLGLEFILSHGGEKVSLNYGKSVEVLNEEAYKNLVNEQYSKNYNKKKKLLLEDIPEKMIERQMNDTRYISKMVKNLMSNIVRKEKDDEGTTSVNVLSSNGQITSMLKQDWGLNDIWNELIAPRFERLNTLTNSTNFGTINPKTKKFLPTVPLELSKGFTKKRIDHRHHAMDALVIACANRNHINYLNNQNALATGKSKEQKQETREDLKHLLCDKKYNEESNNSYKWVFKKPWETFTQESKQQLLITIVSFKQNLRVINKTVNKYEHWENKNGSLEKVKVKQSNGDSWAIRKPMHKDTIAGIVNLRFKKTITLSAAIDQWEMLVDKNLKTKIKQLINEGLDKKKIQKFFTSQENKWMNKDVSKVELYYFSNEKENDILVASRVKLDDTFNASKIESITDTGIKKILLNHFNKEKYQNATDEKGKSIAPETLAFSLDGIDELNKNIKELNNGKFHQPIYKVRTYEPKGNKFNIGHTGNKKDKYVVAADGTNLFFTIYKSEKGDRAYDAIPLNIIIENQKQGALQYHKPKFCSTPELNEVGDKLLFFLSPNDLVYLPNSDERENPSLVTLESINSEQAKRVYKFIDGSGTTANFIPYVSATTIFNMNKKEQAKQGLNYPIQNEYGLGSPQSKNQKSNEGVMLKEFCWKLEVNRIGEIIRIIK

SEQ ID NO: 5765 - protein, 788 aa, synthetic construct
  REGION 1..788: note = Synthetic
VRDIWKQVGCIDEIHVELGREMKNPADKRKRITSQIIENENANLRVKALLTEFVNPEFEIENVRPYSLSQQDILRIYEDGVLNSVAEVPGDIAGILKKFNENDAKKRPTTSEILRYKLWLEQKYRSPYTGEMIPLSKLFTSAYEIEHVIPQSRYFDDSFSNKVICEAEVNKLKDNALGYEFIKKHHGEKVELGFGKIVEIFSVSVYEQFVKDNYSRNRGKMKKLLMDEIPEQFIERQLNDSRYISKVVKTLLSNVVREKAEQEAVSKNVIVCTGGVTDRLKKDWGINDVWNKIVLPRFLRLNELTNSTNFTAKNAAGNEIPAMPLELQKGFNKKRIDHRHHAMDAIVIACANRNIVNYLNNESASRKAKISRHDLQAILCDKVRTDDKGNYQWRVKKPWDTFTQDVYVALENIIVSFKQNLRVINKTSNYYWHYENGKKVLVKQVKGDSWAIRKTMHKDTVFGEVNLRKVKSVSLNEALKNPQFIVEKDLKRQLLSLLQQNFDIKKIKKYFEEHKDIWSDISLSKMNIYYFTKETKDRYFATRKPLDASFDKKKIESCITDTGIQQILLRHLELKENDPERAFSPDGIDEMNRNIIQLNKGKGHHPIAKVRVYEKADKFEVGQRGNKSSKFVEAAKGTNLFFAVYETEYPDEKTNSIVRKRNYATIPLNIAIERQKRGLSTAPEDEKGNVPSFVLSPNDLVYLPTSEDIVNGHITQPIDKSRIYKMVSSSGSQCFFIKHNIANIIVDKYEFSPLNKMERAISNEMIKEICIPVKVDRLGNIVKLGKSE

SEQ ID NO: 5766 - protein, 925 aa, synthetic construct
  REGION 1..925: note = Synthetic
LPEIEFVEAFLSTAAFKKDYGAYSRKAIKRLLPLLRRGKYWSAENIDTATKTRIENIIDGVADDSINERTREKLTAFSDITQFQGLPVWLASYVAFNRHSESDQQTKWDSPDDIDTFLRNFRQHSLRNPIVEQVVTETLRTVRDIWRKYGQIDEIHIEMGRDIKQTAEERKRRSAIIQKNENTNIRIKMLLSEFFNEGNDVENVRPMSPIQQDKLRIYEEGVLNSVDGIQDNIETILKKFNESDPKKQPTKAEIRTYRQWLEQNYVSPYTGQPIPLSKLFSSEYQIEHIIPRSLYFDDSFSNKIICESAVNGRKSSMLAYNFIKECGGEIVQLGNGKSVRILKVEEYEQLVKRVFASNRKKQQNLLATDIPDDFSQRQLTDTRYISRFLLALLSNIVREKDEKGQYESTSTSKNVIPCNGSITDRLKKDWGVGDVWNRIIAPRFERLNGIYGDNRFGDWTNVDGKKFFRTQIPLELQRSVNKKRIDHRHHAMDAIVIACTSRQMVNYLNNSNAHDHDKRINLRNAVCSKAKTDTDGNYRYLVKKPWPTFTEDMAYTLSQMLVSIKQNLRIVNRCSNRYQRYENGKKVTVRQTKGEMLAIRKPLHKDSVFGQVNLRSVKTVSLNVALENPSRIVDKQLKTLVRQLAAQQMSVKQIADYVKKQTDFDVKKVDVYIFSNETNTPLVAIRKPVDTSLTQEKILKSVTDTGIQKILLRHLEANDNKPEFAFSPEGVEEMNKNIVQLNNGRFHQPIYKVRIYEPKGLKFNIGTTGTKATKFVEAAKGTNLFFAVYLDSDGKRNYESVPLNIVVERLKQGMSPVPETNENGDRLLFHLSPNDFVYVPTEEELESGRVNMPIDNSRIYKMVSASGSQCFFVPYFIASPIVPTTELGANNKSERSWDNIMIKSVCIPITIDRLGQLSNASTLIR

SEQ ID NO: 5767 - protein, 950 aa, synthetic construct
  REGION 1..950: note = Synthetic
MKKIVGLDLGTNSIGWALINAYIDEYNKEHLYGIEACGSRIIPMDAAILGNFDKGNSISQTADRTSYRGIRRLRERHLLRRERLHRILDLLGFLPKHYSDSLNRYGKFLNDIECKLPWVKDETGSYKFIFQESFKEMLANFTEHHPILIANNKKVPYDWTIYYLRKKALTQKISKEELAWILLNFNQKRGYYQLRGEEEETPNKLVEYYSLKVEKVEDSGERKGKDTWYNVHLENGMIYRRTSNIPLDWEGKTKEFIVTTDLEADGSPKKDKEGNIKRSFRAPKDDDWTLIKKKTEADIDKIKMTVGAYIYDTLLQKPDQKIRGKLVRTIERKYYKNELYQILKTQSEFHEELRDKQLYIACLNELYPNNEPRRNSISTRDFCHLFIEDIIFYQRPLKSKKSLIDNCPYEENRYIDKESGEIKHASIKCIAKSHPLYQEFRLWQFIVNLRIYRKETDVDVTQELLPTEADYVTLFEWLNEKKEIDQKAFFKYPPFGFKKTTSNYRWNYVEDKPYPCNETHAQIIARLGKAHIPKAFLSKEKEETLWHILYSIEDKQEIEKALHSFANKNNLSEEFIEQFKNFPPFKKEYGSYSAKAIKKLLPLMRMGKYWSIENIDNGTRIRINKIIDGEYDENIRERVRQKAINLTDITHFRALPLWLACYLVYDRHSEVKDIVKWKIPKDIDLYLKSFKQHSLRNPIVEQVITETLRTVRDIWQQVGHIDEIHIELGREMKNPADKRARMSQQMIKNENTNLRIKALLTEFLNPEFGIENVRPYSPSQQDLLRIYEEGVLNSILELPEDIGIILGKFNQTDTLKRPTRSEILRYKLWLEQKYRSPYTGEMIPLSKLFTPAYEIEHIIPQSRYFDDSLSNKVICESEINKLKDRSLGYEFIKNHHGEKVELAFDKPVEVLSVEAYEKLVHESYSHNRSKMKKLLMEDIPDQFIERQPLY

SEQ ID NO: 5768 - protein, 1190 aa, synthetic construct
  REGION 1..1190: note = Synthetic
LDKDGNVSRSFRAPKEDDWGLVKKRTESVLEKSGLHVGEFIYESLLENPEQKIRGSLIKTIERKYYKKELEAILDKQTSFHRELRNDALYKEATLELYPKNSAHRSNIKQRGFKYLFIEDIIFYQRPLKSQKHLIAHCQYEKRTYKNNGGETIEVSLQGAPKSHPSFQEFRIWQFISNLRFYDKEEIVEGQEVSITEKLLKSDSDFAELYHWLSHQREVDQNKTLKYFTQKKLIPKQKKDNPTIRWNFPEDKKYEMGEFKAQLLSRLEKVRNCQPDKFLTQKNELDLWHIIYSVTDKTEFEKALVTFAEKRELDSESFVENFKKFPPFKNDYASYSLKAIKKILPLMRRGKYWKAENLGPQTLQRIEKIVNGEADDKISIRARKLALHLNDTKSFQGLPTSLACYVAYNRHSENEENQKWQTPSDIDKYLKDFKQHSLRNPIVEQLITEALRVVRDIWKHYGQGQKDFFDEIHVELGREMKNPAIKRKKLSQKIQENENTNYRIKEVLRNLKENNIDAKPYSPSHQEILKIYEEGVYQSIENVEDEIEKIRKNNTPSSKDINRYRLWLEQGYISPYTGEVIPLSQLFSNQYEIEHIIPRSRFFDDSLANKVICESSVNALKDNKTALEFITNHGNEKVEFAGKTVEILSSDKYTEHCKRYFKRNRTKLKNLLSYDVPEGFINRQLNDSRFISKYVRNLLSNIVREEEEREAISKHILTIPGSITSQLKQDWGLNEKWNEVVTHRFERLNNLTGTTDFGFWDNKINAFRITVPKELSKGFNKKRIDHRHHTLDALVIAACTKDHVNYITSLNTERNNHSLVSKLRNTKKVLINGKERRIAKAYKLPWSSFPLDAKHQLETTVISFKQNLRVINKSSNKTWQWRNVNGEQKKKLIPQTKGDSWAIRKSMHKATVSAKVESVGKGKIKTTNRTPLGEIKGEKHVEKIYDARIREVIIPNHLNKYLDEKGKPNYEAAFSQSGIKQLNENIEVLNEGKPHAPIYKVPLFEVGSKFPVSEDAKSPKNQKYVEADKGTNLFFAVYWNEEKQKRNFETVPLHQVIVHQKQVASLPTEQRTSVPIKPELGLFLFSLSPNDLVYVPTEEEIENPHLVDLKNLSKDQTNRIYKMVSSTGNECHFIPHHISRLIMKYNAKQKVGEFGSLNKAEKAITGETIKEKCLKIQINSLGKLKTERIA

SEQ ID NO: 5769 - protein, 1534 aa, synthetic construct
  REGION 1..1534: note = Synthetic
MKNILGLDLGTNSIGWAMIEGKVEEGQNSLTPVQIKGAGSRIIPMTQDVLTNFAKGKATSQTKDRTKFRGTRRLRERQLLRRDRLHRILDLMGYLPAHYAEQIDRYGHILDEKEPKLAWFQDETKAWCFLFQDSFNEMLADFAKNQPNLVAGGKKIPYDWTIYYLRKKALTQPISNFELAWLLLHFNQKRGYYQLRGKDDMPEESENKKVEYLVAEVVHVEEDKNESSKKDEIWYNVHLDNGMIYPRKSKQPLDSWVGKKKEFIVTTTIQKDGTSKPSFSAPKEDDWGLMKIRTEKNIDASKKTVGAYIYDTLLDNPDQKIIGKLVKVVERKYYKDELKQILEKQREFHKELLDKKLCEQCYENLYSHNPDHRKSMLALSEKRGEGYFTTLFIDDILFYQRPLKSKKSLISDCQYEYHTYRKDGKEVRAYQKCIAKSHPLFQEFRLLQFLKNLRIIRREDWEYGTPEGELFPRNQYRTDIDITNEVLNTEEKWEQLYNYLNQKKEIKMKDLLSWPVLKLGKNPEKLYRWNYVEDKTYPGNETHAQIISYLVKAGIASNALTEEDEYLLWEILYSVNAKDELEKALESFAKKHGFDGTFVDVFKKSPAFPSEYGSYSAKAIKKLLPLMRFGNKWNEDNICTSTKERIEKLITGEFDEKLSDKIREKIGNELGNSHKDIKDFKFMPLWLACYIVYGRHSEAQDVNKWESPEDIDLFLKQFKQYSLRNPIVEQVVLETLRTVRDIWRYYGSIDEIHLEMGRDLKNPADKRKAMTERNIKNEQDNYRIKALLTVLANELNYENARDFSPSQQEILRIFEETAIESYKATEGKGDLPEHIKLIIEKFKVIDEKKRPTTSDVKRYALWLEQKYQSPYTGQPIQLSRLFTSDYEIEHVIPQSRYFDDSFSNKVICEAAVNKLKSNMLGLEFIKKFHGQKVEIGNGKFVTILSEDDYKKLVDEKYKSPNLKTKRNKLLMDDIPDGFIERQMNDSRYISKLVKGLLSNIVRTTDSEGNLEPEAVSKNLITTNGAITDMLKRAWGVNDVWNKIILPRFQRMNKIDPEHTYTAISAQGHEIPSMPAVYQYGFNKKRIDHRHHAMDAIVIACANRDIVNYLNNDSARDGGKRRYDLMHKLCNKKKDSDGYERMPRLPWSGFCDDVYNTLEGIIVSFKQNLRVLNKATNKFVHYNEEGKKIVDCQKGVNWAVRKSMHKDTVFGLVSLRKEKTVKLKEALSRLDRVTDKDLRDKLKELVAKHFTENQIKVHFEEHNDVWKDVDTKKIPIYYYTEEEGNEHYYATRGMKDLVSDFDKVKTLDEAKKKIENITDIGIQKILWNHIARCENNVEYAFSPEGIDDMNSHIVELNDGKPHKPIYKVRKYVKGEYKFAIGKRGNKKAKYVESDKGTNLFFAIYKGQEADDFNFVTIPFNEVLRRQQQHLSISDETDENGRNLQCILSPNDLVLLKDNSTNTKRIFKVVSVANYQCHFIPNNVSCPIVENVEYTPKNKFEKDDVSGLMIKAHCVPIKVDRLGHIVSIDNKPVDHD

SEQ ID NO: 5770 - protein, 1526 aa, synthetic construct
  REGION 1..1526: note = Synthetic
MFSQRNNPYCELLKSEAKVMIISRINNFFNKKVNMKKILGLDLGTNSIGWAVVNGDVDNEGRIQLNKIESAGSRIIPMDAGILGDFDKGNSVSQTKERTGYRGTRRLRERYLLRRERLHRVLDVMGFLPKHYAEQLTRYGKFLNGTEPKLAWFKDDNGKQQFLFSQSFNEMLKEFYAVHPELVEENKKIPYDWTIYYLRKKALNAPLKKEELAWLLLNFNQKRGYYQLRGEEDEQTHNKQEEYMVLKVIRVEATEDKRGKDIWYNVYLENGMVYRRSSKTSIDDWVGKTKEFIVTTLLDDKGQPKVDKEGQVRRSFRAPQEDDWGLLKKKTEADIERSGKTVGCYIYDSLLANPAQKIKGKLVRVVERKFYKQELKAILEAQKQFVPELRDKDLYIKCVEELYPSNDTYRNNISQRDFVYLLMDDILLYQRPLKSKKSLISDCQFEDRVYKDKETGEIKHIGIKCVSRSHPRFQEFRLWQFISNLRIYERSKIVDGKLKVDVDVTETLLKDEIDYERLFEFLSSVKAIKQDTLFSKFFKMKKQNGAFAYRWNYVEDKEYPCNETHEMIVSHIKKAGIDESFLTIEKEEILWHILYSVSFKQQLRTALGTFAEKNGLDKDAFTEQFIKTPPFKSEYAAYSLKAINKLLPLMRMGKYWSADNIDAKTKERINHIIDGECDDDIKNIVREKSINLLSVDHFKGLPLWLACYVVYNRHSETADTARWKRPEDIDNYLRHFRQHSLNNPIVEQVVMETLRTVRDIWKKEGHIDEIHIEMGRNMKLPKEKRAQMTQRIIENENTNIRIKYLLQEFANPDMGISGVRPYSPAQQELLHIYEESALDSVKDKEPDIVELINKLSKIENKPSHNDGLRYKLWLDQKYRSPYTGEAISLARLFTSEYEIEHVIPQSRYFDNSYANKVICESEVNKLKSNLLGYEFIMQHHGEKVELSSGRTVTIFEPQEYERFVKDNYSSNPHKLKILIMDDIPDGFINRQLNDSRYISKLVKGLLSKIVREEGEEEATSKNVIVCTGGVTDRLKKDWAVNDIWNRIILPRFERLNQMCGKELYTKLNTSGHLIPDIPLEMQRGFNKKRIDHRHHAMDAIVIACATRNIVNLLNNESAKHDSKTTRYDLQHTVCHKQSTDANGNYQWVVNMPWTTFPSDVMETLQQIIVSFKQNLRVINKTTNKIQKTVNGKHVLVLQTKGDNWAIRKPLHKETVFGEVNLRKIKEVGLKDAISSPNAIVDCDLKKKIKAMVELGYDLKKIKAYFDDNKDMWTDINPKKIPVYYFTKETNDRYFATRKPIDQSFDRKKIENSITDTGIQKIMLRHLENNDSNPEIAFSPEGIVEMNKNIRTLNDGKWHQPILKVRVYEQANKFAVGTSGNKYKKFVEAAKGTNLFFAVYEDENGKRSYTSIPLNVVINRMKAGRPIADEDGVIPTFVLSPGDLVYLPNEGKQVSIESIDKNRIYKMVSCSDYQCYFIGNTIASPIVNKYEFSPLNKAERAITGEMIKEKCIPIKIDRLGQIIKIGY

SEQ ID NO: 5771 - protein, 1520 aa, synthetic construct
  REGION 1..1520: note = Synthetic
MKKVLGLDLGTNSIGWALINEGSNDEKSSIEGLGSRIIPMSQDVMGNFDKGNSISQTAERTRLRGVRRLRERQLLRRERLHRVLNIIGYLPKHYSKSIDFEKHFGQFRPDEEPKLAYKYNDITQMNEFIFHTSFSEMLEDFKLHQPNLLSDGKKIPYDWTIYYLRKKALTKKIDKEEFAWLLLHFNQKRGYYQLRGEDEDDKQTKKEEYYSLKVVDVTAENGSKVKRDEIWYSILLENGWIYRRTSKTPLDWVGKVKDFIVTTDYDENGEVKKDKEGKEKRSFRAPLEEDWTLVKKKTEADLSKSNKSVGSYIYDTLLQNPNQKIRGQLVRTIERKFYKEELRAILTKQKEFHIELRDNTLYTECIASLYSNNDAHRNNVSNRDFTYLFLDDIIFYQRPLKSKKSLISNCPYETRTFLRNGEKQIEALKCIAKSNPLFQEFRLWQFLKNLKIYAREKLVDGRLCTDVNVTDEFLKTDEDWTNLFEWLNDRKEIKQDTLLSSYFKIKKAKGEDKLPFRWNYVEDKEYPCNETHAQIISRLNKCSIASNDILSFEKEMELWHILYSVEDKIEVEKALKTFATKNNLTGEFYDQFKSFPPFKKEYGAYSEKAIKKLLPLMRRGKYWNEDNIHPQTIERINKIINGEYDEKIKTRIHLELESYNNINNFVNLPLWLVCYIVYDRHAESGDVQKWHTPTDIERFLKEDFKQHSLRNPIVEKVIAETLRVVKDIWIQYGNGDRNFFKEIHIELGREMKNPADKRKQMTQQISDNENTNLRIKSLLIEMLNDNEVENVRPYSPSQQEILKLYEEGILNSEIEIPDDILKISKQNQPSKSELVRYKLWLDQKYRSPYTNEVIPLSKLFTSAYEIEHIIPKARYFDDSFSNKVICEAEVNTDKGSYTAFEYIKANGGKIIDLNFGKKVKLLRLESYEDYVKNNFSKNRSKMKKLLMEDIPDDFINRQLNDSRYISKVVKALLSNIVREEGEEEATSKNVLSTNGSITTTLKQDWGLNDVWNTIVTPRFVRLNQLSNSTNFGEWINKGGNRVFQTNMPLELQKGFNKKRIDHRHHAMDALAIACATRNHINYLNNESAKASKNETRHELKNLLCFKQKTDDKGNYKWIFKKPWETFTQDSKTSLEKIIVSFQQNLRVINRTRNTYQKWGLEADGTKKKRNENQKEKINWAIRKPIHKDTVGGLVNLRFKQTVSLSLAIDKKEFIVNKELKAQIKELLAQGNDKKKIVEYFKKQDYKLNAIDISKPEIYYFDNENIASRVKIDDSFDEKKIKSITDHGIQKILLNHLNSDKYQNQKDESGKVIVPSTLAFSADGIDELNKNITTLNNGRFHQPIYKVRTFEPKGNKFAVGVTGNKKDKYVETAKGTNLYFAVYVDEEGKRIYESIPLNIVIERQKQETSPVPEINEKGARLLFYLSPNDLVYVPSIDEIDNPSLVNWNDLTELQNLKIYKMVSSSGTQVFFNQAIVASPIVNKVEFSALNKMEKSVDGIMIKDVCWKLSVDRLGFIRKIAK

SEQ ID NO: 5772 - protein, 1878 aa, synthetic construct
  REGION 1..1878: note = Synthetic
MIIRKVAVGNSEEAFIEDTLSEGLNILLSDDNDKGKTIIIQSMLYALGNKPIFPNSFNYKDFVYYLEFEHNSEIYIIVRSGDEYVLKYSDKLGIFEGMSELKRFWNNNIFQLPMIPFQGEKRIVDMELFVQLFFVGQDSKDTSTIFNSGFYHKDDFRNMLLSYSGDFSSEITPKEIIKIKDKIRKLKARRKEQLNLSDFYKTVAVAPEYLSKIKDRDAFNKRVDEMDSITDLITEIKKKRNRLAAEKSLWNGTLKELNSLNRNIKVGELRCMDCDSNHIAYKGTSKSKYSFDISTPLMRKQIIESINEKISDFTEEIKKFDFEIQKQQEELNSLMDNEDITIENIVAYKMGYKSVADIEQTIDDIDKELEQYECTLKVGKSFSDEAKEEREKFYGRFMSLMNEKKKQIDIESEKEYEDIFTKRGTVVSGSEETVFYVSKLLASVEMTDHDCPIIMDSFRAEDLSTDKEKRVLELFGELRNQCILTTTLKTEEIGKYEFLFQNSFNEMLADFAKKQPELVAMGRKVPYDWTIYYLRKKALSEKITKEELAWILLNFNQKRGYYQLRGEEEEEKKNRLEDFYALKVVEVEQTDDKKGKDIWYNVHLENGWIYRRSSNVPLDWKDKIKEFIVTTELNEDGTPKVDKDGCVKRSFRMPKEDDWKLLKKKTEADIERSHKTIGCYIYDTLLQSPQQKIKGKLVRTIERKFYKDELKLILDKQQAFHPELQDRELYKACLDVLYPMNVAHKNNVANRGFVYLFMEDILFYQRPLKSKKSLIDNCPYEENQYIDVTTGEIKKAPIKCIAKSHPLYQEFRLWQFIANIRIYQKEKKVDGKLLTDIDVTTEYLSSKDDYVALYEWLCVRKEIEQKTFLKYPAFGLKKEIENYRWNYVEGKSYPCNETRSLILHYLEKAGISSTFLSTKIEESLWHILYSVEDRIELETALRTFASKYQLSCNFVEVFKKFPPFKKEYGAYSAKAIKRLLPLMRMGKYWKVDAIDGNTAERIEKILSGECDEKILNKVREKTIHLSETSDFQGLPLWLACYVVYNRHSEGKEVAKWKSPEDIDIYLKSFKQHSLRNPIVEQVITETLRVVRDIWKRVEQIDEIHVELGREMKNPSEKRRQMTERMLENENANIRIKALLTEFMNPEYEMENVRPYSPSQQEILRIYEDTVLNGAGDIPEDIEIILKKFKENDIKKRPGKSDFLRYKLWLEQQYRSPYTGEIIPLGKLFTTAYEIEHVIPQSRYFDDSFSNKVICESEVNKLKDNMLGYEFIKKHAGEIVELGFGKSVKIFSVEAYERFVGENYYKAGSKKSKLLMDDIPEKFIERQLNDSRYISRVVKGLLSNVVREEDANGEYESEAISKNVIVCSGSVTDRLKKDWGVNDVWNNIVYSRFERLNRLTESQQFGHWENREGKRFFQTELPLEYQKGFSKKRIDHRHHAMDAIIIACATRNHVNYLSNESASKHARIARYDLQRMLCDKSKADGGGNYKWIIQKPWATFTQDVYRTLLDIIVSFKQNLRVINKMTNYYQAYDDAGKKVFKKQKKGDSWAIRKSMHKDTVFGQVNLRKIKEVRLSVALESPEKIVDKKIKEKVLQLFAYQYDKKKIEKYFKENASLWKEVNLAKIPVYYFTDESSELLVAVRKNLDTGFTEKKIRESVTDTGIQKILLNHLSNKGDKPELAFSPDGIDEMNRSLVILNGGKPHQPIYKVRVCEPLGNKFKVGTNGNKAAKYVEAAKGTNLFFAIYETDAGKRTYETIPLNVVIEREKMGWLPVPEKNNKGEKLLFWLSPNDLVYLPTEEELMSRILSDKLDRSRIYKIVSFTGNRLYAIPYNVSNMIWDKNEYTQLNKVESTDMKESIKEICMPINVDRLGHITEIIIK

SEQ ID NO: 5773 - protein, 1521 aa, synthetic construct
  REGION 1..1521: note = Synthetic
MNKILGLDLGTNSIGWAVVQKDEQGSYEKIINAGSRIIPMDAETMKNFNNGITQTQTSERTRLRGVRRLLERSLLRRERIHRLLNTMNYLPPHYAEKIDFVNRLGKFIGEEEPKYAYMVDEDGKFQFIFKESFNEMLKDFQDKQPELVLNNKKVPYDWTIYYLRKKALDRAISKEELGWIILQFNNKRGYYQLRGEEDETLKEGKKEEYFALKVIRVEADSSSAGKKGEVWYNVLLENGWIYRRTSKIPLDWEGKTKEFIVTTDVDENGNALKDKEGKEKRKFRAPAENDWTLLKKKTESDLVKSGKTVGTYIYDTLLSSPDQKIKGGLIRTIERKFYKSELIAILNKQKEFHPELKDKTLYNKCVEELYRSNESRRLSLSNYDFTRFITEDVIFYQRPLKSKKSLIENCSFERRYYLDPITKELAYAPIKCIAKSHPLFQEFRLWQFIKNLRIIEREKIVGDKLMFDQDVTTEFLPTQNDYVILFDWLNEHKEIDQKALLKYQAFDLKKNIDKYRWNYVENKSYPCNETRALLKTKLNKAGNISSEFLDNDTLESLWHILYSVEDKLEIEKALTSFATKKELSEEQTVAFVEQFINIPPFKKEYGSYSAKAIKKLLQLMRMGSRWSENEIAESTKGRIQKLIDGECDESIKTRTRDKALKLNEINDFQGLPLWLASYIVYDRHSESGDVMKWETPEYIDYYLKHVFKQHGLRNPIVEVVVVETLKVVKDLWKTYGSFSEIHIELGREMKNPADKRIRMTNQNVENENTNLRIKALLAELANQKDIEGVRPYSPSQHEILKIYEEGVLNMLTKEDPDYDTISKISKMALPSSSDLVRYKCWLEQKYRSPYTGQVIPLARLFTSEYEIEHIIPQSRYFDDSFSNKVICESAVNKDKDNLLAYEYIKQNEGKIIEIGLGKKVKLFTADSYTEFVQSHYVGSVAKKKKLLMDTIPDSFIERQLNDSRYISREIKKLLSSVVREKDEDEAISKNVIVCTGAITDKLKRDWGLNDIWNTIIYPRFERLNQLTNSDKFGQWENKQGKRVFQIEMPLELQKGFNKKRIDHRHHAMDAIIIACATRSHVNYLNNESAHSKSKEKRYDLRRKLRHIEILEKQELKDGVTFTKKIEVAKEFYKPWPTFTQDTLGVLQSIVVSFKQNLRVVNKATNRYECFVNGKKEIVKQSKGESWAIRKPMHKDTVSSAVSLRKIKSVRLNNALEDWKNIVDKPLRKEIGLLYSKYGEKGSKYIIKYFKDRDNKHNGLDVSKVNVYYFDNDCAASRVTLDDTFNSAKIESITDTGIQKILLKHLSAYNEIKENKIIEHPELAFSADGLDILNANIRELNNGKFHKPIKKVRTYETLGNKFAVGQKGNKKMKFVEAAKGTNLFFAVYSSEDGARSYQTIPLNEVAERQKQGLIPVPEKNDKDDHLLFWLSPGDLVYVPSIEEEGRIVEVENNLNYIFNIYKIVSFTGNRLYAIQAFIATSIVDKMEYSLLNKVEFTINENRSIKQYCIKIKIDRLGNILNI

SEQ ID NO: 5774 - protein, 1514 aa, synthetic construct
  REGION 1..1514: note = Synthetic
MDKKNIIGLDLGTNSIGWSVIRAIKNEDNEDHEFCASEIVNAGSRVIPLDAAIQGDFARGNSISQTADRTRYRGVRRLHERSLLRRERLHRVLGILGFLPKHYQESLTRYGKFKENTECKLPWTTDESGKQQFIFRQSYEEMLQLFWQEHPDLMEQGLRVPYDWTIYYLRKKALTEAISGQELAWILLNFNQKRGYYQTRGEEDNEDKSKKEEYCALTVTDIIDTQQKKGKDTWYDIILENGMVYHRPAHEMPDWIGKTKEFIITTQLNEDGTEKTDKDGNVKRSCSMPEKKNWGLIKIRTQEDIKKSNLSVGNYIFNALLANPKQKIKGKLVRTIERDFYKEELCAILKHQIQFIPELQSKELYAQCIKELYPQNEAYRTSISRHDFVYLFINDIIFYQRPLKTKKTLISECPYEYHNYIDEEGNKCKKYIKCIHKSHPLFNEFRLWQFIGNLKIYEQQKDENGRIIDDKDITESFLPDEESRVSLFDYLNDIPGITQKELLTKYFKIKKPKGKNAELPYRWNYVQDKQYPCNTTRGEILSRLKKADIDSSFLDRDAEEKLWHILYSVSDSKELEKALEKYARSHGLDSSFVEVMKKFPPFEAEYGAYSTKAIKRLLPLMRMGSRWNDCDIDKDTLTRIHKIIDGEVDESITEQVRDKASSLNSVNDFRGLPLWMACYVVYNRHSEATNADKWESPDDIDRYLHTFKQHSLHNPIVEQVLTETLRTVRDIWRKYGHIDEIHLEMAREMKNPADKRRQMTMRALENENANLRVKALLAEFINPEFGIDNVRPFSPSQQELLRIYEDTALNSVDELDDDISDILKKFAQQETNKRPTRSEITRYKLWLEQHYISPYTGQTIPLARLFTSDYEIEHVIPQSRYFDDSLSNKVICEAEVNKLKDNSLGFEFIKKHHGEKVTLRGGKTVKILEMDSYCQNVEKIYKNNKGKMKKLMMEDIPEDFIERQLNDSRYISKLIKGLLSNIVREKDEQEATSKNLIVCNGNITDRLKREWGINDIWNHIILPRFERMNEITGSDQFTSVSASGHKIPDMPLHLQKGFNKKRIDHRHHAMDAIVIACTTRDHVSLLNNEAASPKSNQNRYQLSRKLRRYEDVLVNRNGENKTISVAKEFKKPWTSFTQDVEKALNGIIVSIKKNTRVITKTSNYSQRYVEGKKKYVCQTQGDGWAVRKPMHKETVSGEVNLRMIKTANLKEALKNPNRIVNKDLKEKLKKFITLGHSEKQIKAYFADNKEIWSDIDLKKIKMYYFTKETSDRYFATRKPIDTSFDKKKIEGQVTDTGIQKIMLRHLEHHNNNPETAFSPDGIDEMNRNMRLLNNGQFHQPIFKVRVYEKAEKFAVGQTGNKNTKFVEAAKGTNLFFAVYQEAYINKETGEEEYKRSFRTIPLNEAIEKMKAKLPLDDKALFILSPNDLVYIPTENELSTGIISQPLDPNRIYKMVSSSGSDCHFIQHRVAQTIVNKVEFSPLNKMERAISGETVKKICIPISVNRLGEIIKIGV

SEQ ID NO: 5775 - protein, 1489 aa, synthetic construct
  REGION 1..1489: note = Synthetic
MKNILGLDLGTNSIGWAVISHDGMCYSGIKCAGSRIIPMDAATMGDFDKGVTKSSASERTQQRGIRRLNERSLLRRERLHRVLDIMGFLPEHYSRNLTRYGKFISEKVKLAWTDEGRFLFDASFNEMLHEFRSQHPSLMESGKKIPYDWTVYYLRKKALSYPINKFELAWILLNFNQKRGYYQLRGEEDDEKASNKWEEYMSLKVLRVEDSGEKTGKYTWYRVHLDNGMIYNRKSNIPLDWEGKTRDFIVTTELNNDGTPKTDKEGNFKRSFRSPSENDWTLIKKKTEADIEKSQKTVGTYIYESLLQNPTQKIRGKLVRVVERKFYRSELKLILEKQCRFLPELQDAALLQACLEELYPHNRMHRDIISNKGFTSLFIDDIIFYQRPLKSKKSLIGNCPYEWHSYVDKTTGKTKTVYNKCIAKSHPLYQEFRLWQFLSNLRIYSKGTYEQDVTTRLLPDQESYAALFSWLNDRTSIKQKDFLNYSGFKLTKTEQKNYRWNYVEDKTYPCNETRGEILKRILDCNLPEIFLTKERELSLWHILYSVEDKEQYKKALEKFAEKNSIDSADFVAAFEKMAAFKKEYGSYSAKAVSKLLPLMRRGSSWSETEIDKNTLERINKLIDGEYDEQLCEQAYEGVAGLSDVSQFQGLPVWLACYIVYNRHSEATDVSRWESPDDIDKYLSDFRQHSLRNPIVEQVVLECLRTVRDIWRQVGHIDEIHVELGREMKNPADKRKKMTESILENEKANLRAKAMLMELMNPEMKVEGVRPHSPGQQELFRIYEENVLNSEKVPDDITEILAKFNQTDNAKRPTSSEVNRYRLWLDQKYRSPYTGEMISLSKLFTSAYEIEHIIPQSRYFDDSFSNKVICESEVNKLKSNLLGHEFIKKHQGEKVQLSMGKTVEILSVEAYEKFVNEHYSYNRVKKEKLLMDDIPEKFIERQMNDSRYISKLVKALLSNIVREEGEKDATSKNVISCTGGITDRLKKDWGINDVWNGIILPRFIRMNEIDKTNSYTAINTSGNIIPDMPFEYQRGFSKKRIDHRHHAMDAIVIACASRNVVNYLNNSSAAKESEAGRMDLRNKLCNKNYTDDKGNYKWIIRKPWETFTQDVKETLQDIVVSFKQNLRIINKSSNRTLHFEEGKKKLQKQTKGDNWAIRKPMHKDTVYGEVNLQRTKEVSFKEALKPDYAIVNRDLRKKVLSLQASGYDVKQMMKYFESEKDVWQDVDFKKIKVRYFTKTTNDRYFATRKPIDSSFNKKKIEESITDTGIQKIMLRHLENMGGNPELAFSSDGLDEMNKNIRALNNGRFHQPVYKVRIYEKADKYAIGEKGQKAKKFVEAAKGTNLFFAIYENETVDKSTGEILRKRSFTTIPMNIVMNRLKQGLSPVPANDCGKDAKYVLSPNDLVYVPTKAELEHGVDMASLDKDRIYKMVSADRSNSHFVKESVASPIVNKVEFGSHNKMQCAVTGEMIKEICIPLKVDRLGNIIKMG

SEQ ID NO: 5776 - protein, 1421 aa, synthetic construct
  REGION 1..1421: note = Synthetic
MTKHILGLDLGTNSIGWALVQQDFENKKGEILGMGSRIIPMSQDILGDFGKGNSVSQTAERTKYRSIRRLRERFLLRRERLHRVLNVLGFLPEHYASKIDFEKRFGKFQEEAEPKIAWKNIDGQFSFLFQNSFKEMLEDFEATGQNLKITYDWTIYYLRKKALSQKIEKEELAWILLNFNQKRGYYQLREEEDEDNPNKLVEFYSLKVVNVLADEPQKGKSDIWYSLVLENGWTYRRSSKTPLFDWKDKIRDFIVSTDLNHDGSVKKDKDGNEKRSFRAPSETDWTLLKKKTEQEIDNSNKTVGAFIYDSLLKNPKQKIKGKLIRTIERKFYKDELKQILEKQKEFHPELQNEDFYNDCIRELYRNNEAHQLTLIKKDFVHLFLEDIIFYQRPLRSQKSSISNCSLEFRKYKDENRVEQTQYLKAVPKSNPYYQEFRIWQWMYNLNIYRKDDETNVTKEFLNSVEDFENLFDFLNKIKEVDQKALLKHFKLNEKTYRWNFVEDKKYPCNETKTLIINKLEKVENISDDFLTREIEQKIWHLIYSINDKIEYEKALKSFAKKHGLDEISFFEAFKKFPPFKSEYGSFSEKAIKKLLPLMRLGKFWSYTNIEENSRTRLEKILDGEYDENIKDKVREKAINLTTQNDFQGLQLWLAQYIVYGRHSEASIIGKWNSADDLEEFLREFKQHSLRNPIVEQVITETLRVVKDIWLKYGNGVKDFFNEIHIELGREMKLPAEDRKKITNQITENENTNLRIKALLAEMVNDQSIENVRPFSPMQQEILKIYEEGVLNSDLEIEEDIIKISKTAQPSSSDLKRYKLWLEQKYKSPYTGQIIPLNKLFTPEYEIEHIIPQSRYFDNSFSNKVICESAINKLKDNYIGLEFIKKLGGTVVECGNGKSVKVLKLDEYEEFVKKNYANNRGKKNKLLLEDIPEKMIERQLNDTRYISKYISGILSNIVRVEDGSDEGVNSKNIVPGNGKITTQLKQDWGLNDVWNDLILPRFERMNQLTNSTDFTAWNENHQKFLPTVPIEFSKGFSKKRIDHRHHALDALVIACATKDHVNLLNNQSAKSDTKRYDLKKKLMKFEKVCYNHPQTGEKIEREVPKQFLKPWENFTIDAKNSLEKIIVSFKQNLRVINKATNYYERFVEKDGVKVKERVKQEGINWAIRKSMHKDTVSGKVNLPWIKVPKGKILTATRKSLDTSFDLKAINSITDTGIQKILKNYLDFKGSPELAFSPEGIEDLNKNIEKYNDGKSHQPINKVRVFELGSKFQIGQNGNKKDKYVEAAKRTNLFFAVYEDKNGKRNYETIPLNEVIERQKQGLSVVDLKGVNDFYLCPNDLVYVPSEEEIDNINNIDFKNISNERVYKVVSFTGNRLFCIPYTVAATIVNKSEYTQLNKIEFTKEKEVCSKLKIDRLGNISKA

SEQ ID NO: 5777 - protein, 1591 aa, synthetic construct
  REGION 1..1591: note = Synthetic
MDRNLMFSQRNNPYCDLLKISAAKINFFFDSTKCFKRNLYFCGIITVGWAVVNADEIARDNNTSYLKPISISSAGSRIIPMSADILGDFEKGNSISQTAERTRLRMVRRIHERSLLRRERMLRVLKILGFLPTHFANKIDDFGKFIDESEPKIAWTKRENGEYNFIFQDSFKEMLKDFALHQPQLVADGKKVPYDWTLYYLRKKALNERISIEELAWLLLQFNQKRGYYQLRGEEEDEDDTKRVEFLSQKVVRVEASNDKKGDDIWYNVYLENGMIYRRSSRYELDWVGKVKEFIVITDLDKDGSPKKDKEGNVKRSFRMPKEDDWTLIKKKTEFDIENSKKTVGCYIYDTLLQNPNQKIIGKLVRTVERKYYKDELIQILRVQQELIPELKDTELYKRCIEELYPNNEAHRNNLSKPDFVNLFVNDILFYQRPLKSKKTLIDNCPYEYHKDKDGNVYPIKCIAKSNPLFQEFRLWQFVQNLRIIQRERFVSDGQLDLFNNVATGKLQTDVDVTTEFLKTEDDYVNLFDWLNDRSSIKQDTLLNSYFKIKKEKGKDHYPYRWNYVEGKEYPCNETRAAMITGLEKCNNSSDVLTHEMEMALWHILYSVEDKIEINKALRTFAEKNHLCNTFVEVFCKMKPYKKDYGSYSEKAINKLLPLIRMGKYWKEENIDTKTLERIDKIITGEYDETIKNRVREKSISLTSIEQFKGLPIWLACYIVYNRHSEAKEIEKWEKPEDIDCYLNTFKQHSLRNPIVEQVITETLRTVRDIWKKEAQIDEIHVELGREMKNPADKRKKMTERIQQNENTNLRIKALLMEFLNPELGIENVRPYSPSQQDILRIYEENALDNLTKEDTEYEFVSKMSKTAQPSKSDVIRYKCWLEQKYRSPYTGNMIPLAKLFTPAYEIEHVIPQSRYFDDSFSNKVICEAEVNKLKDRQLGYEFIKNCAGQIVQLSQGESVKILSVDEYEKLVKNFYASDRLKMKKLLMEDIPDGFIERQMNDSRYISKVVKGLLSNIVRVKQSNGEYETEAVSKNLISCNGSVTDRLKKDWGMNDVWNSIILPRFQRLNELTGTRNFTTLNSEGHEIPNMPLELQKGFNKKRIDHRHHAMDAIVIACATRDHVNLLNNEAAHSKHNANRYQLQKKLRRFEKAINGYGKEIEVAKEFLMPWQSFTTDAKQVLQNIIVSFKQNLRVINRTTNNYLHYDENGKKKYQKQTNGDSWAIRKSMHKDTVFGEVNLRKKKTVSLNEALQKPDSIVNKDFKRKVKELLGEDRDVKFIKKYVEDNKDIWSDIDVARIDVYYFTKDEKKRNGEPKVRYFATRKPLDVSFDQKKILESVTDTGIQKILLAHLEAKDNNTELAFSPDGIDEMNRNIVALNNGKFHQPILKVRVYEKADKFAIGQTGNKNKKFVEAAKGTNLFFAVFGTEVTNKENGKTEIARSFLTIPLPLMIECQKRYGANWNYNIDQYLREKDLVSSDAKLLFILSPNDLVYLPTKDDLYKKTMTVDKRRIYKFIDPGMNTGNFLPYSTANVLFSITHSNQKKMGLAYPIQDEFGVGSQGSKSPRAITGEMIKETCVPIKVDRLGNIIKIG

SEQ ID NO: 5778 - protein, 1490 aa, synthetic construct
  REGION 1..1490: note = Synthetic
MAKILGLDLGTNSIGWAVVDNEKKHIDAAGSRIIPMDGDRMGKFEGGGSVSYTEDRTRARGARRLRERYLLRRERLLRLLNIMGFLPEHFASQLDRYGKLPADKEPKLAWREGKDGKPEFLFKNSFEEMVQEFRAAGIDGNLPYDWTVYYLRKKALSRPLSKEELAWVLLQFNQKRGYYQLRGKQDELDTETENKKDEKEYCELLVTNVEPTGEKDKKGYPWYNITLENGWIYPRPFRNEPDWKGKTRSFIATFKLDKDGHRKDEQPRLSAPSEDDWGLRKIKTEHDIKTSGQTVGEFIYNTLLHNPSQKIIGEKVRVVERELYINELHRILDKQREFMPELNDRNLYNQCTEALYPSNDAYLGSIANRDFTYLLADDILFYQRPLKSKTSLIADCPYEKRHGKSIKCIAKSHPLFQEFRLWQFLSNLRIYHNDIDITTTLLPDNDAWTSLYDHLSETKEVDQAALLRYFKIGKKEIAQYRWNYVPDRKYPCGETRATLLGGIRKTGLPDSFLTTDRELQLWHILYSIDDPTQYRKALGTFAAKQSLTESECDAFQEAFRRLTVYKEKDYGAYSAKAIGRLLPLMRRDKYWNPDAIDSKTREHIEHLTTGEVDDTLPPTARKALSGITDTGQCQGLSTWQACYLVYGRHSEATDTKPWRTPEDIDTYLSTFRHNSLNNPVVEQVVTESLRVVRDIWRQHGKPDEIHIELGRELKKTKAERESLAQSIAENEATNQRLRLMLLELMNPDCQVENVRPQSPSQMELLKIYEDGVMRRPEKDIFENESERQAIEDIRKRFAAAKNRPTHSEVLRYKLWLDQKYISPYTGRPIPLGKLFTPAYQIEHIIPQSRWFDDSLSNKVICEAEVNQLKDRELGHEFIVNHHGERVQLSLGGTVEILSVEAYEKLVAELFSNNRAKRMKLLLDDIPEDFNARQMNDSRYISRLMMHLLSNIVRTEDEEGNREESVTSKNVIPCNGAITDQLKRDWGIGDVWNRIILPRFERLNALTNTTDYTTTTANGHTIPTVPLDLRQGFNKKRIDHRHHAMDAIVIACTTRDHVNLLNNEASHDGNRRYDLQHKLRNIEYYIDRDGNRHEKFTDFIKPWPTFTEDTYHVLQGIVVSFKQNLRVINKTTNRYSTISDGKRTTVKQEKGDSWAIRKPLHKETVFGEVNLQLKKKVPIKRALEDINSIVSRELKEKIKEKKRLGYTDKQVAEFLEKNKDVWSEAADGKVEVYYYTANTGDRYFATRKDLLSLMKDAATIPAAEKAIASITDSGIRSILMAHMAAEGSPTEAFSADGLERMNRNIQQLNGGRPHMPIKKVRVFEQANKFSVGHSGQKATKFVEAAKGTNLFFVIYTNEKGLRGYATIPLNIVIDLQKQHEKAWREHLTERLVAEGLMSDKDSLLYILSPGDLVYVPNDGNKLNIEKNRIYKAVSMAGIQFMCIHHRVASPIVNKMEYTTSNKMERAITGEMIKEVCIPIQVDRLGNIIKIG

SEQ ID NO: 5779 - protein, 1546 aa, synthetic construct
  REGION 1..1546: note = Synthetic
MENNFKIILGIDAGTNSIGWSLVRRDFERKHGTILGMGVRIIPMSQDILNKFGEGNSVSQTAERTRKRSIRRLRERHLLRRERLHRVLNILKFLPAHYSEEIDFTSRPGQFRHETEPKVAYKKVWHETKNKYEHEFIFKDSFTEMLNDFRQSHPDLLEDKNGNPKQVPYDWTIYYLRKKALTQKIQKEELAWILLNFNQKRGYYQVRGEDEEETPNKLVEYHSLKVVNVTADPPQKGSLDTWYSLELENGWVYRCPSKTPQFDWKGKVRDFIVTTELNEDGTIKKDKEGKERRSFRAPGDDDWTLIKKKTEQEISRSQKTVGEFIYDTLLATPDQKIRGKLIRTVERRFYKDELRLILQKQTEFHPELKDEKLFVACINELYRNNENHSRQLKAKNFLYLFIEDIIFYQRPLRSQKSTINNCSLEFRYYLDDSGSQRTKYLKAIPKSNPYYQEFRIWQWMSNLAIYRRDDDLNVTNEFLSNTEDRERLFEFLNNRKGIKQKTLIKFLLDKKGLKGKELNSEVEKYRWNYVEDKEYPCNEIRSEIINRLAKVKGIPADFVTREIEQKLWHIIYSVTDKTDFEKALKKFAIKNNLDVLSFVEAFKRCPPFESEYGSYSEKAIKKLLALMRLGKYWSYKNIDDKTKGRIEKIINGEFDENIKDRVREKTLHLTDTTSFQGLPIWLAQYVVYDRHSEASTAQKWNSVEDLEEYLRNFKQHSLRNPIVEQVVTEILRVVRDIWLKYGNGAKGFFDEIHIELGREMKNPAEERDRITRQITENENTNFRIKALLAEMFNDGDVENVRPHSPMQQEILKVYEETVLNSGIEIEADILRISKSRQPSSSDLKKYRLWLEQKYRSPYTGEIIPLSKLFTPEYEIEHIIPQSRYFDDSLSNKVICESAVNKLKDNYVGLEFIKNYHGQIVECGKGKKVKIFEVKDYEEFVRKHYAKNRVKRAKLLMDDIPEEMIERQLNDTRYISKFVCSLLSSIVRADENDDGVNSKNLVPCNGKVTNELRQDWGLNDVWNDLILPRFEKLNQLTGTNLYTAWSENHQKFIPTVPLENSKGFSKKRIDHRHHALDALVIACATRDHINLLNNQFAKSSIRHDLNRKLRRFEKKAYVHPQTGDQVEREVPTEFLKPWNNFTADAKNAIERVIVSFKQNLRIINKATNLYQKWVEKEGRKYKQLHPQSGINWAIRKPMHKATIYGLVSLRKTKKVSFAAALDNIDNIVDKSLKREILSLLQKGFDKKKIKKHFNEQGLNRNGNGDSRVDIYYWDENCVATRNSIIEKFNTENFDESDLDKITDTGIRKILKRHLRNYMGRVDENGNAIPPQLLAFSPEGVEDMNNNIKTLNDGKPHQPIFRVRTFEAKGNKFAIGQTGNKIHKYAEAEKGTNLFYAIYEDASGNRNFETIPLNVVIERQKQGLSSVPDYNGKGDKLKFSLSPYDLVYVPTKEERQNIGNIDFSNLAPAQIKRIFVVNDFSETCYFTPNSFAKAIARKEVDLRYDPTQKKLVGSFDDKTASLDGEQIKEICLKINVDRLGNIIPSGRL

SEQ ID NO: 5780 - protein, 1562 aa, synthetic construct
  REGION 1..1562: note = Synthetic
MNIVLGLDLGTNSIGWALVQQDFKKRQGKILGMGSRIIPMSQDIKDEFGKGNSKSQTADLTGFRSTRHLRERGLLRRERLHRVLNILGFLPRHFAAQIDFEKKLGQFYEDTEPKLAYNNKEFIFKKAFEEMLEDFKMHQPELVIKGKKVPYDWTIFYLRKKALTQKISREELAWILLNFNQKRGYYQLRGEEDEDATRTAQTRIYFDTQIIKEITDTGIVYKGSKVIQIQLENGDSGKFFSKEIPNWVGNKKNIIATIDLDKEGNDRYEDDGTLKRKFSIPSEEDWDKKWKLVKIKTEKEIKDSQKSVGAYIYDALLQKPNQKIKGKLVRTIERKFYKDELIAILIKQIALQPELFTDELYNDCVRELYRNNEAHRLNLSKRDFVHLFVDDILFYQRPLRSQKSSVSNCTLEYRIFKTKDNEGNTVDKKEYLKVIPKSNPLYQEFRVWQWLFNLKIINKDNDTDVTPLFLKTIEDLEKLFDFLMSQKEVNHKDVLNYLLTPVLREKFPSAKPAAFNKELAKEVAKFRWNYVFDDTKEKEDDKSKTYPCNETGYEIRRRLNKVKNLPDGFLTPEKEYKLWHLIYSVNDKRQYEQALGSFARKNGLDEDTFTENFKKFPPFKSEYGSFSEKAVKKLLPLMRVGRYWDWNAIDNQTKNRINKIITGEYDEQIKNRVREKAIHLITETDFRGLQLWLAQYIVYDRHSEASLAGKWDSVTGLEEFLKDFRQHSLRNPIVEQVITETLRVVKDIWIKYGNGEKDFFNEIHVELGREMKKTADERKRLTSKISENENTNLRIKALLTELLADSNVENVRPFSPMQQEALKIYEDGVLNSSIPIPDDILKISKTAQPTKSELQRYKLWMEQKYCSPYTGQIIPLNKLFTHEYEIEHIIPQSRYFDDSFNNKVICESAVNKLKDKQLGLEFIKNHYGTEVQIGNKSVYIQTEEAYKAFIKDNYAKSPSKRSKLLLEEIPDKMIERQMNDTRYISKFIAQTLSNIVREDINDEGINSKNVLPGNGQITSILRQDWGLNDVWNELIIPRFERMQQLRSEKDIAEGVSFIALNKKGKTIPDLHPPTLQKGFQRKRIDHRHHALDALVIACATRDHINLLNNQFAKSEKRFDLNRKLRKFIKTSYNDAKTGERIEKEVPKDFLKPWETFTEDTKDILSGIVVSFKQNLRVINKTINRYQSYKDEAGNLRIGKDGKPKKDFIKQVKGDSWAIRKPIHKDTVSGAVKLRKTKEIPLNAALDNHNEIVEKALRKHITLLIKEGYDKNRLIKYFKDAGNKWNDSDISRVKIYYWDNENVASRVNLDVSFNEKRIIETITDTGIQKILLNHLNRYKGVTDEKGKEIAPETLAFTAEGIDEMNKNIVALNNGKFHQPILKVRTYEPKGNKFNIGQTGNKKDKFVEAAKGTNLFFAIYQDENGKRSYETVPLNIVIERQKQGLNSVPETNDKGNTLLYCISPNDLVYVPTEEERENIKSIDFRNLSKDQKNRIYKLEKASGTESYFVRHDIAYLIKQYDAKTRLGELESQNKLQTTMTPDRMKISEFCVKLNVDRLGNINKA

SEQ ID NO: 5781 - protein, 875 aa, synthetic construct
  REGION 1..875: note = Synthetic
MCLISEGCRCACYIVYDRHSEAKDITRWSSPADIDRYLKDFKQHSLRNPIVEQVVTETLRTVRDIWKQYGKIDEIHIEMGRDMKNPADVRAKISKRMAENENANLRVKALLTEFVNPDFDIANVRPYSPAQQELLRIYEEGVLDSVDEVPDDINEIMAKFNQSDVAKRPTHGEVMRYKLWLEQHYQSPYPGRIISLSRLFTDDYQIEHIIPQSRYFDDSLSNKVICEAAVNQLKDRMLGYEFIKNHHGEKVDLGMNVTATILTVEKYEELVQKNFRKNPVKMKKLLMDDIPDKFIERQLNDSRYISKKIKSLLSNMVREEGEQEDISKNVITCNGTITDRLKRDWGVNDVWNHMILPRFQRLDALTDSHRFTTTNTNGHTIPDMPLDLQKGFSKKRIDHRHHAMDAIVIACTTRNHVNLLNNEAAMSKNNAMRYQLSHKLRRYEDVTKTQDGRTRTISVAREFIKPWPGFCGDVEQALQGIVVSFKQNLRVINKTVNKYQKIVYDEERHCKVKKMVRQEEHDGRHLLAIRKSMHKDTVYGEVNLRRIREVSLKEAVANPKAVVDKDLKKKLKAMIELGYDLKRIQQYFDDNKDVWQDINLKKIKVYYFTKDTRDRYFATRFGNDLVALFNKTMKKEEVEKQIGKITDTGIQKILRRHLEANGGDYKKAFSPDGVDEMNRNIRQLNNGKAHQPIYKVRVFEKADKFAVGVRGNKAAKFVEAAKGTNLFFAVYQKEVKDSATGGTTMKRVFDTVPLKIVIDRLKQGLTPAPEEKEGAKLLFVLSPNDLVYLPTASERESGTIQQPLDRKRIYKVVSCTGAECYYLPFTVASPIVDKMEFFSLNKMGRAITGEMIKESCIPIRVDRLGNIIEINNKKL

SEQ ID NO: 5782 - protein, 1042 aa, synthetic construct
  REGION 1..1042: note = Synthetic
MEKWKDRNIMNILNPSIILNGKKEIDQKAFLKYPLFGLKKEVENYRWNYVQDKPYPCNETRSSMLARLEKCDISIEFLTKENEEALWHILYSVEDKNEIVKALQKFADKHDLNASFVDVFRKFPPFKKEYGSYSAKAIKKLLPLMRMGKYWSENSIDKGTRERIDKIITGEYDEKIENRVREKAIHLVDVSDFRGLPLWLVCYIVYGRHSESKEITQWKSPADIDSYLKSFKQHSLRNPIVEQIIIETLRVVRDIWKQVGNIDEIHVELGREMKNPADKRKKMTQQISENENTNLRIKYLLTEFLNPEYEVENVRPYSPSQQDILRIYEEGVLNSVSDLPEEISDILKKFTETDLKKRPSRSEVLRYKLWLEQKYRSPYTGEVIPLGKLFTSAYEIEHVIPQSCYFDDSFSNKVICEAEVNKLKSNLLGHEFIVKHHGEIVELPFGKKVRIFTVDEYEQFVKDNYSRTRGKMKKLLMDDIPEEFVTRQLNDSRYISKVVKSLLSNIVREKGEEEAISKNVIPCTGGVTDRLKKDWGINEVWNKIILPRFQRLNELTGTNKFTTKNVGIQEIPTMPLELQKGFNKKRIDHRHHAMDAIIIACANRNIINYLNNESATAKAELSRYDLQKLLCDKAKTDNNGNYKWVIRKPWASFTQDTYLALENIIVSFKQNLRVINKATNHFLHYNEEGKKIFVKQGKGDNWAIRKSMHKDTVFGEVNLRRIKTVALNEAMKNPQSIVVKDFKRKLLELWNLGFDAKRIKKYFEDNRETWSDINLSKIEVYYFSKDTKDRFFATRKPLDTSFDRKKIENNITDTGIQKILLRHLELKDNNPDIAFSPDGIDEMNRNIIQLNNGKYHQPIIKVRWYEQADKFAVGQTGNKSSKFVEAAKGTNLFFAVYESNILDKKTNTIIKKRNYATIPLNVAIERQKQGLPVAPEDENGNDPIFVLSPNDLVYLPTDDELANGIIAQPLDRGRIYKMVSSSGEQCFFIKHIVANVLVDKFEFSPLNKMERALTGEMIKMICMPIKVDRLGNVLESSSSHKK

SEQ ID NO: 5783 - protein, 1302 aa, synthetic construct
  REGION 1..1302: note = Synthetic
MKHILGLDLGSNSIGWALVQQDFENKQGKIMAAGSRIIPMDQGVLGDFEKGNTVSQTAERTTYRSMRRLRERHLLRRERLHRVLHILGFLPPHYDAQIDFTKRYGKFIDNAEPKIAYNNGNFIFMNSFNEMIEDFKKYKPQLFYKKSNGEESKIPYDWTIYYLRKKALSQKITQQEFAWLILHFNQKRGYYQLRGEEETESPNKEVAFHSLKVVEVEAEAPNKKGEIWYTIRLENGWIYRRTSKIPLDDWKGKTRDFIVTTDLNDDGTIKVDKEGKEKRSFRAPEENDWNLLKKKTEHDIDFSGKTVGAYIYDHLLQNPNQKIKGKLVRTIERKYYKNELKAILTKQIALQPELFTENLLADCIRELYRKNETQQQNLLSKDFLHLFVEDIIFYQRPLRSKKSTIANCTLEKRSYIDKETNERKDTPIKVCAKSNPYYQEFRVLQWLQNLRIYEIETDREVTAQFIETAEDYEALFNFLMSQKEIDSESLLKYFLLAKNPQIKDKAAKSELKKWLTTYRWNYVYDAVDNSSKKYPMNEIGYDLQRYLQKVEGLPVNFLTFDTTYKLWHLLYSVKDKVEFEKALKRFAKKKQLNETSFIESFKNFKPYPNEYGSFSEKAIKKLLPLMRFGNHWDFNRIDVSTQKRIDDLINGVTNEEIRTIIREKAEKYQLNSETCFQGLPLWLAQYVVYNRHAEATDIEKWTSVNDLEAYLEDFKQHSLRNPIVEQVVTETLRVVRDIWQQYGGGQANFFDEIHIELGRELKKTAEEKKQLSNRNQENENTNLRIKKLLAELKEDASIQNVRPYSPVQQELLKIYEEGIFSSTDEIEEDIQKIRKKAEPTTPEIQRYKLWLEQKYKSPYTGEVISLTKLFTEEYEIEHIIPQSRYYDDSFSNKVICESAVNKLKTNLLGLEFIQKHHGEKVRVAGNKEVTIFTEEQYKDFVKKHYANNLAKQQKLLLDEIPEKMVARQLNDTRYISKYISEILSKIVRSDEKDEGVNSKNVIPCTGKITTALKQDWGLNDVWNELILPRFERMNLLTQTQLFTSYNDRLQKNLPTVPIEYSQGFQKKRIDHRHHAMDALVIACATREHINYMNNQHALDKSKDKKEKQQSRIDLRTILCEKKNNNWQFKKPWGTFTQEAKESLEHIVVSFKQNLRVINKATNYYEKWEEKNGVLVKKKVKQEGTNWAIRKKLHEDFPYGKVKYQVNFLKISENISKIDLIVDEFIKRQLEKIYVENHRKVNLTKKYLKENPIRDQKGEEVISTDFREENIKYRKRKPISVLSDRNRKTGIYNPQNEMYQFTK

SEQ ID NO: 5784 - protein, 1419 aa, synthetic construct
  REGION 1..1419: note = Synthetic
MMIKNILGLDLGTNSIGWALIKQNFENKYGEILGMGSRIIPMSQDVLGEFGKGNSVSQTAARTGYRGVRRLRERFLLRRERLHRVLNVLNFLPEHYASQIDFEKRFGKFKYETEPKLAYNNDGFFFKNSFDEMLGDFKDHQFHLLENGRKVPYDWTIYYLRKKALSQKIEKEELAWILLNFNQKRGYYQLRGEDFEEEKDRVFVRLKVDRVVDSGENIKGKILYDVYFENGWKYEKQIVKTEDWIGRTKEFIVTESILKNGDTKRTFKAVDSEKDWIAIKTKTEQEIDKSHKTVGAYIYEALLQNPKQKIKGKLVRTIERKFYREELKKILERQKEFHPELQSDDLYNDCIRELYRNNEAHQITLSKKDFVHLLLNDLIFYQRPLRSQKSSVSNCTLEFRKYKDENGVEHAQYLKTIPKSNPYYQEFRVWQWMFNLNIYRKDDDTNVTKEFLSSTEDYETLFEFLNNRKEVDQKALLRHFKLNEKTHRWNYVEDKKYPCNETKTMISTRLEKVENYPSDFLTREMEQNIWHIIYSVNDKIEYEKALKSFAHKNNLDENSFFEAFKKFPPFKSEYGSFSEKAIKKLLPLLRLGKYWNWESIDRKSQGRIEKIITGEFDGNIKDKVREKAIHLTAENDFQGLQLWLAQYIVYGRHSEASMIGKWNSADDLEEFLKGFKQHSLRNPIVEQVITETLRVVKDIWLKYGNGAKDFFSEIHIELGREMKQTKDERVDATKRITENENTNLRIKALLAEMMNDNSVENIRPYSPMQQEILKIYEDGILKSDIEIDDDILKISKTAQPSSSDLKRYKLWLEQRYKSPYTGQIIPLNKLFTSEYEIEHIIPQSRYFDDSFSNKIICESAVNKLKDNYIGLGFIKQFGGMIVECGFGKSVEIFKAEEYEDFVKKHYANNRSKRNKLLLEEIPEKMIDRQLNDTRHISKYISGVLSNIVRQEDGTDEGVNSKNIVPGNGKITTQLKQDWGLNDVWNELILPRFERMNQLTNSTDFTSWNKNHQKFLPTVPIEFSKGFSKKRIDHRHHAMDALVIACATKDHINLLNNQSAKSDTKRYDLKRKLMKFERVVYSHSKTGEKIEKEVPKQFLKPWDNFTVDAKNKMETIIVSFKQNLRVINKATNHYEKWIEKDGIKRKELIKQEGTNWAIRKPMHKETVSGKVDLPGIKIPKGKILTATRKSLDTSFDLKTINSITDTGIQKILKNYLEFKGSSELAFSPEGIEDMNKNIEKFNDGKPHQSINKVRIFELGSKFSVGQTGNKKDKYVEAAKGTNLFFAVYEDKNGKRSYETIPLNEVIERQKQGLDSVSFKNKEDFLLCPNDLVYVPSEDELENIYNIDFKNLTTEKTGNIYKVVSFSGNQIFFIRQDIAISIVNKAEFSTLNKMERAIDGSMIKENCIKLKIDRLGNIAKI

SEQ ID NO: 5785 - protein, 1482 aa, synthetic construct
  REGION 1..1482: note = Synthetic
MKRTLGLDLGTNSVGWALIKNNFTKKEGEIIDLGSRIIPMDQKELSDFNSGNSISATAERTKYRGTRRLYERNKLRRERLHRVLNILNFLPKHYKDNIDFDKKLGQFKKEVKLNYASTENGESEFLFMNSYHEMLNDFKNNSKIPFDWALYYLRKKSLKEKIEKEELAWIILNFNQKRGYYQLRGDELTEDDDKKDVKYYQLTVKDVVATDDKNNKGTWYHITFNEIDAVYKRQSKDDIKNLIGTKKEFIITKTINKDNSIKYNFRAPKENDWGLIKKKTEQELDNYLNNDYTNKSVGSFIYENLLSDTSSKIRGKLIRTIERKYYKKELKAILSKQSEYHSELKDVKLYNQCLQELYKHNDAHKNNIKDKDFNYLFLDDIIFYQRPLKSQKGLISSCTYENRTYYKTIFDVKTNTNKKVLIKNQPIKAISKSHPLYQEFRLWQWLHNLKIYQNKKEIDGNLKINYDVTNEILKKDADYTALYDFLKEKKEINLTQFLKYFSDKKLIPKQKKDNLTHRWNYQVDKVFPMCETHNALVNRLKKVVNFNIEKDLLPEMEENLWHINYSIKNPVEFEKALKKFAKKFNIDKESFIKAFKKLPPYKNEYGSFSYKAISKLLPLMRIGKYWNPNEVSNDEKKRIAAIMERIQHLDLSDNFDQKKFDEAVTKISDDDIPKQLIKAFFPIKDKENYYSGLNTYQVGYAVYNRHSKNMNTDKWHTSNDIQNYLNNFKQHSLRNPVVEKIVLETLRTVKDIWDYYGQGKEGFFDEIHIELGRELKNPKTVREKITKRNVENERTNTRIRKLLQELINEGAKPHSPSHQEILKIYESDVVNNNILSDEIERIRKNNTPSKKDIQKYKLWLEQKYISPYTGETIPLSKLFTTDYQIEHIIPQSRFFDNSFNNKVICEAAVNQLKDNQTGYEFIQNHGGEIVKIGNKTVTIFKWEAYQQHCESYFDKNKTKLNNLITPEIPDDFINRQLNDSRYISKLVKGLLSKIVKEPNEKEATSKNLISVTGAITGKLKQDWGLNDKWNEIILPRFKRLNKLTQSNDFTYINEKGIEVPTVSEDLINGFNKKRIDHRHHALDALVIAACTRKHIQYINSLNNDKLKYSLQLGLMIKNKQGNFTKYFQLPWKTFPIDAKKSLENTIISFKKNIRVINKTNNKYWKFVQQPNGKYKKSLVPQIKGESWAIRKPMHKETISGKINEQTKNGKIITAVRTPLLNIKTLKHIKQITDSGIRDIIIPNHLKKYIDDKGKPMFDKAFSPEGIKDLNDNIITLNNGKKHQPIYKVRLSEEGSKFTVSDNKNSPKHKKYVEAAKGTNLFFAVYWDAKNQKRVFETVPLVEVIAHQKEVANLPKDARTPIPIKNKLGTFLFYLSPNDLVYVPTEEEQLNPKLVDFTNLNKEQVNRIYSVNDFSTTAYFTPNNFASKIADKEVDLKINKKNKLSGSYDSKTASIDNKQIKDICWKLEINRLGRIENVIIPKI

SEQ ID NO: 5786 - protein, 1453 aa, synthetic construct
  REGION 1..1453: note = Synthetic
MKKILGLDLGTNSIGWALINEDFEKKEGKIIGLGSRIIPMSQDIMDKFGSGGQTETPAASRTNARSIRKLYQRDNLRRERLHRVLNILNFLPEHYKNEIDFISHKGQFTNHAEPKLPYFKNQEGKFEFLFNESFNKMVEEFRQSKPELFYFKQNGKETKIPFDWTIYYLRKKALEQKISKEELAWVILNFNQKRGYYQLSEENEINEDKIQTYEVLKVKDVIDTGETIKGKNDKLHDVFFENGWKYDRQVVKIEDWIGKTKEYIVTESVTKNGEIKRTFKAVNSELDWIAIKQKTEQFIEKSGKSVGQFIYDTLLENPKQKINGKLVRTIERKFYKAELKSILEKQIKEHPELENAEFYKACILELYPNNEGHRRNIENRDFAHLFLNDIIYYQRPLKSKVSLISDCSLEYRIRKDTGEKVYVKCIAKSNPIFQEFRLWQFISNLKIYEKEKLVNNKTEYDVNVTEQYLSDEEKWIELFDWLNDKEDITQKQFLSFYKLKEEKYRWNYVEDKNYPCNETRAKFINRVKKIEGLTVDFLSSEIVQHLWHLLYSVTDPEERKSAISKFAIKHELSEDFIKSFEKFPPYKKEYGSFSEKAIKKLLPLMRFGRYWKHDNIDSKTKERIDKILTGEFDEKIKNRVREKAIHLQRTEDFKALPLWLASYIIYDRHSEANDIKHWNSPNDIADFLNPNLKGSFKQHSLRNPIVEQILTETLRVVKDIWEEFGNGENNFFDEIHIELGREMKNDSKTRKRISDKVIENENTNQRIKELLKELMQDGIDVRPYSPSHQEILKIYEDGIYQNENKKEELEIIDKIRKNNTPSKSDIQRYKLWLEQGYISPYTCKMIMLSELFSPKYQIEHIFPQARYFDDSMNNKVICEAEVNQLKDNRTAYEFITEFGGSKVSIGGKDLTILSIDDYEAHIKSYFGKNKIKRENLLSADIPESFINRQMNDSRYISKTVKNLLSNIVREENEEEVTSKKVITITGAITSQMKQDWGLNDVWNDIITPRFERMNELTKSNNFGGINPNTNKFLPKVPDEIAKGFNKKRIDHRHHALDALVIAFTTRNHINYLNNLNAKNENDKTIKFELRNTLLYKSKTDNNGNYKWQFYKPWENFTQDTRKQLETTLISFKQNNRVINKTKNKFQKWVADENGVLKKKIVPQTKGDNWAIRKSLHKATVFGKVELIRNGKNYYADAGRIILSEKFSRKQLDSITDTGIQKILENHLKNYTDDKGIEQFDLAFNADGIENLNNNIRILNNGKSHQPIYKVRVSEVGSKFNVGNNGTKNKKYVEADKGTNLFFAIYWNEKKQKREFETIPLNIIIEHQKQDACLPKDERTPVPINKEKGTFLFTLSPNDLVYIPTIDERENPQIVDFDKLSKEQINRIYKCVSFSGSQCFFVRNDIATTIKNKEEFSALNKTEKSIELNKEIMIKEFCWKLNADRLGKIRKVMK

SEQ ID NO: 5787 - protein, 941 aa, synthetic construct
  REGION 1..941: note = Synthetic
MSLWHILYSVNDLGELTQALKSYALKHGLNDEFVRIFRKFPPFKNEYGAYSEKAIKKLLPLMRMGKYWNKDKIDGHTLQRIEKLLTGEYDEKIGDRVREKAIHLTEISSFKGLPTWLVSYIVYDRHAETGGIRHWKTPQDIEHYLSTEFKQYSLRNPIVEQVITETLRTVKDIWQQYGDFAEIHVELGRDMKNTAERRAQLAKQSAKNEDTNLRLKALLMELQNDPEIESVRPYSPSQLEILKIYEEGVLAAENELPDDIEKISKMNQPTQSELIRYKLWLEQKYRSPYTGEIIPLSKLFTPAYEIEHVIPQSRYFDNSLSNKVICESEINKLKDNALGYEFIRDHEGEIVQSNFGKRLRVFTLGEYEQFVKKNYSRNDKKMKKLLMEDIPDSFIQRQLNDTRYISREVRTLLSNIVREEDEQEISKNVISCSGGITDRLKKDWGLNDVWNKIITPRFVRLNRMTESSKFGEWKNGHFQIQMPLELQKGFNKKRIDHRHHAMDALVIACATRNHINYLNNESALKDAKISRYDLKHSLCQKSKPDANGNYSWSFRKPWETFTQDTCEALKSVVVSFKKNVRIINKTTNYYQAYEYGKKVMKKQVKGDSWAIRKSLHKASVFGKVSLRRQKEVRLGVALENWNMLVDKELKEKIKQLITQYGREDVKLFLKYFKDRENKFNGKDISKVSIYYWDTENAAIRKPLDSSFTEKEIKTITDTGIQQILLNHLQAKGGQSDIAFSPEGLDEMNKNLIQLNEGKGHKPIYKVRIFEPIGNKFQVGETGNKSKKFVEADKGTNLYFAVYRAESGKRTYSTVPLNEVAERQKQGLSPVPETDMKNSASLLFWLSPNDLVYVPTIEERENFQEFDWKNLTEEQTGRIYKMVSSTGNQAFFIQMSVANPIINKYEFASLNKMEKTIDGEMVKEFCWKLKVDRLGHIIECIR

SEQ ID NO: 5788 - protein, 1328 aa, synthetic construct
  REGION 1..1328: note = Synthetic
MSRIPARKKAKTRGLMSFLRMEWCIPPAAEAPDWIGKTKEFIVTTDVEKDGTPKKDKDGNIKRSFRMPKEDDWTLIKKKTESDIDSSGKTVGEYIYDSLLADPTQKIKGKLVRTVERKYYKSELKRILDSQKRFIPELNDRTLYTACIEELYESNDAYRQSIASYDFTYLFVDNIIFYQRPLKSKKSLIDNCPYESRSYVDKETGEVKTAPVKCVAKSNPLFQEFRLWQFISNIRIYERQKIVDGHLKADVDVTGEFIKDEDDVVRLFDFLNDRKEIKQDTLLSTYFKVKKPKGKDSSYPYRWNYVEDKTYPCNETRALMLKGLKDAGVDEAFLDKANEYRLWHILYSVDDKQEIKKAMATFVCKYNKDEENKRKDKNNKAITLDDRFVEAFSALPPFKKEYGSYSEKAIRRLLPLMRMGKYWNVEAIDAATRVRINNIIDGVYDETIMTRVREKAVNLTDVSHFRGLPLWLACYVVYNRHSEAKDVSRWNSPDDIDRYLSSFKQHSLRNPIVEQVITETLRTVRDIWRQYGRIDEIHVEMGRDLKNPADVRAKMSKRVAENENANLRIKALLTEFVNPDFEIDNVRPYSPSQQDMLRIYEEGVLESMDEVPDYISEIISKFSQTDEKKRPTHAEMIKYKLWLDQKYQSPYTGRTIPLARLFTDDYQIEHVIPKARYFDDSMSNKVICEAEVNQLKDRLLGYEFIKAHHGEKVSVSIGDPVTVLSVEEYEQLVQRNFRKNPMKMKKLLMDDITDGFVERQLNDSRYISKVVKSLLSNMVREKDECEATSKNVITCNGAITDRLKREWGVSDAWNRIVLPRFERLNRITGTSQFTTPSANGHLIPDMPLSLQKGFNKKRIDHRHHAMDAIVIACTTRSHVNLLSNEAAMSKNKSTFYQLSHKLRRYENVIVTRNGETRTMSVAREFFKPWPTFTVDVEKALRNIIVSFKQNLRVINKTTNKYQCIENGKKRLKSQVKGDSWAIRKPMHKDTVYGEVNLRRIDEVQLKKAVANPKAVVDKDLKKKLMAMIELGFDLKKIKQYFEDNKDAWQDIDLKKIKVYYFTKETDDRFFATRFGNDIVSLFAKVDKQSKAKDIISSITDTGIQKILLRHLEANDNDVQKAFSAEGVEQMNRNIVELNNGKPHKPIYKVRKYEQADKFAVGVKGNKDSKFVEAAKGTNLFFAVYQKETVDSTTGDIIKKRIFDTIPLKTVIDRQKNMQTVAPEEKDGAKLLFVLSPNDLVYLPTDEEISSGIINQPLGRDRIYKMVSCTGSRLYCIPYNVANPIIDKEEYTQLNKVEFTDMKKSIKEICVPIKVDRLGNVIEINNQAL

SEQ ID NO: 5789 - protein, 1048 aa, synthetic construct
  REGION 1..1048: note = Synthetic
LRIYQKEGTINGKFTTDIDVTSQFLKTEDAYANLFDWLNQKKEIRQDTFLKNPAFGLKKNTANYRWNYVEDKTYPCNETHYKILSYWEKAGIEQSALTSEIEEKLWHILYSISDKNELRKALQHFADKNYLSDKFADTFQQIPPFEKDYGSYSAKAIKKLLPLMRIGRYWKAENLDSTTLDRIEKILTGEFEENIKNRTREKTIHLDNLYSFQGLPTWLACYIVYNRHSEIKDVTKWQQPSDIDAFLNAFKQHSLHNPIVEQIIMETLRTVRDIWKQTGHIDEIHVELGREMKNPAEKRRKLTQQIQENENTNLRIKALLAEFANPELGIENVRPHSPSQQDLLRIYEEEALNETKDIPEDIAVILKKFNEVDTKKRPSTSDVLRYKCWLEQKYRSPYTGAMIPLGKLFTPAYEIEHVIPQSRYFDDSFTNKVICEAEVNKLKGNMLGYEFIKNNQERIVELGFGQNVKIQTVEAYELFVKEHYSYNRTKMQKLLMEDIPDQFIERQLNDSRYISKLIKSLLSNIVRDEGEEEATSKNVIVCTGSITDRLKKDWGINDVWNKLILPRFIRLNEITESNRFTTTNACNKTIPAMPLDLQKGFNKKRIDHRHHAMDAIVIACANRNIVNYLNNESASKNAKISRQDLRQILCKKTKTDNLGNYQWLIDKPWDTFTQDVYSILGNIIVSFKQNLRIINKTTNHYIHYENGKKVSCSQKQGDSWAIRKPMHKETVYGEINLRRTTTATLKAVLENPQRIIEKDLKKKIKELLTQGLNEKQIKKYFEDNKDIWQEINLKKIPVYYFTKETANRFFACRESINTTFNKKKIEEKVADTGIQQILLRHLEQNGNNPEQAFSPEGIEQMNKNIMSLNNNGKFHQPIYKVRTYEQADKFAVGQTGNKSTKFVEAAKGTNLFFAIYETAHKRSFASIPLNVVIERLKKGLSPAPENEKGNLPKFILSPNDLVYVPTKEEIENGHINQPIQKDRIYKMVSCTEGECHFIPYFVAKPIIQTIELGSNNKAQKTWQDEMIKEICIPIKTDRLGNIITSISL

SEQ ID NO: 5790 - protein, 1023 aa, synthetic construct
  REGION 1..1023: note = Synthetic
MKRILGLDLGSNSIGWGLIEQDFQQKQGRIIAAGSRIIPMDQGLLGDFEKGNSVSQTAERTFYRSARKLRERHLLRRERLHRVLHILGFLPTHYDKQIDFSKKYGKFVSNTEPKIAYHNGKFLFMDSFQEMLADFKIHQPDLFYTKRNGEESKIPYDWTIYYLRKKALSRKISKEELAWIILNFNQKRGYYQLREEEENKENDFEIISSKIISVIKKDKDKKYNKYWYDIILENGLVYQAAFYNDFVYNWINQDREFIIERTSLKNGTEKVKLSYLPTFDEIDKMDKKEQDKYYKKIKIKTENSIGNKTVGCYIYDHILQNPNEKIKGKLVRTIERKYYKEELKAILEKQIALQPELFTDQLLADCIRELYSKNEAQQRNLAARDFVHLFVEDIIFYQRPLRSQKSTIANCSLESRSYIDEDSHTRKESPLKVCPKSNPYYQEFRVLQWFQNLKIYEIDTDREVTHEFIKTLEDKQQLFDFLMDQKEIDCEELLKYFLNQTYPNAKEKALKSELKKWKDTYRWNYVYDMGEKSSKKYPMNETRYELGRYLEKVTNLPEHFLTKEIEYQLWHLIYSVTDKIAYEKGLKKFAQRHHLDEDSFVENFKKFKPYPSEYGSFSEKAIRKLLPLMRFGSHWNFDSIDKDTQKRIEDLITGVENEEIRTILREKAEKYQLEKETDFQDLPLWLAQYIVYNRHAEASSLEKWTSVNDLETYLNEFKQHSLRNPIVEQVVTETLHVVRDIWQQYGQGQADFFDEIHIELGRELKKTAKEREELSKQNQKNEDTNLRIKALLAELGEDSTIENVRPYSLMQQELLKLYEEGVFSSSMEIEDDIEKIHKKATPNKAELQRYKLWLEQKYKSPYTGQIISLKRLFTEDYEIEHIIPQSRYYDDSLSNKVICESAVNKLKGNQLGLEFIKNHYGEKVHAAGKEVSIFTEEQYKEFVKNHYANNSGKMKKLLLEDIPEKMVARQMNDTCYISKYISEILSKIVRADERDEGVNSKNVILCTGKITSALKQDWGVNDV

SEQ ID NO: 5791 - protein, 939 aa, synthetic construct
  REGION 1..939: note = Synthetic
LNNSRISLLSRRNKAIKKLLPLMRMGKYWSIENIDNGTRIRINKIIDGEYDENIRERVRQKAINLTDITHFRALPLWLACYLVYDRHSEVKDIVKWKTPKDIDLYLKSFKQHSLRNPIVEQVITETLRTVRDIWQQVGHIDEIHIELGREMKNPADKRARMSQQMIKNENTNLRIKALLTEFLNPEFGIENVRPYSPSQQDLLRIYEEGVLNSILELPEDIGIILGKFNQTDTLKRPTRSEILRYKLWLEQKYRSPYTGEMIPLSKLFTPAYEIEHIIPQSRYFDDSLSNKVICESEINKLKDRSLGYEFIKNHHGEKVELAFDKPVEVLSVEAYEKLVHESYSHNRSKMKKLLMEDIPDQFIERQLNDSRYISKVVKSLLSNIVREENEQEAISKNVIPCTGGITDRLKKDWGINDVWNKIVLPRFIRLNELTESTRFTSINTNNTMIPSMPLELQKGFNKKRIDHRHHAMDAIIIACANRNIVNYLNNVSASKNTKITRRDLQTLLCHKDKTDNNGNYKWVIDKPWETFTQDTLTALQKITVSFKQNLRVINKTTNHYQHYENGKKIVSNQSKGDSWAIRKSMHKETVHGEVNLRMIKTVSFNEALKKPQAIVEMDLKKKILAMLELGYDTKRIKNYFEENKDTWQDINPSKIKVYYFTKETKDRYFAVRKPIDTSFDKKKIKESITDTGIQQIMLRHLETKDNDPTLAFSPDGIDEMNRNILILNKGKKHQPIYKVRVYEKAEKFTVGQKGNKRTKFVEAAKGTNLVFAIYETEEIDKDTKKVIRKRSYSTIPLNVVIERQKQGLSSAPEDENGNLPKYILSPNDLVYVPTQEEINKGEVVMPIDRDRIYKMVDSSGITANFIPASTANLIFALPKATAEIYCNGENCIQNEYGIGSPQSKNQKAITGEMVKEICFPIKVDRLGNIIQVGSCILTN

SEQ ID NO: 5792 - protein, 1149 aa, synthetic construct
  REGION 1..1149: note = Synthetic
MDKKEQDKYYKKIKIKTENSIGNKTVGCYIYDHILQNPNEKIKGKLVRTIERKYYKEELKAILEKQIALQPELFTDQLLADCIRELYSKNEAQQRNLAARDFVHLFVEDIIFYQRPLRRQKSTIANCSLESRSYIDKDSHTRKGAPLKVCSKSNPYYQEFRVLQWLQNLRIYEIDTDQEVTHEFIKTLEDKQQLFDFLMDQKEIDCEELLKYFLNQTYPNAKEKALKSELKKWKDTYRWNYVYDMGEKSSKKYPMNETRYELGRYLEKVTNLPEHFLTKEIEYQLWHLIYSVTDKIAYEKGLKKFAQRHHLDEDSFVENFKKFKPYPSEYGSFSEKAIRKLLPLMRFGSHWNFDSIDKDTQKRIEDLITGVENDEIRTIIREKAEKYQLEKETDFQGLPLWLAQYIVYNRHAEASSLEKWTSVNDLETYLNNFKQHSLRNPIVEQVVTETLRVVKDIWEQYGQGKADFFQEIHIELGRELKKTAKEREELSKQNQKNENTNLSIKEKLKELEKYNTRAYSITHQEKYKLWLEQKHISPYTGQIISLENLFTDNYEIEHIIPQSRFFDDSLSNKVVCESIVNKAPYKDRQLGLEFIKNQGGRIVKELSKENKTIKIFTEEQYRTFIKEHYSNNPAKTKKLLLEDIPEKMVARQMNDTRYISKYISEILSKIVRADERDEGVNSKNVILCTGNITSALKQDWGVNDVWNDLILPRFERMNGLTQSTLFTTYNERYQKYLPTVPMEYSKGFQKKRIDHRHHAMDAIIIACTTREHINYINNQHALEKGKDKKEKQEERDTLRERLCIKKYNNRSEGNYSWIFKKPWDTFTQEVRAALEGIVVSFKQNLRVINKATNYYERWVEENGKLIKKMVKQEGTNWAIRKPLHKETVSGKIILEREKVSKGKILTATRKAIDSTFTEKVIEGITDTGIQKILLNYLKFKKSPEIAFSPEGLEELNKNIMLYNDGKPHKPIYKVRIFEQGSKFPLGEVGNKATKYVEAAKGTNIYFGIYQGKDKRSFATIPLNEVIERQKQGLSSVPEYNEKGDPLLFSLSPNDLVYVPIEGEIIEDIDFQNLSKEQKERIYKAASFTRNECFFIKSSIASLIKNYDAKTKIGELGSQNKLEVTICKGIRIKEVCIKLKVDRLGNISKA

SEQ ID NO: 5793 - protein, 1217 aa, synthetic construct
  REGION 1..1217: note = Synthetic
MTVGAYIYDTLLQKPDQKIRGKLVRTIERKYYKNELYQILKTQSEFHEELRDKQLYIACLNELYPNNEPRRNSISTRDFCHLFIEDIIFYQRPLKSKKSLIDNCPYEENRYIDKESGEIKHASIKCIAKSHPLYQEFRLWQFIVNLRIYRKETDVDVTQELLPTEADYVTLFEWLNEKKEIDQKAFFKYPPFGFKKTTSNYRWNYVEDKPYPCNETHAQIIARLGKAHIPKAFLSKEKEETLWHILYSIEDKQEIEKALHSFANKNNLSEEFIEQFKNFPPFKKEYGSYSAKAIKKLLPLMRMGKYWSIENIDNGTRIRINKIIDGEYDENIRERVRQKAINLTDITHFRALPLWLACYLVYDRHSEVKDIVKWKTPKDIDLYLKSFKQHSLRNPIVEQVITETLRTVRDIWQQVGHIDEIHIELGREMKNPADKRARMSQQMIKNENTNLRIKALLTEFLNPEFGIENVRPYSPSQQDLLRIYEEGVLNSILELPEDIGIILGKFNQTDTLKRPTRSEILRYKLWLEQKYRSPYTGEMIPLSKLFTPAYEIEHIIPQSRYFDDSLSNKVICESEINKLKDRSLGYEFIKNHHGEKVELAFDKPVEVLSVEAYEKLVHESYSHNRSKMKKLLMEDIPDQFIERQLNDSRYISKVVKSLLSNIVREENEQEAISKNVIPCTGGITDRLKKDWGINDVWNKIVLPRFIRLNELTESTRFTSINTNNTMIPSMPLELQKGFNKKRIDHRHHAMDAIIIACANRNIVNYLNNVSASKNTKITRRDLQTLLCHKDKTDNNGNYKWVIDKPWETFTQDTLTALQKITVSFKQNLRVINKTTNHYQHYENGKKIVSNQSKGDSWAIRKSMHKETVHGEVNLRMIKTVSFNEALKKPQAIVEMDLKKKILAMLELGYDTKRIKNYFEENKDTWQDINPSKIKVYYFTKETKDRYFAVRKPIDTSFDKKKIKESITDTGIQQIMLRHLETKDNDPTLAFSPDGIDEMNRNILILNKGKKHQPIYKVRVYEKAEKFTVGQKGNKRTKFVEAAKGTNLFFAIYETEEIDKDTKKVIRKRSYSTIPLNVVIERQKQGLSSAPEDENGNLPKYILSPNDLVYVPTQEEINKGEVVMPIDRDRIYKMVDSSGITANFIPASTANLIFALPKATAEIYCNGENCIQNEYGIGSPQSKNQKAITGEMVKEICFPIKVDRLGNIIQVGSCILTN

SEQ ID NO: 5794 - protein, 1230 aa, synthetic construct
  REGION 1..1230: note = Synthetic
LVYQAAFYNDFVYNWINQDREFIIERTSLKNGTEKVKLSYLPTFDEIDKMDKKEQDKYYKKIKIKTENSIGNKTVGCYIYDHILKNPNEKIKGKLVRTIERKYYKEELKAILEKQIALQPELFTDQLFADCIRELYSKNAAQQRNLAARDFVHLFVEDIIFYQRPLHRQKSTIANCTLESRSYIDKDSHTRKEASLKVCPKSNPYYQEFRVLQWLQNLKIYKIESDQEVTHEFIKTLEDKQQLFDFLMAQKEIDCEELLKYFLSLTYPNAKEKALKSELKKWKDTYRWNYVYDIGEKSSKKYPMNETRYDLKRYLEKVANLPDDFLSSEVEYLLWHLIYSVTDKVAYEKGLKKFAQKHHLDEDSFLESFKKFKPYPSEYGSFSEKAIRKLLPLMRFGSYWDFNHIDKNTQKRIDDLITGVENEEIRTILREKAEKYQLEKETDFQNLPLWLAQYIVYNRHAEASSLEKWTSVNHLETYLNEFKQHSLRNPIVEQVVTETLRVVRDIWQQYGQGQADFFDEIHIELGRELKKTAKEREELSKQNQKNEDTNLRIKALLAELGEDSTIENVRPYSLMQQELLKLYEEGVFSSSMEIEDDIEKIHKKATPSKAELQHYKLWLEQKYKSPYTGQIISLKRLFTEDYEIEHIIPQSRYYDDSLSNKVICESAVNKLKGNQLGLEFIKNHYGEKVHAAGKEVSIFTEEQYKEFVKNHYANNSGKMKKLLLEDIPEKMVARQMNDTRYISKYISEILSKIVRADERDEGVNSKNVILCTGKITTALKQDWGINDVWNDLILPRFERMNDLTQTSLFTSYNEKYQKYLPTVPMEYSNGFQKKRIDHRHHAMDAIIIACATREHINYINNQHALEKGKDKKEKQEERDTLRERLCIKKYNNKSEGNYNWVFKKPWDTFTQEVRAALEGIVVSFKQNLRVINKATNYYERWVEENGKYIKKIVKQEGTNWAIRKPLHEETISGKIYLDREKITKNDILTATRKTVDSSFDDKRIKKITDTGIQKILLNYLKYKGSPEIAFSPEGLEELNKNLSIYNDGKPHKPIYKVRIYEKGSGRFALGEKGRKYKKYVQGAPNLYFGIYQGAKRSFATIPLNEVIERQKQGLPSVPEYNEKGDLLLFSLSPNDLVYVPVEGEIIEDIDFRNLSNEQKERIYKAASFTRNECFFIKSSIASLIKNYDAKTKIGELGSQNKLEVTICKGIRIKEVCIKLKVDRLGNISKA

SEQ ID NO: 5795 - protein, 1383 aa, synthetic construct
  REGION 1..1383: note = Synthetic
VRWNSAYCVRKPRNHAQVHCGQLISYRCRVKLYSLVKNTEKHMASEIVLGLDLGIASVGWALVRREDGESKELIGLGVRVFEEGVSNKGQGDKEESHASARRQKRLARRNLERRARRLNRVYNLLAKVGLLPVLPEHLSHPRTPSGEGSAANRQRLVDETKRARHEALQTLELGAKDPDTGRRPAAADPNCLVGKYRRDDLPVERFLPYFLRDRAIHCALEPHELGRALYSLAQRRGVWWNRADDNPKAEENKPEEKKSKRASKKDDDSKSESGKVKAAVAEQQVKLNKFGEARKLERPATLGEFYAAILTGDSTALAIDSEGCKPEEYQLRVRNRAKVYNRCTTREMLKAEFNLIWESQLKHHAGNAAMLAILNSTVDVPPRSEKVIERNGRPVVKYPGRPGKTVPLREAVFKAIFHQRKLKNASHLIGACELENHTKHRRECDGGKNEISRSRPLQYDRKRAPAGHPFATRFKMLKMVNETRVFRRRSAEQDYTPVQLDPSLETGLLPESLRAKLVALLSGQESLRWQQAREELSLNADTAFNWELQTGNKATKGGNQKKEKGSFTPAHKHFIGDVTAAKFSEIFGAERWQRMCQTKAPSGMTEAEEVFWDWYACQDPEALAFIGAVRWKLDGMTVANPGGLLPSQIVEECAKLRADAVKRGRENPSNPGKSAMQLAQERFGKVSFEGPAKAFGDLKLPQGYARYSTAALKHLLNHPTWGMERGHTEGTARDMLYVARKVAMGPGTTPQLKPLVEVFPTLNNPVVKRTLSQLRLVVNELIKVKLGGTPPHLIRVEMTREMQTNREGREAIQLRQDMNRKANENAAKLLGLDPETTSSELKRKVQLAQEAGWHCPYCGLGYEAQDIHSLEIEHIIPTSILPDNSFANLTLAHKACNILKGGRTPFQARHDFKRNWHDILNHVAVFRSTEKYFDSTKEERWTPSERPPEPKPENSATGKRRKTLPKAAQAKEGERHERGHPKLRLFLMDDAALEEHKKRFTNADLTQTGYITKVALGYLATLYGSSPDKPHEIPTGRVRHVLQVSNGSITALLRDELGEPCSQCQIKHAEPDKGKVIDGWISVNHVLRDGGSREPGDGRNPLSGERRKKERKDHRHHAVDAAIVAITDPNKLVGRLQEAFRQSRRQDQGKQRYSWGRVQAEVLPQWPTFYRDLYEFIHVKDQFGHGFKGVVVSHAVERKTTGPLHDETFRPKAGFQPIRDGAGRVLIGKRPVSVIEIGTGERARLAQPGDNHHVGIYQDSDENWLADRPASFFDVATRKRLGKPIIRKDAFANGAIKFRFALMKRDALHLADGSIRVVRGFSAENKPSGPYVRIKHVAHTDARDDMSIPEEESPRDPISTLFKERGALKVLVTPLGEVRPVND

SEQ ID NO: 5796 - protein, 1104 aa, synthetic construct
  REGION 1..1104: note = Synthetic
METKQTTKLRYSLGLDIGSESVGWAVIELNEHGQPIGLVDMGVRAFDAVRQEQQKATTPAQERRVARSQRRRLRNKKKRKKRLIEACINYGLLSNKQEADACLVTLPGDKSPWDLRVEGLDRKLDRREWFRVLYHLVNHRGFKSFKRGEDLEKGRKDDVKKMKAAAKQLSSEWRDRGYRTVAEFLCNDSDWISKHGLRKRNKEGSYEFTILRDDLVEEAKLLFEQQRRFGNEFASAVFETEYIDILDEKPRLLEGEDLKAKVGYCTFEPDERRAPKATFTAQKFRALQIINNLRFINPETGEIKESLTSDEIKRLFNLALNRKEVKAEQILRELGLRGWLIEGYDKNNEKIIVLEDFHKLKEALEKKFPETWGKLLTDIDLYDQVASILTYYLAPESTKRELQKLQLDDEVIDALLNVSFKGHASLSLKALRKIIPYLEQGYKYSKACELAGYDHRALPEKHRRNHIPPFESEEFDKQLKAEYFGITNPNVKRALAQARKVVNAIVRHYGIPSRIGIELAREMTLSRKRREETRLNNERRKERENIIKKLKEEHNVDNPSAKLVDKYILYELQGGKCAYSLKQIDLNRMIHDPSYVEIDHIIPRSISFNNSFSNRVLVLASENRNKGDRLAAEYVKSYYGEEHYNKCLALFEEALKKPHDHRHRKRELALKLKLFKKESLTDEELVEFRERYLINTRHAARFFKKVLCAYLDIEDPRVITINGTITRDLRHLLGVEDLKEGRFSDKHHAVDATICAICDFSTVYKLSNYYKYKDGFYKIDGDTLISQNGLRLKLEDLAWPSFREDIVKRLETLVVSRAPNRKVTGRGHRDTIYSLKHVKKVVDLPEKGKISISSDAPRPTTRVRLDSLKPEQIKAILDNPEKVLVDYQSNYLLYERIIKRLRETEPDDGNKERWAVLAFGPDTEPIRVPSKDGKEGPVVRKIKIFTDILSGVAVRGGIAPYDNIVRLDFYRRKEKNGRYKYYVVPVYAADIAMGIVPDKVATTGKPESEWKKLDDSFEFLFHIFKGDCLRIYKDLKEPPTDMYFTSFDRNTVRLKGNYLDRSNKNKQGKIVTVEESITNAARIQKLHVDILGRLSVVEKEKKVF

SEQ ID NO: 5797 - protein, 1104 aa, synthetic construct
  REGION 1..1104: note = Synthetic
MSKYSIGLDLGVNNVGWSIVDIDTAQIEKCGVRRFNTSDSAKDRRFQRNTRRRLKRRDTRKEDLLKLFGKINFPTTNTIDSKLIEKRYKGINEQITKQDIVNILCFLVTHRGYIPFGDEEVEFVDLQGKLPCEYYYNLYENSINNKYRALATTVKNTDNEREIRRLIEIQSKYYPELNENFLEQLFGKDGKSGIFNRKRKFWEGPGSINSFTEYGRFKNKFDKLDYLVQKDENPSYEKYLFEDLIGKCSVDPDERCASTGNFYAEKFNLLNDFINMYFKSIEGFSNQQAFYQKDNTSYKLTKEGLDLVFEYCLNHDTITIKKLLKDLFNTTEDNIGGFKTDEKGKPELSTMNIYRSIKKIFANKNANMEIFKEENIDKYNSIINYMGIVPGVVELINIINDMVISLDEKDIVALTDALKTNKKNLKYHSLSEKVLKRAINDMQNNCLNYMQVFKKYDYAKKSRNLFIEKYSKFSNNLSVDLLNSEFIDDIIASPQVKKTLRQAIKIINAIIEEKGNLPYSISIESAKETMNGAKKRQEYSKIRDLNTKLHKQAEEYLKSISANVTEKNIEKVMLWNEFSGVCPYCNKSVNINYLLNGSYEIEHILPRSESFDNSYENKTIACADCNKNKGNKTPLQYLNGSAKEAFINRINSNKNISDIKKKNFLYVDDISKYKIRFFNRNLRDTAYATKEIVNQINIFNDYLKYKYNDDTKKILTISTPGQFTSNIRKRYDLEKNRDAGEQPYHHAVDASIIALLPTTELGSEIIEFQNNSKFFLDTNADKKMDNIGYKMNVYYKSESNIEYDNYIIDLKKITDENKELFKYSPEVVKEANRQLSDANIIKVIFKGKDYFQISQINDIYSLSESDKKILDKAFDDSKNETLLCQDNNIKLYNKLKDIYLKFKDSKEPFVDYCREVNNLSKEDNFDYLIHGIKSSENGPTVKKLRYYIPINDPYFLEKKNINKKENTLIALDGLSQVCTRVYYNETKNCFTFLPIPAICTNLKNGKINKNHRLYKQYYDKLIGEDKVRHIVDLYNGNTIEVYKKSGEIIRGEVSYYDKTEKRIVLKKKNNENSPKKFIKNDYKLMVYDIDPLGNEKIRLTFEIK

SEQ ID NO: 5798 - protein, 1091 aa, synthetic construct
  REGION 1..1091: note = Synthetic
MKYIIGLDLGINNVGWSVVNAETTEIKSYGVKKFSTSNGASDRRNFRNSRRRLKRKDTRKEDVLKILNDINFPNNLTIDTKLIETRCKGLNEKISKQDITNILAYMAVHRGYIPFGNEEVSFVDLKGKYPCEYYRDKLLNSINNKYRAQRETVKNKDNEKEIRKILKTQQEYYPEITNDIIEKLVETLNRKRKFWEGPGGLNSLTSFGRFKTDEDVIKYKEQKDKNPDYEKYIFEDLIGKCEVDPDEKCASTGNFYAEKFNLLNDFINVSFLSIDEINNKEDFYLTDNKTYKLKETGLNKVFEYCLEKENITIKGLLKDLFATSVNNISGFRQKDHDPNKPDMSTMNIYRSVKKIFAKNNANMDIFKLDNIDKYNDIINYLMLVPGNVELINMISSMVMSLTENDENALKEAFKSKGKDLRYHALCEKILKRACNDMQSLQKNYMQVYKLKDYGKKSRELFIRKYEEQNKDKLLLNSSFIDDIVASPQVKKTLRQAEKVINEIVKDMKSLPYAIAVESTKEELSGNDKRNMYIAMNKKNKELHDKAEKTLKSLGYDINQITKKKITKIMLYEEFNGLCPYCGKPININSLINGSDEIEHILPRSDSFNDSLDNRTISCADCNSKKGNKTPLQYLTGSDKESFINRIKSNKNISELKKNNFLFDGDISKYRTRFFNRNLRDTAYATKELIKQINIFNNYLEFKSNSKKILTMSTPGQLTHDIRERYNLEKDRDAGQKPFHHAVDASIVALLPTTSIGKKILNFQNNDNFFISQDSKKIMQDIATELKYYDTKKDKIEYDDYIKDLKTIIDTNPKFMYSPEVNKEPNKQLFNANMYKLIKKEDKYYKIEQIDNIYDPKLDLKLLEKLFDDSKNETLLCQAQHQDFYSKLKKIYFEYKDSNISPFEAYQREVNNLSKEDKFDYLIHGIKMSQNGPVVKKLRYYTPISEPYLIDKKSINKKNTTYLAYDSLAQAGIEVYYNIDKNNLVFVPIPSIAVNLKNRAINYQHPVLVKYCKKYLNDCNAKRIVTLFNGNTIEVYKSKGNIVKGEVSSFDKNSNRIRLRDGSSFVTSDRGFSVIDYNPIGKSQKRLTFMIK

SEQ ID NO: 5799 - protein, 1091 aa, synthetic construct
  REGION 1..1091: note = Synthetic
MEKYIIGLDLGINNVGWSVVDAQTNKIKYLGVKQFEASDSAKDRRTQRNTRRRLKRRETRKTDILKILSNINFPNNLTIDTMLIETRCKGINEQISKQDITNILCYMATHRGYIPFGDEEVSFVDLDGKYPCEYYYEMFKSSTNNKYRALRNTVKNEENINEVKKMLETQRKYYPEITNETIENIVTTLQRKRKFWEGPGSINALTDYGRFKTPEDVVEYLDKKKENPEYEKYIFEDLIGKCSVIPNEKCVSQINFYAEKFNLLNDFINISFKSIEELNNKDDFYETQVKTYKLRESGLNKVFDYCMSKDTLTIKGLFKDLFATTIDNISGYRQDGHDPNKPEMSTMNTFRSIRKTFKECNANMDIFKPENTDLYNEIINYMMLVPGQVELINMLSTIMPLSENDKEALKKVFKSKKTNLKYHSLCEKILIRACNDMLSLQKNYMQVYKLKDYGKESRKEFVKRYEESNKGEKLMNPTFIDDIISSPQVKKTLRQSVKVINEIIKNEKSLPDVIVVESTKDTLNSEKMRKVYIDINKKQKALHDKAIKTLSSIGYSEKDISKKKIEKLMLYEEFDGLCPYCNNQITLKYLINGSDEIEHILPRSNSFDDSFDNRTVSCANCNKNKNNQTPLEFLKGNEKESFIERIKSNKNISEFKKENFLFAGDISKYRTRFFNRNLRDTAYATKEMINQINIFNLYLESKNKDEKIKTLSTPGQITHSIRKRYDLEKDRDTDIPYHHAIDASILALLPTTKIGSKVVMFQNDNKFFLNENNKDKMTEIGLELKYYDTSEGKIEYDDYIADFKNINDTSNIFMYSPEVKKEPNKGLFNANMYKVIKIDDKYYKIDQINDIYNLSDSDKKLLPKLFDDAKNETLLCKLQHKEFYEKLKNIYIKYSDSKNSPFEDYQREINNLSKEDKFDYLKHGLKMSENAPSVKRLRYYTPISEPYLIDKKSINKKDGTYLAFDSLAQAGIEVYYNETKNCFAFVPIPSVCYNLKTRKVNRKHKLYKRYKELNLKDYKVKYIVTLYNGNTIEVLKKDNTIIKGVVSSYHKTNDKIVLKNGSYFTKSDLEFSIIDYNPIGKSQKRLTKRIK

SEQ ID NO: 5800 - protein, 1091 aa, synthetic construct
  REGION 1..1091: note = Synthetic
MKYIIGLDLGINNVGWSVVNAETNEIKSYGVKKFSISNGASDRRNFRNSRRRLKRKDTRKEDILKILNSINFPNNLTIDTKLIETRCKGLNEKISKQDITNILTYMAVHRGYIPYGDEEVSFVDLKGKYPCEYYRDKFLNSINNKYRAQRETVTSKDNEKEIRKVLKTQQEYYPEITEDVIERIIQTLNRKRKFWEGPGGLNSLTNFGRFKTEEDVTKYKEQKDINPEYEKYIFEDLIGRCEVDPDEKCASTDNFYAEKFNLLNDFINVSFLNIDEINNKEDFYLTNNKTYKLKESGLNRVFKYCLDKENVTIKGLLKDLFATTVNNMSGYRQKDHDSNKPDMSTMNTYRSIKKIFAKNNANMEIFKLENIDKYNEIINYFMLVPGNVELINMISSMVMPLYENDKDALKETFKSKRKKLRYHALCEKVLKRACNDMLSLQKNYMQVYKLKDYGKKSREIFIERYEKQNKGKLILNSSFIDDIVASPQVKKTLRQAEKVINEIVKDMKSLPYAIAIESAKEELSGNDKRNMYISMNKKNKELHDKAEKTLKSLGYDINQITKKKITKIMLYEEFNGLCPYCNKSININYLINGSDEIEHILPRSDSFNDSLDNRTISCADCNSKKENRTPLQYLNGSDKESFINRIKSNKNISELKKENFLFYGDLSKYKTRFFNRNLRDTAYATKELVRQINIFNNYLEFKNNGKKILTMSTPGQLTHDIRERYNLEKDRDAGERPFHHAVDASILALLPTTSIGKKIMKFQNDANFFIQDNSKKIMQDIGIELKYYNTKDDKIEYDDYIKDLKEISDTNPKFMYSPEVNKDPNKKLFNANLYKVIKKEDKYYKIEQINDIYDYKVDLNLLEKLFDDSKNETLLCQSQHKEFYNKLKKIYEIYKDSDISPFEAYQREINNLSKEDEFDYITHGIRMSENGPVVKKLRYYTPINEPYLVNKKTINKKDTTYLAYDSLAQAGIEVYYNIDKNCFVFVPIPCTCYNFKTGKVNKKNNEYIKYYQKNIGTYNVQYKTTLYNGNTIEINKKDGSIIKGEVSYYHKTLDKIVLKSEQAFTKSDLGFSIIDYSPIGKCQKRLTFMIK

SEQ ID NO: 5801 - protein, 1090 aa, synthetic construct
  REGION 1..1090: note = Synthetic
MTKNYSIGIDMGVNNVGWSILNNDTKKLENYGVRLFPTSNDAKERREVRNTRRRLKRKETRLDDTLYLLKKYGFNEDNTIEENLIEKRVKGLNEKLEKQDIVNILCYMIKHRGYIPFGDEEVTLVDLNGKYPCEFYYEMYKNGGKYRNRKMTVRITDNEKEIKKILETQSKYYKNINQDFINKYLNILTRKRKYWEGPGSINDLTPFGRFKTQEDVENYLEEKRKNPSYEKYIYEDLIKKCDYELEERCCCKLNIYYELFNMYQDFINVSFKNIEELENKDCFYETKNGLYKLNKKGLLMVKDYCMNNFKLKYTDILKKLFNTDKDNISGYRIDKDHKPEFSTLNSYRKIMLEFTEKGFDTTWVSNYNCYNEIMEKMTLTPGGVEFIKEIENNKLVPYKFNEEEKSLFKELKEYFNKKTLLSYGSLSQKILQKAINDMLDLEKNFMQVSRIKDYGKEARENFIKQYKKTSNKLEINASFVDDIIASPQVKKSLRQAIKIINAIIEKEGCLPVSIAIESTKELNSDKKKKEIEKEQKIQENLRKQASNYLSVVFGDSNATETNILKIMLYNETNGHCAYCNKPLNINDIFTDNIQVDHILPISKSFNDSFNNKIISCKKCNDDKKNNTPYQFLKNKNYFEEFEKRVLENKNISDYKKDNLLYKDDLDKYKTRFFNRNLRDTAYATTELINQIEIFNNYLEILDKKRINTLSVPGQITSSIRNRYVKNEDKTSLEKNRDAGVFHHAVDASIVVSVSDTHIGQIMLKAQNDKEYWIKNKSGYDDIYKYLINLRIDDTINQIEKINNENIKISKQVSKNPQGKLANSNIYKMIKKDNEQYIINQIDNIYTFDFKKDENKKLFEKLLNEENNEFTLLCYDNDKNTFNYIKKIYNEYKNEKGNPFVNYLIDKGEISDGNSLDYDITGIRMVTKKGNGPIIKRLRYYSKKNDLYILNKKNINKKDSNYLALDSLKQFCVKVYVDNDNKKFVFLPIYTISLDPKTKKVNENDEFYKLFYNKYIGNKNVTFFADIYNGNKLEITKKDGTIVSGYYSTFHKTHNYLVLNNDKGVMQSDKKISIIHTDILGNEKKRLTKEL

SEQ ID NO: 5802 - protein, 749 aa, synthetic construct
  REGION 1..749: note = Synthetic
MIELGKRRKIMEKKYSIGLDLGINNVGWSIVDMDKKEIEKCGVRMFSVSKGAEERRNYRSSKRTKQRKNTRKKDILLLFESISFPNTNTIDPNLIEKRVKGLKEKIEKQDIVNILCYMVTHRGYIPFGDDDVEFIDLKGQYPCEYYYNLYTESINNQYRNTRKIVKINDNLKEIQKLLETQSKYYKEINQNFIEQIIGNEEKPGIFNRKRKFWEGPGSPKALTEFGRFKTQKDVEEYLNQKEKNPEYEKYIFEDLIKKCDIYIEERCAPKLNFYAEKFNLLNDFINISFKNIEELTNQDCFYQAKNGLYKLNRQGLEKVFEYIYNSDKVILKSLFKKMFNSDIDNLSGYRTDKNLKMEISTMNGFRSVKNSFKANKGNLNLIYDIDTYNKIINAITIAPGIVEIMRMIKNSNIEFTENDEKSIKESYKKLTDLSYHSLSEKALKRAIEDMLKYQLNFMQVSRKLDYSKKSRENFIQEYKRISTNQKLSNITNKFVEDIIASPQVKKTLRQSIKVINAIINEKGYYPDTIVIESAKEANGKQKKLELERIQRKNTELRKKAQKQLENLVPNKITSKNIEKVMLYEEIEGECPYCGNHLDIMQVINGVIEVEHILPKSKTFDDSYENKTLACSKCNAQKGNKTPLQWLNKTERIKFENIIKSNKNISEQKRANFLYADDIDKYIKYANNKLIELSKDEEIIYIDLYNILKNNSQVFTSVDSHYPNIDGYKLISREIIEKIEKKVIKTLKEM

SEQ ID NO: 5803 - protein, 1091 aa, synthetic construct
  REGION 1..1091: note = Synthetic
MAKNYSVGIDMGVNNVGWSILNNDTKQIEDYGVRLFPVSNDAKDRREARNTRRRLKRRETRLDDTLNLLKKYGFNEENTVDENLIEKRVKGLNEKLEKQDIVNILCYMTVHRGYIPFGDEKVTLIDLSGKYPCEFYYEMYKDSGKYRARNQTVKITDNVKEIKKLLETQSKYYGNITKSFIDDYVNIFTRKRKYWEGPGSVDDLTPFGRFKTEEDVEKYLEEKKNNPSYEKYIYEDLIKKCDYEIGERCCCKLNIYYELFNMYQDFVNVSFKNIDELENKECFYEAKNGLYKLNKKGLLMVKDYCMNNFNLKYTDIFKKLFNSDKDNISGYRIDKKHKPEFSTLNSYRKIMSEFTNRGFNTNWINDYNCYNEIMEKMTLTPGGVEFIKEIENNKLIPYKFSEEEKTLFKELKEYFNKNTLLSYGSLSQKVLQKAIDDMLDLEKNFMQVSRIKDYGKEARENFIKQYNSSGSDKLQINASFVDDIIASPQVKKSLRQAIKVINAIIEKEGCLPNSISIESTKELNSDEKKKEIEKDQNLQENLRKQASNYLSVTLGDKNCNESKILKVMLYNETNGHCMYCNKPLDINNILTDGVQIEHILPISKSFDDSFNNKAISCKDCNANKKNMTPYQYLNSSNRYEEFEKKVLDNKNISDIKKNNLLYKDDLDKYKTRFFNRNLRDTAYATKELINQIEIFNDYLEFKDEKRINTLSIPGQITSKIRKNYVKKDGKESLEKNRDDGVFHHAVDASIVVSVGNTRIGQVMLKAQNDKEYWINNKNSYDDIHKYLINLRIDDTIDQIEKINKDNTKISNQVSKNLQGKLFNSNIYKMIKKDNEQYIINQINNIYTFDFKKAENKKLFDKLLNEENNESTLLCYDKDRNTFNYIKKIYNEYKNEKGNPFVNYLIDKGEITDVKNFNYDITGIRMVTKKGNGPIIKRLRYYSRKNDLCMLNKKGINKKNNTYLALDSLKQHCVKVYVDNDKKNFVFLPIYIISLDPKTKKINENDEFYKLFYNKYIGNKNVTFFADIYNGNKLEITKKDGTVVNGYYSTFDKTNNKLILNNSSTFTQSDKKVSIIHTDILGNEKKRLTKEL

SEQ ID NO: 5804 - protein, 1098 aa, synthetic construct
  REGION 1..1098: note = Synthetic
MKLEEELMKKYIIGLDLGINNVGWSVVNADTNEIESYGVRKFNASNGASDRRNYRNSRRRLKRKDTRKEDIFKILNEIHFPNILTIDTRLIETRCKGLNEKISKQDITNILSYMAVHRGYIPFGNEEVNFVNLNGKYPCECYCDKFLNSVNNKYRAERETVTNKDNEREIRKILEIQQNFYPEITSEVIEKIIKILGRKRKFWEGPGGINSLTSFGRFKTEEDVIKYQKQKEINPDYDKYIFEDLIGKCEVDPDKKCASNGNFYAEKFNLLNDFINVSFLNIDEINNKEDFYLTKDKTYKLKESGLNKVFEYCINKENITIKGLLKDLFATNVNNMTGFRQKDHDPKKPDMSTMNMFRAFRKIFAKNNANMKIFDIKNIEKYNEIINYIMLVPGNVELINMVSSMVMSLTKNDERALKEIFKSKVKLKYHSLCEDILKRACNDMLSLQKNYMQVYKIKDYGKKSRELFIAKYDEQNKGKLQLNSCFIDDIIASPQVKKTLRQAEKIINEIIKDKKTLPYAIAIESIKEELSGNEKKKMYTDINKKNKELHNKAEETLKSLGFDTNQITKKKITKIMLYEEFDGVCPYCNKAININNLINGADEIEHILPRSDSFNDSLDNRTISCADCNRKKGNKTPLQYLTGSEKESFVNRIKSNKNISEFKKNNFLFDGDISKYKTRFFNRNLRDTAYATKELVKQINIFNDYLEFKNNIDKIMTLSTPGQLTHDIRDRYNLEKDRDAGEKPYHHAVDASIVALLPTTSIGKKILEFQNDANFFIKPNSKSVMLDIGKELKYYNTKEEKIEYDDYIVDLKRIDDINPKFMFSSEINKEPNKQLFNANMYKVIKKEDKYYKIQQINDIYDSKIDLDLFEKLFDDSKNETLLCQSQHKEFYNKLKEIYQKYKDSGISPFEAYQREVNNLSKVDKFNYLIHGIKMSENGPVVKKLRYYTPISEPYLVDKKTINKKDNTYLAYDGLSQAGIEIYYNIDKNCLAFIPIPAIAVNLKTRVINHNHPMLERYRKKYLKDSNAKRIVTLFNGNTIEIYKAKGGVIKGEVSSFDKDANRIRLKDRSSFVTSDRGFSIIDYNPIGKAQKRLTFMIK

SEQ ID NO: 5805 - protein, 729 aa, synthetic construct
  REGION 1..729: note = Synthetic
MEIFKLENIDKYNEIINYFMLVPGNVELINMISSMVMPLYENDKDALKETFKSKRKKLRYHALCEKVLKRACNDMLSLQKNYMQVYKLKDYGKKSREIFIERYEKQNKGKLILNSSFIDDIVASPQVKKTLRQAEKVINEIVKDMKSLPYAIAIESAKEELSGNDKRNMYISMNKKNKELHDKAEKTLKSLGYDINQITKKKITKIMLYEEFNGLCPYCNKSININYLINGSDEIEHILPRSDSFNDSLDNRTISCADCNSKKEKKTPLQYLNGSDKESFINRIKSNKNISELKKENFLFYGDLSKYKTRFFNRNLRDTAYATKELVRQINIFNNYLEFKNNGKKILTMSTPGQLTHDIRERYNLEKDRDAGERPFHHAVDASILALLPTTSIGKKIMKFQNDANFFIQDNSKKIMQDIGIELKYYNTKDDKIEYDDYIKDLKEISDTNPKFMYSPEVNKDPNKKLFNANLYKVIKKEDKYYKIEQINDIYDYKVDLNLLEKLFDDSKNETLLCQSQHKEFYNKLKKIYEIYKDSGISPFEAYQREINSLSKEDEFDYITHGIRMSENGPVVKKLRYYTPINEPYLVNKKTINKKDTTYLAYDSLAQAGIEVYYNIDKNCFVFVPIPCTCYNFKTGKVNKKNNEYIKYYQKNIGTYNVQYKTTLYNGNTIEINKKDGSIIKGEVSYYHKTLDKIVLKSEQAFTKSDLGFSIIDYSPIGKCQKRLTFMIK

SEQ ID NO: 5806 - protein, 1224 aa, synthetic construct
  REGION 1..1224: note = Synthetic
MNILSLDLGVTSCGYSVMQELEKNSYSLLDYGVVMRDNPHDSGTQQERREKKQSRNLLDKKKKRIKEIKQLFASYHLKYQEKKRYDIWKLRAVDAFKRKLDNDELYAIFRFMAKHRGYKSLKIEDLIAELEAKEKMGDCGSDEIQMPKDLEKFSETLAYLDALKCKYKEKTSAQIIWELESQKENPTFRNHGNYRYMIRREDIKKEIEKILGAQQKFDFFKSDELAAKFTNEVINIIIPQEAVTLNPENINKCLIYKDEICAPLFSYSFDIFELYKLLGDLKIDGADATLEQKEQLREALLEDINSLKCKSSYSVKDFKKILGIDNEYVKINNFQEYKMLKGKKEANTLVKFNFLPSFKKLNRKILSAILAQESSAKIFDEIATEIHLNINPEKLLINIEILFKKYNFEFTKDEICDFTLKLHKHKSKGTSNYSLKALKDLTALMQEGKNESDAKGILKVSKSENYSDFLKGIRYLKSQNKDGKLQYEIDENRISNHAVKSLVSWALRVITDLHVKHGPFDIIKLESTRELSQPDDVKNDIRRANQKNEKEWQELIEKYKKHFEAKGLNLQNNKEYLLKLKLWEQQKGLGIYSHKPLSIDEVLSDKTEIEHIVPRACGGSNAEYNKALDLKNENAKKGNKLPLDYLSGEKRKIYIDFVEELKKTYKINMKKKINLLAESLDKTFKEVKDDVSLHATSYTEKLLGEILKRYYPFTDRLKENQRVMSISGRATSYLRRILSVDNKSRDTNFHHAEDAILLGLMSKSYLQNISTNFEKNYELTEQNAKENFKKIVPLIEGTSPNHIIAHIRESYMQDIQESPFYKALDGTLKTPAFWVSKKPIGTKAHNETIQSKKNLAYYVPIGSLLDKVKPSHKMSSDEFYKKFNKEIYKKIQVAQDNPKDFTAKVFAKKRDAIVNILNQSAFAITKDDKAELDIKVRDTMNEPLYDVNGNEIRRVKRVGEDASIEVRGGLAYTAPSLVCLRCSFIDAKKLKLQRIDIRSYVKNKVSKHNQIDISKPLKKQLWQEVVKTKVKNQASVLNYFNRKKSSKILYEYAKGVKSNDEENVEAKAARIYWSELFENFVRVQKGAEDVQNASLNYCYAIVRSAVVRSLTNAGLMPSFGIHHQNYFNAFNLADDMIEPYRAFVDLHVKLTLLKYDDEALTSQIKQEYVNILNLEFVAINGGLSNIRTAIDMTVQSLQKCVLQKKILYLMLPSIDFEKYEDECL

SEQ ID NO: 5807 - protein, 1115 aa, synthetic construct
  REGION 1..1115: note = Synthetic
MKILSLDLGVTSCGYSVMQELESNSYSLLDYGVVMRDNPYDGGTQQERREKKQSRNLLDKKKKRIKDIKQLFTYYNLIYQEKNKYDIWKLRAIDTFERKLDNDELFAIFRFMAKHRGYKSLKIEDLIAEIEAKEKIGDCQSDEIQEPKDLEKFSETLAYLDALKCKNKEKTAVQIIWELESQKESPTFRNHGNYRYMIRREDIEKEIKIIIEAQQKFNFFDEKQKADEFTKKLQNIILPQEAVTLNPDNINNCLIYKDKKCAPTFSYSFDIFNLYKLIADLKIDGINAYDEQKEELLSTILNDIKKFTSKTSYSVKDFKKILGIDNEHVKINNFQDYKTIKGKKEQNSLIKFNFLPSFKKLNHEILNTILKEENFVEILDEIATELHLNINPQMLIEEIEKVLKKHNLDFTKDEIRDFTLELHKHKSKGTSNYSLKALKDLTALMKDGKNESSAKEILGVSKSESYSHFLKGIKYLKPQNKEGQLQYEIDENRISNHIVKSLVSWALRVITDLHDKYGPFDIIKLESTRELSQPDDVKRDIKSANDKNEKEWQNLITKYTKHFEAKGLNPKNNKEYLIKLKLWEQQNELGIYSHKVLGIDEILSDKTEIEHIVPRACGGSNAEYNKAIDLKDENAKKGNKLPLDYLSGEKREIYINFVEELKKSYKINMKKKINLLAESLDKTFKEVKDDVSLHATSYTEKLLGEILKRYYPFTDKLKENQRVMSISGRATSYLRRILSIDNKSRDTNFHHAEDAILLGVMSKTYLQNISTNFEKNYELTEQNAKENFKKIIPLIEGASPNQIFAHIRESYMENIEESPFYKALDGTLKTPTFWVSKKPIGTKAHNETIQSKKNLAYYVPVTSLLDKVKPSHKMSSDEFYQKFNKEIYEKIQVVQDNPNDYTAIAFAKKRDTVVNILNLSAFSSTKDEKTELDKKLRDVMSEPLYDVNSNEIRRVKRVGEDASIEVRGGLAYTAPSLVSLRCGFTGEKKLKLQRVDIRTYVKNKITQHHQMDIFNNDLVEIFVEKSKILESKAIGLLKGFTESKGGRSNLRHPKYPLLKEKQPFVFQNEFSIGSTCGIKKYKTDATGKVLGFYYLGKVLNNEKELFAKVLSYKAL

SEQ ID NO: 5808 - protein, 1111 aa, synthetic construct
  REGION 1..1111: note = Synthetic
MNRILSLDLGVTSCGFSVLDEVETNQYSLIDYGVVMRDNPNEGGTQSDWKAYIQQRKLKDKKKQRVKDLKDIFKSFNLNFVEKNYSNLWELRAKDSFERKLQIDELFAIFRYLAKHRGYKSLKMEDLIAEIESQEKIGNCESDDVIEPNSEEFTETLAYLDALKCKFKEKTVAQIIYDIESQKENPNFRNHNNYKYMIRREDTKDEIEKIVEAQKLFGFFKDEKEAENFKNSIIDEIIPQDPVLLNPNLINNCLIYKEEKSAPIYSYSFDIFNFYKHINDLKIGNKNATNEQKEILTNDFELKLKELKNISSYTIKGIKELLDIKDDIKISGLRETKIVKGKSVDNYLVKFNFLAHWAKFDKEIVVALKDKINYFDKIATIFHININPNALIEGFSKYFKENNLFFEEEKIKNFALSLYKNKVKGTSAYSFKALNDLIVHMKDGKNESDAKEILGVSKSEDYSSFEKSIKYLKPIDKNGTLRYEIDENSISNHVVKSLISWACRIIIDLHEKYGSFDMIKLESTRELSQPDEKKREIKSANDRIQKEWEDLKDRYKSHFEALGLNMGNNKEYLLKIKLWEQQGEIGIYSGQSLGIVDILSDKTEIEHIVPRECGGANAEYNKAIDTKNENAIKARRLPLDYLVEEKREVFLQNIDELKNSKKINFKKWLNLKAQTLDETFKEVKDDVSMHATSYTEKLLGEILKRYYPFTDKQKENQKVMHISGRATSYLRKILSIENKSRGTNFHHAEDAILIACMSKSYLQNISTNFEKNYELTRENAKDNFKKIVPFINGANPNEIFSYLQKSYTQDIEENPFYTNVIDNTLRIPAFWVSKKPIGTKAHNETIQSKKNLAYRVNIDSLLERVKPNHKMSAESFFEQYNKEILEKIQVFKDNPKDFTAQAFIKKRDNIIQLLQEANFITSKDEKADIDKKLRDEMKKPIEDVNGNTIRRVKRVGEDATIEVRNGLAYTAPSLVCLRCSFDEPKLQLQRIDIRSHVQNRNKNDTQIDIFNNDLIEIYVIKSKKIEYKAIGVLKGFTESKGGRANLRNPKYPLLKDKQPKLFQGEFSIGSTCGIKKYKTDASGRVLGFYYLGRVLEGDKEVFSKVVTYRKM

SEQ ID NO: 5809 - protein, 1114 aa, synthetic construct
  REGION 1..1114: note = Synthetic
MRILSLDIGSTSCGFAVLTEQGKHQYILHDFGVVMRDNPYEGGTQRERSGYKQMRQLIRKRKDRVSLVKQMFGEYGYDVEERGFTDLWKLRTVDAFERKLASDELFAILRFLAKHRGYKSLKIEDLIAEIEAQEKIDDCEIGKVEAPDVEHFSETLAYLDALKCHHKDKTAAQIIFDIEKEKKVPAFRNHDNYRYMIRREDVAKEIDMIINAQETFGFFGGKEETVKFTEAIKAIIIPQDPVVLNPDLINNCILYKEEKSAPVYSYSFDLFSFYQMVNDLKIDGKSATQEQKEKLIDEYTAKIKALKNIASIRVIDVKKLLGITNERIKVNNTAEYKTVKGKKEANTLRKFYFISKLSKFDHEIMQSIMQREEQLFDAMATIIHRNIDPNALLEGFYDLFKQVGLRFEKERIKTFALRLHKEKSGGTSAYSFKAFEALTALMKEGMNESSAKEILGIGKAEDYSTFPKGVKYLKPIDRQGTFQYEHDENRISNHVVKSLVAWVNRVVVDLHDKYGPFDVIKLESTRELSQPEEVKNKIKSANTKNQKEWEELAERYSKHLEVKKIPERDRNRSLLKLKLWEQQEQMGIYSLKPISIDDILSEKTEIEHIVPRACGGSSAEYNKAIDYKDVNMRKGNRLPLDYLEGDAEDAFIVFIDGLKEAYKINWKKWKNLKAETLDQTFKEASDEVSMHATSYTEKLLGEMLKRYYPFTEKLKENQRVLHVSGRATSYLRRILSMDNKSRDTNFHHAEDAILIGLMSRTYLQNISTNFEENYEQTELNAKENFKKIVPLIDGAVPNEVFAHLRESYMENIEENPFYIGLDGSLRAPAFWVSKKPIGTKAHNETIQSKKNMAYRIGVDALLDKVRPVHKMSAEAFTKAYDKEVYGKVQVAKDNPNDFTARAFVEKRGKIVAMLNEAAFLTSKEEKADMDKRLRDTMREPIVDVNGNTVRKVKRVGEKVRYEVRGGLAAISDSMIAMRCHYTGEKYLQLDRIDIKDVSILKKNTANTLDIYSNDLIEVYVLEKKSVVLKKVGSLRSFVVKANGSKEIKLKNPKFPSVEEYQPPSYTSYFAIKKTCGLKKYKIDASGVVQGYYYLGKVIENGEELFAKVLTYKKV

SEQ ID NO: 5810 - protein, 1214 aa, synthetic construct
  REGION 1..1214: note = Synthetic
MTKLTFSFDAGTNSLGSAVIDKEAGKILHSGVSIFPMGVNLEKGTKEESRNLIRRLKRQGRRQNFRSRMRKEKLAQLLIAKRMFPDVDTLYQKYFEGDGQSFRDRWEKVIRMTPLPEELQDYFHKDPYQIRHRAFKEERLSLHEIGRALYHFAQRRGYKETLQDDSEEKGKIYQGDPESGKTGIDETKELVAQFGTLGNGLYHQDPHDKRHRNRYTLRSMYTNEFDTVFRGQQPYHPEVLTEELYQKLGGIHPSDTQQNGVLFYQRPLRSMKHLIGKCSLESGKPKAPASTLEFERFRAWQTINQIKFEGHELEEDEKRLLLDYILSAKKKLKFEQLAKKLKKPVERFNYEPKDSIAASPVHANFQSIFKKKWDQFSDKEREDLWHLKYWAEDPEWLEKQLEGKYGLSEEEIKAFKGFKMTKDYANLSRKAIKNILLFMEKGYRYDEAVLLAGVRNALKPEWFDELELYEQNEMEDRVLKAARRKEKGSTSIDRVRAYLSKEHEVDEKHLDKLYHHSMKEEGDGSMKYLPAPEELKNPIVMQALYQLRKVYNALVDEFGEPEEVRIELARELKTNKENRAKIRKRQQELEVENDEIKERLDKEGVPHSPANIQKLKLMKEIERIAGRFANPFRPDENFGITKSFFSEGAVQVEHIIPYSISMNDSLANKTLCDADTNRLKGNKTPYQYFKEHRPDEWEEIKQRIFKILPYQKAKRFVSEQNPDADDFISRQLNDTRYISRQAVAYLKKTCKKVEITEGSVVSMLRYYWGLDGVLTPSLTLEAPDGEYLAALDERDDIISHTVYHPQTKKKDTVALAKLGEVVHGQVKDGRFYLIKQRDDHRHHALDAIVVAFANRSYLQKVSTLLGEGLERKEIKYSRDHQLEKPWDRFYTDVRKAIENVLVHHQHNDRVVSKVKKRLYNHEGEVKRKPNGEEMFAEGLAARGQLHEESVFGMHAGENGELYFHKRDSLNSIKGYKQWRSIVSPRVREAIYERVKELYPKEKLVNGKLPETWSISDLDKEDQNHVFFITDEEKNPIPQIFLGNKSGEPVPVKKARFREKIGRPVQVKESINQYVKPGSNHHCMAYISAGNELQFEFVTFWDAVERKKQGAPLFQLPAGGKEVKNIFLRNRIYVLEIGSDELDELIEKEQYSAIGNYLYRVEQMSPASYYVQFRKHTAARLDNKNDWRGFSSAKAYGLLNPQEVTVDVLGRIKRR

SEQ ID NO: 5811 - protein, 1063 aa, synthetic construct
  REGION 1..1063: note = Synthetic
MNSPASNGLVFGIDLGIASCGWAVLRQPTPNHPTGAIEAIGSWMFDVPETDEKRTPTNQIRRSNRLLRRVVRRRAQRMAEIRRVFSEHSLLSSNDRDALKRTDIDPWEMRARGLDKPLAPAELAVALGHIAKRRGFKSAAKRQEANTAGDDQKTLKALETTKERLGRYRTMGEMFARDPDFQARKRNRDGIFDRTQSRDDLLDEVRKLFEAQRRLGNKLASEQLEEAFIAIAFHQRPLPDSERLVGKCLFEPTEKRAAKHAPSFEKFRLLTRLVNLRVTTDDGERPLTPDELAAATTDLGSNAKLSVKTIRRRINLPDHQRFTAIKPEDEGQDIVARTGEAMHGTKKLRDVLGEELWADLREQPAKLDHIAHVLTFFETAETIGDELQKLDLPAGAVDKLLESLQSFGRFKGAGHVSAKAVRALIPHLEAGLRYDQACEAAGYDHAASRWSKREQVTDKKSFNRLVKDMGEEIANPVARKSLTEGLKQLWAMRNRWGLPDAVHIEMARDVGNSLEERDKIKKRLDETTAQRERERKEAAEQLGVDPGDVGGDTLLRYRLWKEQGGRCPYNDIAIPSTAIAATDNSFQIDHILPWSRFGDDSFNNKVLCSAQANQEKRRDTPFEWITRTKGDEGWATFVKGIETNKQYRGFKKRNFTLKNAREAEERFRSRNLNDTRYAARLLAEAVKLFFPEGERQDRASSRRVFTRPGALTAALRHAWGIESLKKVDGRRVDDARHNALDALVVAAVGEGEINRLTRSFQNWEQRGLPRPLRRVDPPWGDFHSFRREVEEAFDAVFVARPERRRARGKGHEATIRQVKEREGETRVYERVPIAKLTEKRLEEIKDPERNSGIVASVKQWIANGRPKDSLPRSPAGDEIRKVRVLADRKYKNPAIPVRGGTAARSKMVRVDVFSKTDKRGRNKYYLIPVYPHQIMDKRRYPKPPMRAIVANKPEADWEQIDESFDFQFSLYPRCYLEVVKSDGTVFEGYFSGAHSGTGALTLFNPNNKNSYVDKSGRKMEGIGARTLLTIKKYSVDRFGNRFEVKSEVRTWRGAVCTSPTPRD

SEQ ID NO: 5812 - protein, 1062 aa, synthetic construct
  REGION 1..1062: note = Synthetic
MTDERLVFGLDLGIASCGWAVLRQPTHAGEASVIEGLGSWCFDAPENPKDRTPKNQERRGFRLLRRVLRRRCQRMADIRGLFHANGLLPSAEAQALHHPLDHRAPPHPFKKPSINPWDVRGRGLDEALRPLEFAVALGHIAKHRGFKSSAKRKTESPDDKKMLSALKITQEKQAPYRTVGEMFACDPDFQDRKRNREKRYDRTVGREDLTKEVTALFAAQRRFGQAFASPELEKAFTDIAFYQRPLQDSERLVGLCPFEPTEKRAAKRSPSFEKFRLLQRLVNLRVKTATGERALTPEEIARATADLGSVAKLTVKAVRKKIGLSEDEPFVGIPQDKPDQERDIAAGKGEAMGGTKALKNALGEDLWQKMLQHPDQLDAMARAFTFFESSASIAKELRTIPLEAGILEKLLAALEDGKLTDPFKGAGHISAKACRNLVPYLEQGLRYDEACAHAGYNHAASTLSQSEHVTTKAQFTALVADVTASIANPVARKALTEGLKQLWALRNRYGLPGAVHIEMARDVGNSAEKRGELDRKNKETQAKREKERGEAQELLGIANREDVNGDTLLRYRLWKEQNGRCPYTDQEIHPDQIAATDNSVQVDHILPWSRFGDDSFNNKVLCLAKANQDKGGQTPYEWFSRAKSPEDWLLFAQRIETNKNLRGFKKRNCLLKNADEVAQKFRSRNLNDTRYATRLLAEAVKLFYPVGERQEKGGHRRVFTRPGALTATLRHAWGLESLKKVNGERVEDSRHHAIDALTVAAVGEGEVQRLTQSFQQWEQKGLGRPLRHVTPPWPTFRDDVLKAYDSVFVARPERRRARGAGHKETIRQVWDSDQGPVVSERKDINELTAKNLDQIKDPERNAAIIESLKAWIEKGKPADALPRSPQGDVITKVRCVTTDKPGISVRGGTAARGEMVRVDVFSQADKKDRIKWFLVPIYPHQLIEKDSLPPNKAVVAHKDERDWTDIGPEHTFCFSLYDRSYVRTVDAKGKHVEGYLAGGVDRDNGKIRLFSNKSSSLSERVSTKTLLSIRKYTVDRFGQCAEVKREVRTWHGEVCTLPKPPD

SEQ ID NO: 5813 - protein, 1053 aa, synthetic construct
  REGION 1..1053: note = Synthetic
MTAVTESFLFGIDLGIGSCGWAVLRNTDTDNAIEALGSWCFDVPETNKERTPTNQIRRAHRLLRRVIRRRRKRMTDIRHLFETYGLLSSSKPDALHQPGLDPWEMRAKGLDRPLSPHEFAIALGHIAKRRGFKSSAKRAATNSSAEEGKMLGAVEKTKERLAQYRTVGEIFARDPLYGNRRRNRDGLFDRTMSRDDVLAETRTLFSAQRRLGNTATTKELEHSFIAIAFRQKPLQDSAARVGECPFEKGEKRAARFAPSFERFRLLCRLVNLRVTDGPIERPLTPEELRLSYEQAGKTRKLTVKKVRTLIGLRDDQRFTTIPPEQENHDIAARTGESFPGTATFRSILGETLWQCMLPHPEPLDEAAWVISFHELTDTIHEKLKTIGLPLEVLTLIIQAVDEGKFAKFKGAASLSDKAARRLIPFLEEGLTYDKACQKAGYNHAASQLSHYDTIDTKEKFNALLDDVRESIGSPIARKALSEGMKQLWAMRNRWGLPDAIYIELARDVSNSAEKRRDIEKGIQKNTAQRARERAEACELLGQDVISSETLLRFRLWKEQGGRCCYTDQPIAPETLIASDNSVQVDHILPWSRFGDDSYLNKGLCTAKANQEKKNQTPYEWIHQKKGPEDWERFKASVEGRKETRGLKKRNFLLKSSAEIEERFRSRNLNDTRYATRLMAEAARLLYPPGQRAEKGGIRRVFTRPGGLTAALRHAWGVESLKKIDGKRIRDDRHHALDAVVVAAVNEREIQKLTRSFQECEQKGLARPMRDVAPPWDNFRHDLEAAFKTITVVRPERRRARGEGHAATIYQVRQEGTKPVIYERRAIDKLKETDLTHIKDPERNAGLISVLRTWVEAGRPADKPPRAPTAEGKLGPEIRKVRVASTDKPAVLVREGTANRGDMTRVDVFKKYGKTGKVEWYLVPIYPHQIMNPTRWPHPPDRASAQNKPEEKWPQMGPDHHFCFSLYRRSYVRVIKRDGTIVEGYFSGLDRYSASFALSRTENPTSVTRSIGAKTLTSIQKYSINRFGELSPIQQEARTWHGAVCTSPAPPNSV

SEQ ID NO: 5814 - protein, 1048 aa, synthetic construct
  REGION 1..1048: note = Synthetic
MANIAENLVFGIDLGIGSCGWAVLNQKAKDENIVALGSWCFDVPETDKERIPTNQIRRANRLLRRVIRRRRNRMAEIRRLFASKGMLDTADPDALAKISADPWEMRAKGLDYQLTPQEFAVALGHIAKRRGFKSAAKRVSTNAPSEDSKMLAALEKTKEQSAQYRTIGEMFARDPAYADRRRNRDGCFDRTMSREDLFKETQILFESQRRLGNFSATSETEQAFIDIAFRQKPMQDSERLVETCLFEPDEKRASRFAPSFERFRLLCRLVNLRVTDGLEDRPLTPEELRLACEDAGKTRKLSVKKVRSLIGLRDDQRFTTIPPDQEQHDIAARTGDALTGTATFRAILGESFWRQLLPHPEQLDRAAWIISFHELTDTIISKLATIGLPSEVMELIRKALEDGKFSKFKGAASLSDKAARKLIPFLQEGLTYDKACQKAGYNHAASKFIHYDSIDTKAKFNSLMDDVRDSITNPVARKAISEGMKQVWAMRNQWGLPGAICIELARDVGNSAEKRREIESGIKKNTAQRERERQEAKEHLNQSDISSETLLRYRLWKEQGGRCCYTDQPITPSQLIASDNSVQVDHILPWSRFGDDSYLNKALCTAKANQEKKNRTPWEWIHNQKGVEAWNHFTAAVESRKETRGLKKRNFLLKSSKETEERFRSRNLNDTRYAARVMAEAVRLLYPSGNRAEKGGVKRVFTRPGALTAALRHAWGVESLKKINGKRLNDDRHHALDAAVVAAVSEKEIQKLTKSFQICEQKGLARPMRDVPMPWEGFRHQLETAYADIRVARPERRRARGKGHDATIRQLREEKDGPVVYERRAISDLKLTDLERIKDPERNSAIISSLRTWIEKGKPADYPPQSPKGDEIRKIRVMSRNKPAVSVRGGTADRGEMTRVDVFTKMGKKGKPEWFLVPIYRHQVIDRIQWPQPPNQAAANGKSEKNWPTMGLEHEFRFSLYPRSYVQIVKRDGEIIEGYFAGLDRTVAAFSLLSSSDPTSIQRGIGAKTLESIRKYNVNRFGDISMVEQETRTWHGDVCISPDQPDSA

SEQ ID NO: 5815 - protein, 1046 aa, synthetic construct
  REGION 1..1046: note = Synthetic
MIDESLTFGIDLGIGSCGWAVLRRPSAFGRKGVIEGMGSWCFDVPETSKERTPTNQIRRSNRLLRRVIRRRRNRMAAIRRLLHAAGLLPSTDSDALKRPGHDPWELRARGLDKPLKPVEFAVVLGHIAKRRGFKSAAKRKATNISSDDKKMLTALEATRERLGRYRTVGEMFARDPDFASRRRNREGKYDRTTARDDLEHEVHALFAAQRRLGQGFASPELEEAFTASAFHQRPMQDSERLVGFCPFERTEKRAAKLTPSFERFRLLARLLNLRITTPDGERPLTVDEIALVTRDLGKTAKLSIKRVRTLIGLEDNQRFTTIRPEDEDRDIVARTGGAMTGTATLRKALGEALWTDMQERPEQLDAIVQVLSFFEANETITEKLREIGLTLAVLDVLLTALDAGVFAKFKGAAHISTKAARNLLPHLEQGRRYDEACTMAGYDHAASRLSHHGQIVAKTQFNALVTEIGESIANPIARKALIEGLKQIWAMRNHWGLPGSIHVELARDVGNSIEKRREIEKHIEKNTALRARERREVHDLLDLEDVNGDTLLRYRLWKEQGGKCLYTGKAIHIRQIAATDNSVQVDHILPWSRFGDDSFNNKTLCLASANQQKKRSTPYEWLSGQTGDAWNAFVQRIETNKELRGFKKRNYLLKNAKEAEEKFRSRNLNDTRYAARLFAEAVKLLYAFGERQEKGGNRRVFTRPGALTAALRQAWGVESLKKQDGKRINDDRHHALDALTVAAVDEAEIQRLTKSFHEWEQQGLGRPLRRVEPPWESFRADVEATYPEVFVARPERRRARGEGHAATIRQVKERECTPIVFERKAVSSLKEADLERIKDGERNEAIVEAIRSWIATGRPADAPPRSPRGDIITKIRLATTIKAAVPVRGGTAGRGEMVRADVFSKPNRRGKDEWYLVPVYPHQIMNRKAWPKPPMRSIVANKDEDEWTEVGPEHQFRFSLYPRSNIEIIRPSGEVIEGYFVGLHRNTGALTISAHNDPKSIHSGIGTKTLLAISKYQVDRFGRKSPVRKEVRTWHGEACISPTPPG

SEQ ID NO: 5816 - protein, 1050 aa, synthetic construct
  REGION 1..1050: note = Synthetic
MIDESLAFGIDLGIGSEGWAVLRRPIMDAPGVIEGLGSWCFDVPETDKERTPTNQIRRGNRLLRRVTRRRRKRMTEIRQVFHAHGLLSSLKPEMLKGQKPGLNPWELRARGLDKPLKPVEFAVALAHIAKRRGFKSAAKRKAANTSGDDKKMLAALEATQERLARYRTVGEMFARDPDFAARRRNRDGVFDRTASRDDLFHEVGSLFAAQRRLGQDFASPELEEAYKVIAFRQKPMQDSEKLVGACIFEPDEKRAAKLAPSFERFRLLTRLINLRVRRADGREEPLSPDELARATSDLGKTAKLTAKKVRSLIGLAGDERFTTIKPEDEGRDIATRTGEALPGTAALRKALGETLWAQMRDRPDQLDDVAHVLSFFETNDTIAAKLAELGLEAAVLDALLAALDDEKALFAKFKGAGHISAKACRALLPHLEQGKRYDEACALAGYNHAVSGLSDRDAVTTKAQFNDLVKEVGESIANPIARKALTEGLKQLWAMRNRWGLPGSIHIELARDVGNSIEKRREIESEIDKITAQRERERKEVAELLNLTHVNGDTLLRYRLWKEQGGKCLYTGKDIHITQVIATDNSVQVDHILPWSRFGDDSFNNKTLCLAGANQQKKRATPYEWLAGQGADAWEAFVERVETNKQLRGFKKRNYLLKNAEEAAKKFRERNLNDTRYAARLLAEAVKLFYPVGERAGKGERRRVYTRPGALTAALRQAWGLESLKKINGERVRDDRHHALDALTVAAIGEGEVQRLTRSFQEWEQQGLGRPLRRVTPPWDGFRNDVLAAYEKAFVARPERRRARGEGHAATIRQVAMRDGETIVFERKAVTALKEADLDRIKDPERNHLIVAAVRAWIAEGRPADKLPKSKQGHMIAKVRLAAKNKAAVMVRGGTADRGEMVRVDVFTKPNRKGKDEWYLVPIYPHQVMNRQAWPHPPMRSVVAYKDESEWTQIDAGHTFRFSLYPRSYVEVAKSTGEVFEGYFSGLDRSTGAISLDSWNDPTTAIRGIGAKTLLSIRKYTVDRFGARFEVKNEVRTWHGEECISHNPPG

SEQ ID NO: 5817 - protein, 1060 aa, synthetic construct
  REGION 1..1060: note = Synthetic
MNSRISNGLVFGIDLGIASCGWAVLRHPTQADSTGEIEAMGSWMFDVPETDKERTPTNQIRRGNRLLRRVVRRRAQRMATIRRLFKKHGLLPSDDRDSLKRADTDPWELRARGLDQPLKPAELAVALGHIAKRRGFKSAAKRKEANTSGDDQKMLKALEVTKEKLGRYRTMGEMFARDPEFKDRKRNTDGQFNRTQSRDDLLHEVRKLFEAQRQLGNELASDALEAAFVNTAFFQRPLQDSERLVGLCLFEPTEKRAAKHSPSFEKFRLLTRLVNLRIATDDGERSLTPEELVAATSDLGSTAKLSVKTIRKRIGLPDGQHFTAIKPDDEGHDIAARTGEAMHGTKKLRDALGEEIWASLLEQPETLDKIAHVLSFFETAEAIGDELKRINLPAAASDRLLEALPSFARFKGAGHISAKAARALIPRLEAGLRYDQACEAVGYDHAASRWSRREQVVDKKSFNQLVKDMGAEIANPIARKSLAEGLKQLWAMRNRWGLPDAVHIELARDVGNSLEERNKIKKRLDDTTAQRERERKEAAEQLGIDPGDVGGDTLLRYRLWKEQAGECPYTGEHIPPSAIAATDNSFQVDHILPWSRFGDDSFNNKVLCVARANQDKRRDTPFEWIMRTEGEDGWELFATRIETNKQYRGFKKRNYTLKNAKEAEERFRSRNLNDTRYAARLLAEAVKLFFPEGQRQDRGGTRRVFTRPGSLTSALRHAWGIESLKKVDGKRVEDARHHALDALVVAAVGEWEVQRLTKSFQEWEQRGLARPLRRVEPPWGDFHSFRREVQEAYDTIFVARPERRRARGEGHAATIRQVKERDGVPVVFERKAVADLKEKDLERIKDPERNKAVIEAIRQWIADGRPVGALPRSPAGAEIRKVRLSTKGKPSVPVRGGTADRGDIVRVDIFSKPNTRGKDEFYVVPVYPHQVMDKKQWSRPPSRAVVAYKDEADWIEIESSFRFRTSIYPRSFLEVTKPDGEILSGYFQGMNRSTGAINLTNHRNSRLMLTDNGSKTESIGVKRLLTIKKYSVDRFGNRSEVKSEVRTWRGAVCTSPTPPD

SEQ ID NO: 5818 - protein, 1054 aa, synthetic construct
  REGION 1..1054: note = Synthetic
MSHQISESLLFGIDLGIGSCGWAVLERSGTDGAIKALGSWCFDAPETDKERTPTNQIRRTNRLLRRVLRRRRNRMADIRRLFTEHGLIGTSHPDALRQPAIDPWEMRAQGLDRLLTPQEFAIALAHIAKRRGFRSAAKRVGGNAPSDDSKMLAALAETRERSAQYRTVGEMFARDPAYVQRRRNRAGLFDRTMSRDNLEHETELLFSRQRALGNSVASADLEKAFALIAFQQRPMQDSGTLVAACPFEPDEKRSSRFSPSFERFRLLCRLVNLRVTDGPTERPLTSEELRLACETAGTTRRLTGDTVRKLIGLRDDQRFVTISPDQEKQDITSRTGEALAGTATFRKILGETLWRQLLPQPELLDQAAWIISFHELADTIIEKLGQIGLPAEAHALLSQTLLSDRNPFAKFRGASSLSDKAARALIPFLQQGLTYDKACEKVGYDHAASKLRSRETVDTRARFQTLMNDVRDSIANPVARKALNEGMKQLWAMRNRWGLPGAICIELARDVGNSLEKRREIEKNLEATTRQRERERQEIRDLLKIDDVPSDLLLRYRLWKEQEGHCCYSGKSIPPDLLMARDNRLQVDHILPWSRFGDDSYNNKGLCFAKENQAKKGLTPHEWIHGTRGQEAWDRFVATVETNRNLKGLKKRNFLLKSSKETEERFRTRNLNDPRHAARLMAEAARLLYPPGQRAEKGGKRRVFTRPGALTAALRHAWGVESLKKVDGKRLRGDRHHALDAAIVAAISEAEIQKLTKSFQENEQQGLPRPMRDIAPPWAGFREQLEGKYGSILVARPERQRARGEGHAATIRQVRNEDTGPVIYERKPVEKLTLTDLSNIKDPDRNAGLITSLRTWIEAGKPTDALPRTPCATADEGHVIHKVRLATRKKPAVPVRGGMADRSEMTRVDVFRVTGKKGKVAWYLVPIYRHQVMNRSHWPNPPDRAMASGKAEEHWPVMGPEAQFQFSLYPRSYVRLIKKDNTVTEGYFAGCDRSTAAIALADPANKKPPQKGIGTKTLDNIQKLTINRFGELSPVRKETRTWHGVVCTSPVRPD

SEQ ID NO: 5819 - protein, 1061 aa, synthetic construct
  REGION 1..1061: note = Synthetic
MTPISESLLFGLDVGISSCGWAVLKHSDTTGHIEALGSWCFDAPETKKERTPTNQIRRSSRLLRRVVRRRRNRMTEIRRLFARHGLIDNDRPDALHQPAIDPWEMRRRGLDHKLTPEEFAVALAHIAKHRGFKSSAKRVGSNASPDDSKMLAALEKTKKLSDQYRTIGEMFVHESAYVQRRRNRDGLFDRTISRDDLSKEVKTLFNRQDALGNPVASTEIEEAFTRIAFWQNPMQDSGVLVASCPFEPKEKRSSRFSPSFERFRLLCRLINLRVTDGPEERPLTEEELRLAYEHAGKTRKLTAAAIRKLIGLRDDQHFTTIPPEQEKQDITSRTGETFAGTATFRSVLGESLWRQLLPHPEWLDNAAWIISFHELTETIIKKLGEIGLPVEAYELICDALKSDKSPFAKFKGASSLSDKAVRALIPYLQQGLTYDKACQKAGYDHAASRFSGRATIDTKAKFNALMAEVRDSIANPIARKALSEGMKQLWAMRNRWGLPGAICIELARDVGNSLEKRKEIERNLKTTAKQRAREREEACELLNLKEVSSDILLRYRLWKEQGGRCCYSGKSITPDMLMAQDNRIQIDHILPWSRFGDDSYSNKGLCLAKENQAKKNQTPYEWIHGQGTTAQKEQWDKFVADVESRKNTKGLKKRNFLLKGSKEIEERFRSRNLNDTRYAARLMVEAARLLYPAGQRGEKGGTRRVFTRPGALTAALRHAWGVESLKKIGGERLHDNRHHALDAAIVAAVSEAEIQKLTKSFQECEQKGLSRPMRDVAPPWDGFRDQLKEKYETIFVARPERQRARGQGHEATIRQVRKEETGPVIYERKAVSALTLADLAKIKDPDRNAGLIASLRQWIEAGKPADKPPRTPCHQSAAGHEIRKVRLATIITPAVPVRGGMAKRGDITRVDIFKVIGKKGKPEWYMIPIYPHQIMNRSQWPAPPNKAVVEKKSEEDWPIMGAEAQFQFSLYRYSYVQLSNEKSVIKGYFYSCNRSKAYITLVDSTESTDSTDAAPSQKDKCIKTLEHIQKFSVNRFGELSPVKQETRTWHGVACTSPDQHD

SEQ ID NO: 5820 - protein, 1084 aa, synthetic construct
  REGION 1..1084: note = Synthetic
VASLPICRLQDQRSGTSGQGCFGEEQEWPMSGLVFGIDLGIASCGWAVLRLPAGEDQPGEIVGMGSWMFDVPETAEKRTPTNQVRRSNRLLRRVIRRRAQRMSGVRRLFRDSGLITEARADALAFANLNPWELRVQALERRLTEEELAVALGHVAKRRGFKSSAKGKSANTAGDDQKMLKALEATQERLARYRTIGELFVRDPGFAGRRRNRDGIFDRTQSRDDLVHEVAEIFRAQRRFGNSAASNDLEAAFTEIAFTQRPLQDAENLVGMCLFEPAEKRASRFAPSFERFRLLTRLVNLRIVSATGERPLTPAELAAVLANSGKTAKLSVKEVRKRIGLPADQRFSAFRLDEEDRDVAVRTGEAMAGTRKLREALGETLWEALLTTPHLLDEVARVLTFFETQEVIRRELGRLSLPDGAVEALVLGLEAGAFAKFKGAAGISAKAARALIPHLEAGLRYDQACEQAGYDHAASKWAGREQVTDRAAFNRLVADLAADVANPVARKSMTEGLKQAWAMRNRWGLPDAIHIEMARDVGNSAEKRREIERDIEKNTASRERERQEARELLGITDITGDTLLRYRLWKEQGGFCPYTDQAIPPAAINANDNSHQVDHILPWSRFGDDSFANKVLCTASANQQKKGRTPYEWFQASKSDEEWLVFVARIEGNAAFRGAKKRNYVLKNAKEAEERFRSRNLNDTRYAARLLAEAIKAFYPPGERQDRGGIRRVFTRPGALTAALRQAWGVESLKKVDGKRVDDARHHALDALVVAAVGEAEVQRLTRSFQEWEQRGLARPLRQVRPPWGDPASFRREVEDAYRDIFVARPERRRARGEGHAATIRQVRHRDGAAVVYERKAIADLKENRLEDIKDAERNEGVITAIRAWIARGRPVDDPPVGPSGQVIRKVRLRTKIKPAVEVRGGAADRGEMVRVDVFSRPNRKGKDEFYLVPVYPHQVMNPRQWPTPPDRAVVAYKDEEDWVRIDDAYAFQFSLYPRSLVQVVKGSGEILNGYFQGLNRSTGAINLANHRDTRSLMDDPGNSTQGIGAKTLVSLEKLSVDRFGGRARIRSEVRTWHGVACTSPAPPV

SEQ ID NO: 5821 - protein, 1051 aa, synthetic construct
  REGION 1..1051: note = Synthetic
MTPPIKDSLLFGIDLGIGSCGWAVLNQQPQINYIEALGSWCFDVPETDKERTPTNQIRRTNRLLRRVIRRRRNRMAEIRRLFAEHHLLNDAHPDALRRTGVDPWEMRAQGLERPLTAEEFATALGHIAKRRGFKSAAKRAKSNASAEDGKMLAAIEKTKERSAQYRTIGQMFARDPDYTQRRRNRDGFFDRTMSRDDLLHEVTVLFKEQQRRGNHFATPELEKAFIDIAFRQKPMQDSSTLVGDCPFEPGEKRSSRFSPSFERFRLLSRLVNLRLTDGPEERRLTTEELRLAYEKAGTTAKLSVTRLRELLSLRDDQRFTTILPTNETEDIACRTGGSLTGTKAFRSVLGDSLWEQLRPYPAILDQAAWIISFHELAKTIAEKLKTIEGLPQEAYTLLCKAVEDGKFAQFKEASSLSDKAARALIPYLEQGLTYDKACTKVGYDHTATALRQHDTIDTKAKFKALMEEVRDNITNPIAKKAVTEGMKQLWAMRNRWGLPGAICIELARDVGNSLEKRREIEKNIEATTKKREKEREEIRELLSIKDVPSETLLRYRLWKEQGGRCCYTDEPISPHQLISDDNSVQIDHILPWSRFGDDSYSNKSLCSAKANQEKQNRTPYEWLHGIKGQDEWDRFTASVESRKETKGIKKRNFLLKGGKETEERFRSRNLNDTRYAARLMAEAARLLYPAGHRGEKGGKRRVFTRPGALTAALRHAWGVESLKKIDGERLPDDRHHALDAVVVAAVSEGEIQKLTKSFQKCEQQGLPRPLRHVPPPWETFREDVKAAYHTIRVARPERQRARGEGHAATIRQLRQEESGPVIYERKAIEALKLTDLAKIKDPERNEGLITALRHWIEAGKPADAPPRTPCNIAGAGHEIRKVRLATNKKPAVPVRGGIADRGDMVRTDIFTRRNKKGKTEWFMVPIYPHQIMNRTQWPTPPNAAVIRKPEEQWPEMGPEYTFQFSLYPRSYIRLFKKGVVIEGYFAGSNRSTASIAVCDANDKTDCQTGIGIKTLDLIQKYAINRFGELSPIKQETRTWHGVACISPAQPD

SEQ ID NO: 5822 - protein, 1483 aa, synthetic construct
  REGION 1..1483: note = Synthetic
MTKILGLDLGTNSIGWAVVESENNTSFELLNKGVRIFQEGVKIEKGIEGSKAAERTRYRSARRIKFRRKLRKFKTLKVLSENGMCPIPMDELLRWRKHKDVETGHQTTFKMYPISPAFIDWQRTKDEKDGSKIKNPYYYRSLTANQKLDWSNQEDRYKIGRAFYHIAQRRGFLSNRLDGNSDDRMDAIRQELLTKIDEVYVDVAELKLTLSFTFNDDEQEPKIKSLKRQINAICEKHDQMNLAKEDVVNLLNKRENKGKVKQAIDELSEKIEQVGSKTLGEYFYTLYKKGEKIRDQYTHREEHYLHEVNTICKMQQLPSGIVSSINKAIFYQRPLKSQKGLVGKCPFEKKKTRCAVSHPSFEEYRMLCFVNNIKIQTPEDEKLRPLNDDERARIIPRFYLKKDNFDFEDLAKQLAPKKQCKFHKDGTKAPGDFLFNYSMHTTVSGCPVSARLLSIFGNGWKELKIEYVREKDKKISNIDIDDVWHVLITSDSDQKLVDFARNRLHLGEEKIKEFIKIKVKHDYAALSLKAIRKILPYLQEGLIYSHAVFLAKMEDIIPVKIWADKSNQKFIRDEIHQIILTQNEEKQIAEIVNGMIKNCHENHWTWSKESETGHYNDLMLRINTYFGKNKWASFTPEIQNRVIESGFTLFKKHLGDSSFVKPSRIDERVKAFLIDNFDLESEKLDLMYHPSALDVFKPPIKGDDGKEYLGSPMVTSIRNPMAMRSLHQLRKLINELIKEEIIDRSTKVNIEMARDLKNANERKALLAWQRDREKIHKEYAERIKEYFEKESWNMVPSQSDVLKYQLWEEQNHICLYTGANIAISDFLGKDPRFDIEHTIPRSQSFDNSQENKTLCDNRFNRQVKKNKIPQDLSNIEEVLSRIVHWKERFIILEKQIEMLVRKSKGATTKELKDKAIENRHRLTFERDYYKNKYRRFTMKDVPEGFKNSQLVDTGIITKYSRLYLKTLFDRVYTVKGNTVADFRKIWGLQDEYEKKARGNHIHHCIDAITIACITKQNYEALAKYYHEIEDQNDRGIASKPKVDKPWPFFSKDLKEIENQLLVSHHTPDVLPKQSKKKLRKRGKIQRNLKGETKYQQGDTIRGSLHQETFYGAILRPKKDNKGKHVYDLNGELDFETNSNGDKVFYVTRKNVEDIKKGDVDKIVDEAVKKIIIDAIKNKLIVITPENQKNKINETVWMNKEKGIKINKVRCLHTLKNPLKIKEHRDTSKKKHKQHYYTGNDKNYLMAIYEGINSKGKIDRDYKIINNMEDGEFFKSSVYKNLKSQGLNQLETSLLSHEKDSYKIYQIIKPGKMALLWKHFPSEIWELDEVQLKNRLYKIRGVDKDGIKLYYHQEARPGTELIKYMNEIIRKGFVDEGILDTKKVMDMLKETGSPIDNQKDISPYAEKSVNGQWLIKDKLGSVILSLNDIENLIKESKLTTPKGGDIVDKGVDFPYVKFKPSNFNALLEGVDFKISALGIITKLK

SEQ ID NO: 5823 - protein, 1409 aa, synthetic construct
  REGION 1..1409: note = Synthetic
LQNKIITFITKSRIKVYKSESIMARILGLDLGTNSIGWAVVDKDGDKFQLIDKGVRIFQEGVKIEKGIESSKAAERTGYRSARRIKYRRKIRKIRTLEQLSKFGCCPNLTEEELSLWRYKKVYPENDSFKNWWRTDENKNITPYYFRNLVVTEKLDLDVEENRFKIGRALYHICQRRGFLSNRLEGTKESDGAVKKAIKNITEEKGELTLGQYFYDKYLNREKIRDIYTHREEHYLSEFNKICEVQDLPKEFVGAVKDAIFYQRPLKSQKELIGKCVFEKNKQRCAISHPLFEEYRMLCFINNIKIKTPNDEKLRFLNSGEKQKILPQFFRKSKDHFDFEDLVKQIAPKKQYCFYRARNKKPEYYQFNFSMKTTVSGCPVSARFKSLFGDAFIDSEFNYKLNDDGNLPKSIQEAWHVLLTFDSDVKLNEFAVEKLNFDDEQQKEFSKIKLKLDYSSLSLKAIKKILPYLRVGMIYSHSVFMANLDTVIPKEKWSDPSVQKDISDEIKTLLSTQNEEKQIVEIVNGIIKTCRENGECWSNEAKEYFVKDILKHLKAFYGANKYASFSEDKKGRIEYRLLKLLEVQMRKNNDRGEFAKIETIDEKLKAYIIEKFDVSKKDLENIYHPAAIEVYKKPLRNVDGNLYLGSPMVSTVRNPMAMRALHQLRKVINELIKNEVIDSNTKVNIEMARDLMNANERKAYQRWQSDNEKQRKDYFDRIKEYYVSQKMNTEPSADDILKYKFWEEQNHKCLYTGKEICISDFLGANPKFDIEHTIPRSLSFDNSQVNKTLCDSSFNRSVKRNKIPFELSNHNEILARIEKWKEKYENLEIQIAIAVRQSKNALDKDAKDRAIQKRHKLVFEKRYWREKYGRFEMEDVPSGFKNSQLVDTGIITKYSRMYLNTVFDKVYTVKGNTVADFRKIWGLQDEYEKKARVNHIHHCIDAITIACISKENYERLAKFYHDYEEMNIRGAETKPDFEKPWSTFTEDVKKVEKEVFVSHYTADDLPKKSKKKLRKRGVIQKNSKGEVIYQQGDSVRGSLHKETFYGAIAQNKNGEIIRNASGQVIPNFVVRKAIVDLKKVEVEKIVDKAVKEKVQAAIKAKKIVFANSDTANNKILETIWMNEGKKIPIKKVRIFQSQVKDPLKVKKHRDISLKDKYLYKENYYAVNGGNYLMGIFEGENNKGKIIRDYKIINNIEAANIYKKTSENDLAGLLDGYTDVDILSVFNENMSLLQVIKPGNVVLLYKESPDEIWSMDNIEMQERLYIVRGVDSDGIKLYFHKEARPTTDVIKAMNNQIDERYRDELLLDLKYTKKQLEKKGLVIQSEKEIRINAIQEGAKFEIYNVSNERLCSVDDINPFLKVSKLTTPKGGDVIGKCREFPYVKFKASNFNALIEGVDFRISPLGKITKL

SEQ ID NO: 5824 - protein, 1351 aa, synthetic construct
  REGION 1..1351: note = Synthetic
MIKFPTFNIIFFSKPFITTIIMAKILGLDLGTNSVGWAVVEKQDGEFSLLDKGVRIFQEGVKIEKGIESSKAAERTEHRSARRLKFRRKLRKVKTLKMLSEYGYCPPLTNEELDLWRYKKIYPQNVSFRNWWHTDEKSEKHPYFFRNLAITQQLDLTNEEDRHKLGRAFYHMAQRRGFLSNRLESTPENETGKVIGSIKELQKKKGDRTLGQYFYEDCYLKGEKIRDQYTHREDDYLDEFKRICAFQHIPEEIQQKLHRAIFYQRPLKSQKGLIGKCVFEPNKPRCAVSRPEFEEYRMLCFINNIKIKTPDDEKLRPLNTEERKKIIPQFFRKSKDHFDFEDLAKQLAPKKQYKYYRDRNKNPEDYLLNYSMKTTVSGCPVSARFKDLFGADFIDDDFSFVKDSNNRTPKLITDAWHVLYTFDSDKKLKEFALNRLNFTDEQCTTFLKIRLKQDFASLSLKAINKILPYLREGLIYSHAVFLANMEETVPVHIWKNEENRKVIRTAIKEIIENHSDNTTIVNMVNGFITNARRENEVWSEEAKQLYFNDLDRKIKTTFGAKRFENFSEYKKTNLINTAQQLITEFMPKNLGKGEHVKVDRLDEAVLSFLADNFGKENLNAKKLYHPSAIETYKPAKRGKDGRLYLGSPITSSVRNPMAMRALHQLRLVINELIKNGLIDTNTKINVEMSRGLLNANERTGLKRWQDDREKKRKEYVDRIKEHFSPDYQPSEDEVLKYQLWEEQRRICLYTGKPISIEDFLGADPKFDIEHTIPRSQSYDNSQENKTLCENEFNRKVKRNRIPYELTNHAEIIVRIEHWKEEIEKLEKEIQKAVRQAKGAVDKDQKDKAIQKRHQLSYERNYWQNKYKRFTMEEVPEGFKNSQMVDIGIITKYSRLYLKTVFSKVYTVKGNTVADFRKMWGLQDIYTKKARVNHVHHCIDAVTIACMDKSNYETLAKFYHDWEELYVAGVDQLPPVNKPWPTFTEDVKGVEKEILVSHHTPDVLPKQSKKKLRKRGKIQYNKNGEPIYQQGDSVRGSLHKETFYGAIEREILNKKGETEKQIKYVVRKPLDGLEDSAIKNIVDDRVREIVSHARKEEKEIQKQIDALLKQRRKAEENEEAEIDNKIAELKQQIVELYSLPNKNGAPVPIKKVRVYQTPKGILEIKKHRDCIKKHKANYLTETDDNYIMGIYEYSQNGKIKRKFKAYNNFTASNYLRSDIKKSLSPQGIGAISAMLPNNFINEKGIELKLKAALKIGTLVIMHMPDENLNDLTNWDDLQKRLYKVYGFRGDDGRIKLRFHNEARPDKEQEKPSSSFSLDIIHSKLIISLGNFHALIEGIDFKIDPLGNIKRIN

SEQ ID NO: 5825 - protein, 1346 aa, synthetic construct
  REGION 1..1346: note = Synthetic
MAKILGLDLGTNSIGWAVVEKEKNEDFKLIDKGVRIFQEGVKIEKGVEGSKAAERTAYRSARRLKYRRKLRKIEVLKVLSEFGYCPPLTNQELRDWRYKGIYPINQAFRNWQKTDEIVSKNPYRYRALAVESKFDLNNEVDRFRLGRAFYHLAQRRGFLSNRLETTKENDGTVKKQIEELNTAKKNNTLGQYFYNLYQKGIKIRGKYTHREKHYLEEFNRIIDFQQLPSEFVDKLHKAIFYQRPLKSQKGLVGNCPFEKNKPRCPVSHPRFEEYRMHAFINNIKLKTPDDDQLRYLNIDEKETIIPLFMRKSKEHFKFEDIAKRLTPKGAKYSYIKRKERSEADYLFNHDMRTSVSGCHTTAQLIAIFGANWEQELVNSYTLKEQKTGLKSTEEIVTDIWHVLFSFDKTEKLVEFAQNRLRLDEQKIREFSKIKLKHDYGALSLKAIRKILPYLRQGLIYSHAVFMAKLEDLVPKNIWSQEENRKLIQDEILHIIQSQSREKQLADIVNGIITMSRREDISWSDNEFWQANLQKDLLKKLKAVIGNKTWEEYPETEKEAYQQKVYELVKQQMSNNLGRGEYLKSKRTDERIRNFITDQFDVDAKQLEQMYHPSAVEVYRKASKAADGNYYLGSPLISAIKNPMAMRALHQLRKVVNELIKNRVIDSDTKINIEMARDLKNANERKALQRWQNKRRDKRKEYQEELRRDYLAATGKEMEPSGNDILKYQLWEEQKHICLYTGENIGLTEFIGDHPKYDLEHTIPRSLSFDNSQENLSLCNSHYNQKIKRNRIPSELPDHETILQRIEHWKKYIEEAKEGVEKAVRQSRANADNKEVKDAAIQRRHLHQLNLDYWKSKYHRFEMKEVPEGFKNSQLVDIGIITKYARLYLKTVFNHVYTVKGKTVADYRKLWGIQDEFVRKERINHIHHCIDAITIACMSKEAYEQLANAYHEWEELEQMQATDMPQVSPPWPNFASDLKSIENEVFISHYTPDVLPKRTRKILKKRGQVVRDKKGNSIIVKGDSVRGALHKDTNYGAIKQEEINKKGEVTEKTVYVVRKPIDALTPSDVQNIVDDNIRSIVEKGKKEESKLRKDLEKAQKQLRDAEKQEQLTNCQQTVDQLLDQLSKIYAIPNKDGSYTPIKKVRCKATTVTNPLKIKAHRDQSKKEHKQYSYFVNDGNYAMVVYEGLNKKGEIKRDFSIVNNLEAGKYFNTKESVNPFPNQHPKSKKYLKYILKTGSVVLFWKDSPAELKKTATESVLLLYKVVKMNKDGRITFKFHQEARNDESLKTDYESKYGEKAPKSLTNGVSTVNFDFPAPKLLLSPSKFNFLVEGYEFKISATGKLEWLN

SEQ ID NO: 5826 - protein, 1343 aa, synthetic construct
  REGION 1..1343: note = Synthetic
MAKILGLDLGTNSVGWAVVEKQDGEFSLLDKGVRIFQEGVKIEKGIESSKAAERTEHRSARRLKYRRKLRKIETLKALSEYGYCPHLASEELDLWRYKKIYPKNISFRNWWHTDEDSEKHPYFFRKLAITRQLDLNKEENKYKLGRAFYHLAQRRGFFSNRLDSTPENETGKVKSSIKELQEKKGDRTLGQYFYDDCYLKGEKIRDQYTSREDDYLDEFKRICAFQNIPEELQQKLHKAIFYQRPLKSQKGLIGKCVFEPTKARCAVSRPEFEEYRMLCFINNIKIKTPDDEKLRILNAEERSKIVPRFFLQREHFDFEDLAKQLAPKKQYKYYRDRNKNPEDYLLNYSMKTTVSGCPVSARFKDLFGGEFIDEDFNYIKGGNNRTPKFVSDAWHVLYTFDSDKKLKEYAQKHFDFSEDKMTLFSQKIHLKQDFASLSLKAINKILPYLREGLIYSHAVFLANMEETVPAHVWKNEENRKIIRTTIKEIIENHSDNTTIVNMVNGFITNARRENEVWSEEAKHLYFNDLDRKIKTVFGAKRFETFSEYKKNNLINTTQRLIAEYMPKNLGKGEHVKAERLDEAVLTFLGDNFGEENLNAKKLYHPSAIETYKPAKRGKDGRLYLGSPMTSSVRNPMAMRALHQLRLVINELIKAGTIDSNTKINIEMSRGLLNANERTGLRRWQDDREKKRKEYIERIKEHFSPDYQPSVDEVLKYQLWEEQRRICLYTGKPINIEDFLGSDPRFDIEHTIPRSQSYDNSQENKTLCENEFNRKTKRNRIPSELPNSAEILVRIEHWKEEIEKLEKEIQKAVRQSKGAGDKDQKDKAIQKRHQLSYERNYWKNKYKRFTMEEVPEGFKNSQMVDIGIITKYSRLYMKTVFPKVYTVKGNTVADFRKMWGLQDIYTKKARVNHVHHCIDAITIACMDKSNYETLAKFYHDSEDAFERGHEAKPEVEKPWLTFAEDVKDIEKEVLVSHHTPDVLPKQSKKKLRKRGKIQYNKNGDPIYLKGDTVRGSLHKDTLYGAIKREETNKKGEIEEKIKYVVRKPLDMVEDSNIKNIVDERIREIVANARKEEKNLKKEIEALKKKLQKAEEREEAGLKQDIATIEEQIRLLYSLPNKNGTPVPIKKVRLLQPSVTNPLRIKKQRDKSQKNPKPWKEDYFATNDGNYMMAIYEGKDKKGKLKRDFEIVNNMQAGEFFKYSVQNILKAQELGEADSLFPQKKIAGKIDLPFKAIIKVGTMVMLWENTPDEVWDISAEEIKRRMYKVVGLSQQIIQGKYFFATIIMRFHQEAQPTTELKVKDGAFEMNENFKPYRKMNHNQFNALIEGVDFELTPLGKIKRLK

SEQ ID NO: 5827 - protein, 1339 aa, synthetic construct
  REGION 1..1339: note = Synthetic
MPKIMAKILGLDLGTNSIGWAVVTKDDGKYSLLNKGVRIFQEGVKIEKGIESSKAAERTEHRSARRIKYRRKLRKIETLKVLSEYGYCPKLTKEELDLWRYKKIYPRNVSFLNWWLTDENNNKHPYYFRYIAITQPLNLEDEADRHKLGRAFYHMAQRRGFLSNRLDSTPENETGKVKRSIKELQEKKGDKTLGQYFYEDCYLNGEKIRDQYTHREDDYLDEFNRICAFQNIPDEVRGKLYKAIFYQRPLKSQKGLIGKCVFEPSKPRCAVSRPEFEEYRMLCFINNIKIKTPDDEKLRPLKADERSKIKPRFFLQREHFDFEDLAKQLAPKKQYKYFKDRDKNPEDYLLNYSMRATVSGCPVSARFKELFGSEFIDDDFFYVNDDNDKTPKKFSDAWHVLYTFDSDKKLKEYAGKHFDFTEEQTILFSEKIRLKQDFASLSLKAINKILPYLREGLIYSHAVFLANMQEIVPAHIWKDNENKKIIRNVIRELIENHTDDTTIVNLVNGLITNARRENEIWSEEAKPYYFKELDKKIKAAFGTKEYDGFPEEKRNLLTKKAQQLIVEYMPKDLGKGEHIKAERIDEAVISFLKDNFGEEIINSKKLYHPSAIETYKPAKRGENGKLYLGSPITSSVRNPMAMRALHQLRSLTNELIRDGIIDTNTKVNIEMSRGLLNANERAGLKSWQDARKKKRREYAAKIKEHFSADYEPLEDEILKYQLWEEQNHICLYTGNTIGLEDFLGADPKFDIEHTIPRSQSYDNSRENKTLCENKFNRSIKKNKIPSELSNHSEILARIEHWENEIEQLNKEIEKAVRQSKGATDKAQKDRAIQNRHRLTNERNYWRNKYKRFTMEEVSVGFKNSQMVDIGIITKYSRLYLKTVFPKVYTVKGNTVADFRKMWGLQDNYNKKSRVNHVHHCIDAITIACMDKSNYEILANFYHDSENAFERGSEAKPKVDKPWSTFAVDVKDIEKEILVSHHTPDNLPKLSKKKLRKRGKIQYNKSGAPIYLRGDSVRGSLHKDTFYGAIEREALNKKGEVEKQIKYVVRKSLDGLEDAAIKNIVDDKVRKIVSDARMQEKDLQKQIEALLKQRKNAEESEEAKIDDKIEEIKLQVAELYCLPNKNGAPVPIKKVRIYQPSVTNPLTDFKKHRDLSEKEYKQQYNVVNDGNHTMAVYEGFDRNDNIKRSILILNNLEAGKFYNGKLEESPFPDRHPKNGLYLKYLLKTGTVVMFWEKSPEELRSKAVDKIKRLYKVTKMSKNGQVTFKYHQEARNDENLKLDYEKEHGQKPPKSLTNGESFIDFINPFPKLLLSPPKFNFVVEDYDFRIKLTGELIWLDD

SEQ ID NO: 5828 - protein, 1309 aa, synthetic construct
  REGION 1..1309: note = Synthetic
MTRILGLDLGTNSIGWAVVDKEKNQFSLIDKGVRIFQEGVKIEKGIESSKAADRTKYRSSRRIKFRRKLRKIQTLKTLVEFGYCPGIDIEELNIWRYKKVYPQNEQFRDWWKTDDEHNINPYFFRNLVVTEKLDLTKTENRFKIGRAFYHISQRRGFLSNRLENTKESDGLVKSSIEEISLAKGDLTLGQYFYKKYISSEKIRDTYTHREEHYLEEFERICNFQGLPIEFVDKLRKSIFYQRPLKSQKGAIGKCVFEKKKARCAVSHPLFEEYRMLCFVNNIKIKTPNDEKLRFLNKVERAKAIERFFLKREHFDFEDIVKYLAPKKQYKFYKDRNINQEDYLFNYSMNTTVSGCPVLARFKDLFGETFIDERYNIIVSDHGDVAKNVQDAWHVLLTFNSEIKLKEFAINKLGLNDEQVSEFVKIKLKQDYASLSLKAIKNILPFLREGIIYSHAVFIANMKSALPKTLWIQPENQKEISDQIKIIINTQKDEKDLVEIVNGIIKTCRENGECWSNEAEIYFKQDLIKRLEGFYGKNKFNSFSEKFKTDVEDKSFRLLKKQMLLNNSRGEFAKVETIDERLKHYIIDTFKVGAENLSKIYHPSAIEIYKQPIRSEDGNIYLGSPMVSAVRNPMAMRALHQLRKVINELIKNEVVDQNTKINIEMARDLMNSNERKAYQNWQRDRENLRKTYSDRIKEYYRSQNINLEPSEDDILKYQLWEEQKHKCLYTGKEILLSGFLGANPKFDIEHTIPRSLSLDNSQANKTLCDNVFNRSVKKNRIPSELENHKEILSKIVDWRKKVEDLEEDISKAVRQSKNAADKDGKDRAIQKRHKLSYERDYWRNKYKRFEMEDVPDGFKNSQIVDTGIITRYARMYLNTIFDKVYTVKGNTVADFRKIWGLQEEYVKKERINHIHHCVDAITIACITKENYENLAKFYHEWEELEHAGVKTKPVFEKPWRTFTEDLKTIENEVLISHNTSDVLLKQTKKIKRKRGIIQRNADGKVEFEKGNTARGSLHLETFYGAIERPIIDENGKEERQIKYVLRKSILKLKLNEVDKIVDEIVKEKVKNSIADNTLIITSGENQQNILSNTIWMNEEKRIQIKKVRIYQAAVTNPIKLKKNRDKTVKQRKEYKEYVNVLNEENYALGVYEAIVKDKVKKRFEALSNFKASSALEFKIDKGLFKSKILFEQSKIINGREYKLKNIIKVGNLVILYENFPEEIWDLDLDTLSKRLYKVYGFRGDDGRVKLRHHQEARPDKDQDKAVSQIDFNKSNSKLIISLGNLKCLVEGIDFVMSVTGKIEQKNINIC

SEQ ID NO: 5829 - protein, 1314 aa, synthetic construct
  REGION 1..1314: note = Synthetic
MRKILGLDLGTNSIGWAVVETEDNKSFELKEKGVHIFQEGVKIEKGIEGSKAEERTNYRSARRLKYRLKLRKISTLKELIKNDYCPKLTEQELNDWRFKKNYPENEDFRKWLLTNENKNPYFFRNIAVTEKLDLSVRENRYNLGRALYHLAQRRGFLSNRLEGTKESDGTIKKAISELTEKKGDKTLGQYFYEKYNVGEKIRNHYTHREDHYLEEFNKISEVQKIDSNIKDAIQKAIFYQRPLKSQKGLIGKCPFEKNKARCASSHPLFEEYRMLCFINNIKIKTPNDEKLRFLGKQEKEKIAPLFHRKSKEHFDFEDIAKQLAPKMQYKFYKASQKNPEDYLFNYTMKTTVSGCPVSARFESIFGENWKELKIEHKRKKDDSTSIINIYDVWHVLFTFDNDDKLEQFAMNKLGLKDEKLKEFINLNLKHDYSSLSLKAINNVLPYLREGLIYSHAIFLANMSDAISKEIWSQEENRTLIQKEVLELIQTQNQEKLIIDVVNGLIKKCRENNWYWSEKARLQFEKDIEKNIISVFGKDFWSKYDEEKQKNILDYAINHFQIQIQKNNGKGEFLRVETIDERVKNFLENNFDVDKEDLEKLYHPSAIEVFKQPIRAEDGRKYLGSPMVSSVRNPMAMRALHQLRKLINELVKQDIVDEGTKINIEMSRDLKNANERKALQSWQRDRENLHKEYYERIQEQFNSSGIKREPSETDILKYQLWEEQEHKCIYTGESIGISDFLGNNPSFDIEHTIPRSLSFDNSQQNKTLCQNRFNREIKRNKIPSELANHSEILGRIDKWKEKYEELDNKIQKLRKVTTSDKISKDRVIQIKHKTTFERDYWKNKYERFTMPEVKSGFKNSQIVDIGIITKYSRLYLNTLFDKVYTVKGNTVADFRKIWGLQDEYKKKARINHVHHCIDAITIACITKQNYENLAKYYHDSEEMFISRSDKKPQVPKPWETFTEDVKEIEKEVLVSHHAPDNLHKQSKKKLRKRGVVVKNKDGNIIYQKGDTVRGSLHKETFYGAIKREVVNKEGEKEEKILYVVRKPLEYSDFGFKTVNDLNKIVDEGVKNIILTSVNEKGIKQALSEPIWMNEEKQIPIKKVRCYTPTVTNPIHLKNHRDVSKHDYKQSYHVTNDGNYLMAIYEGKDDKGKIKRDFEIVNNIKAGEYFKQSVRDALKAQGIEHLEGLIPDSKESGKLTLPLKYVLKTGTMIIFWENNPDEIWDLENEDIKKRLYKVVGLSINRIKSGNKYYEFGMAILRFHQEATPAGELKTIDGAFQKDESYISQRKLSHNQFNALVEGYEFKINVLGQIEKL

SEQ ID NO: 5830 - protein, 1343 aa, synthetic construct
  REGION 1..1343: note = Synthetic
MAKILGLDLGTNSIGWAVVEKERDCEFQLTDKGVRIFQEGVKIEKGIEGSKAAERTGFRSARRLKYRRKLRKIELLKVLSAYGYCPTLTNEELLNWRYKKVYPRNQAFLNWQSTDEASSKNPYHYRALAVEQKFDLEKEEDRFKIGRAFYHIAQRRGFLSNRLEGTKESDGAVKKSISEINSLKGDKTLGQYFYEKYRKREKIRNTYTHREEHYLDEFKRICEFQKLDSEFTAKARKAIFYQRPLKSQKGLVGKCVFEPNKPRCSVSRPEFEEYRMLCFVNNMKIKTPTDEHLRFLTEEEKKKIMPQFFRKSKDYFDFEDLAKQLAPKHQYKFYKRRDKYPEDWLFNYSMKTIVSGCPVSTRLKDLFGEDIMAFNIPYIREKDGKKSVIDIDDIWHVLFSYDSEDKLKEFAEKRLQLTEDQVKDFLKIRLRKEYASLSLKAIKKIVPFLKEGLIYSHAVFLANMEDAIPKEIWEIEENRNIIRTEIANIIANQKEEKQICEIVNGIIKINHTDEAVWSEAASEIFKKDLLRKIKAHFGEKTYNAFSEEKKNRVEISAFELLKKQMQKNSGRGEFVPVHRIDDKVKAFISDNFDVEPKSLAKIYHPSAIEVYKPPVRKDDGKLYLGSPMVSSIRNPMAMRALHQLRKVINELIKTDVIDSGTHIHIEMARGLMNSNERKAWQSWQRDRENLRKEYALKIKEHLSSDAEPSETDILKYQLWEEQNHKCIYTGKEIALSEFLGANPSFDIEHTIPRSISFDNSQVNKTLCENTFNRSVKKNKIPYELSNHLEILARIECWKEKYEELDKQIAASVRQARVAIDKESKDRAIQKRHKLKLDFGYWKNKYERFTMEDVPEGFKNSQLVDTGIITKYSRLYLNTLFDKVYTVKGSTVADFRKLWGLQDEYEKKARVNHIHHCIDAITIACITKENYDNLAKFYHDFEDLKIKGVEQLPRVKKPWKTFAEDVKAIEDEVLISHYTPDVLPKQTRKKLRDRGRIKKDKNGNPIYQNGDTVRGSLHQQTFYGAIEKAVINKKGESEKVIKYVVRKSLDSLEDSSIKNVVDERVREIIQHARLEEKKLKKEIEVQKKKLEKAEEEEENSICTEIERLNSQISELYTLPNKNGAPIPIKKVRIYQTSVTNPLHIKEQRDKSKKKLKSHKEFFHVANDSNYAMAIYEGKDAKGKIKRDFQLLNNMQAGEFFKFSVQKDLKAQNLNQIHNLVPDKIVQGKAELSFKAVLKIGTMVVLWENSPEEVWDLTVAEINKRLYKIVGLSQQIIQGKYFFGTIVMRHHKEASSASDLKTSDGKFEKNESYKAQRKMNHNQFNALVEGVDFKIDPLGNIKRIN

SEQ ID NO: 5831 - protein, 1347 aa, synthetic construct
  REGION 1..1347: note = Synthetic
MSNRILGLDLGTNSIGWAVVETENKQHFQLLDKGVRIFQEGVKIEKGVEGSKAAERTGYRSARRIKYRRKLRKINTLTVLTTYDYCPPLIPEMLNQWRYKKIYPASKLFKEWWLTDEATDKNPYAYRALAAEQKLDLTNRENRYKLGRAFYHMVQRRGFLSNRLEGTKESEGAVKQGIKEISEAIGNQTLGQYFYQQYRSGEKIRDHYTHREAHYLAEFTTICQLQELPTEMVAALKKAIFYQRPLKSQKGLVGKCPFEPNKTRCAVSHPLFEEFRMWCFVNNIKIKLPEDEKLRFLTPEEKAKILPQFFRKSKEHFDFEDIAKQLAPKKQYCYYKQGNKHAEDWLFNYSMKTTVSGCPVSARFKSLFGDHWAAFQKPYTREKDGQSSTIDINDVWHVLFTYDSDEKLQAFARERLELDDDQTKEFVNIHLKQDYGSLSLKAIKKILPYLREGLIYSHAVFLGNMKAVIPAEVWAHDENKTLIRQEIGRIIQSQNEEKHITDIVNGAIKRNKESDATWSAEASEIYRKELLQQIKSFFGENRFNAFSEDRKQRLENRTYELFEQQMEKDYGRGKYAKVQRIDDRITLFLSDNFGVNGTINHLYHPSALDVYQPPKKGEDGNYYLASPMVASVRNPMAMRALHQLRKVINELLKAGKIDASTAIHIEMARDLMNANERKALQSWQRDRENLRKSYAAAIKTHLEENGIHREATDDEILKYQLWEEQKHICLYTGQTIGLHDFLGANPLFDIEHTIPQSLSFDNSQANKTLCESRFNRATKRNKIPFELSNHAAICERIESWQKEVEELNKKINGAVRQAKGAATKEDKDKAIQRRHRLTIERDYKREKYQRFTMKDVPTGFKNSQLVDTGIITKYARLYLKTLFKRVDTVKGNTVADFRKIWGLQEAYNKKQRVNHIHHCIDAITIACMTKPQYDKLARFYHDWEEWHHQNIDKKPVCEKPWRTFTEDVKAIEQEVFISHYTPDNLPKANKKKLRKRGKIQLNDQGQPIYQTGDSVRGSLHKETFYGATEQETETKKGEKEKVVKYVVRKPLDSLSDADIKNVVDDKVREILQQARKNEKGLQKQWETLKKKLAKAEEADEPAIRREMQTIEQEIKQLYCLPNKNGAPVPIKKVRVFTPTVTKPIPLKKQRDQSLKEHKRDYHVANDGNYLMAIYEGKDAKGKVKRDFKIVNNYDAGNHFRDEVQKTLRPQGIGKQEGLVEKEKQKGKLQLPLKAIIKTGTIVLFWKNTPEEIKELSEEDLIKRLYKVIKMNKDGRVAFKYHQEARNDEKLKEDYEKKYKTKAPKSLTNGESSINFETPYPKLLLSPLKFNMLIEGIDFTLSPLGEIK

SEQ ID NO: 5832 - protein, 1343 aa, synthetic construct
  REGION 1..1343: note = Synthetic
MGKLTLGLDLGTNSIGWAVVENSNGEFKLKEKGVRIFQEGVKIEKGIESSKAAERTAYRSARRLKYRRKLRKIETLKVLSEYGFCPKLTEEELDGWRYDKVYPTNQEFRHWWMTDNQDSEAERLEQRKNPYYYRFLAVTKKLDLSTYNNRLKIGRAFYHLVQRRGFLSNRLDSTPEKDSGTVKTAIAELQTKKDGRTLGHYFYEDLYLKGQKIRDHYTHREDDYLDEFNRICEFQGIDKVVQEKLQKAIFYQRPLKSQKGLIGKCVFEKNKPRCAVSRPEFEEYRMLCFVNNIKIKTPNDEKLRSLNSEERSKIIPRFFLQRDHFDFEDIAKQLAPKKRYSFYKSKNQNDYLFNYSMKTTVSGCPVSARLKDIFGNDYMNVNFEFIRQKDGKKSMMTVDDIWHVLQTFDSTVKLKEFAIEKLSLSEELAEKFTKIKLKQDFASLSLKAIKKILPFLREGLVYSHAVFLGNIETIIKSQFNGKMFSLDSKDVITNLKEELKRIFRIIDNKNTAINVANGFISKIRNYQIKPNDVSYDSINLELEAVHGERRWERLGESIRNRIIQDVDKLIGDASSTRWSFHKPITKEDMVWEFLADKYKIKRTKGILYHPSAIETYKDAQPGKDGKLYLGSPMVSSVRNPMAMRALHQLRKVVNELIKQNIISPDTAINIEMSRGLLNSNERQGLKRWQNEREKDRKEYAKLIQEHYDANSLDIVPSETDILKYQLWIEQGEHCIYTGEQISLSEFLGANPKYDIEHTIPRSQSFDNSQANKTLCCAKFNRQIKKNRIPFQLTNHDEVLERIKPWQNRIDELNKLIEKCVKASKGAADKNQKDSAIQKRHKLTYERNYLRDKCRRFTMEEVPQGFKNSQKVDIGIITKYSRLYLKTLFKKVYTVKGSTVADFRKMWGLQDNYSKKERINHVHHCIDAITMACMTKSNYELLAKFYHDWEELYQAGADAKPKVRKPWDSFVQDIKRVEDEILVSHYTPDNLPKKAKKILRKRGKKQKNDKGEFIYQKGDSVRGSLHKDTFYGAIERKAINKKTGEEEKIIKYVVRKSIEGLETSALKNIVDDRVREIVVNARDKEKQLKKEIDQLLKERKKADESQEQIIDKQVNEIKERMTLLYCMPNKNGSPIPIKKVRLYQPTVTNPLHIKKQRDKVRSGKRKEYKESYHVTNDGNYLMAIYEGKDKNGKLKRDFELINNIDSASFYTQKNNDKSIAPITKSGLTLRAMIKAGQLVLFWEDEPEELYSLPRKEQVKRLYKVIAFEADGRIQFRYQQTAMQQSSTNKEEMTITKFMKENAISNSFIDFVNPKLWLRLRRASWNFLVENIDFRISPIGEIERI

SEQ ID NO: 5833 - protein, 1348 aa, synthetic construct
  REGION 1..1348: note = Synthetic
MTKILGLDLGTNSIGWAVVEKERDHEFQLISKGVRVFQEGVKIEKGQESSKAAERTGFRSARRLKYRRKLRKIETLKVLSEYGYCPRLTKEELDLWRYKRIYPQNISFRNWWLTDEDAEKHPYFYRYLAITQQLDINRETDKHKLGRAFYHMVQRRGFLSNRLDSTPENETGKVKSRIKELQQKKGDRTLGQYFYEDCYLKGEKVRDQYTSREDDYLDEFKRICEFQKIPEEIQNKLHKAIFYQRPLKSQKGLIGKCVFEPTKPRCAVSRPEFEEYRMLCFINNIKIKTPDDEKLRPLNTEERQKIIPQFFRKSKDHFEFEDLAKQLAPKKQYKYYRDNNKNPDDYLLNYSMKTTVSGCPVSARLKDLFGDNFMDIKLPYKREKDGKESVIDIHDVWHVLFSYDSDEKLKEFATKRLLLTEDQVSDFLKIRLKKDYASLSLKAINKILPFLRAGLLYSHAVFLANMEEAIPDVIWKKEENRTIIKEEIEKIIANHQDQKQICEIVNGIIKNSHKDESAWSERASELFKKDLFNKIKVYFGERTYNSFTEEKKNQIETDAFELLKKQMKKKGGRGEFISIQRIEEKVKSFLTDNFEVEGKSLKKIYHPSAIDVYKPPIRKDDGKLFLGSPMVSSIRNPMAMRALHQLRKVVNELIKNDVINSETRIHIEMARGLMNSNERKAYQNWQRDRENQRKAYAQKIKEHFSSDKEPSETDILKYQLWEEQNHKCIYTGREIALNKFLGSNPSFDIEHTIPRSISLDNSQENKTLCENEFNRKIKRNQIPYELANHSEILARIEHWKEKYKELDKQIGIQVRRAKNAADKTQKDSAIQARHKLNFERDYWLNKHRRFTMKDVPEGFKNSQLVDTGIITKYSRLYLNTLFDKVYTVKGSTVADFRKMWGLQDEYKKKARVNHIHHCIDAITIACITKEAYENLAKAYHKWEEVDRMKMSDMPKVNPPWSSFVPDLKEIEKEVLISHSTPDVLPKQTKKKLREKGRIVKNKKGNTIYQQGDTVRGSLHQQTFYGAIEKTELKKNGESEKVIKYVVRKPLDSLDDSSIKNIVDERIREIVSNAKKQEKEIQKQIENLLKQRRNAEENEKAEIDANVAELIHQIAELYCLPNKNGDSVLIKKVRIYQSFVKNPLHIKQQRDKSKKLPKPHKEHFHVVNDSNYAMAIYEGKDAKKKIKRDFQLLNNLEASEFFKYSVQKDLKEQGLNHSHNLVPDKKVVGKMELPFKAVLKIGTMVILWENSPEEVWDLTNTEINKRIYKVVGLSNQRIKRPSGKIDEYATIVMRHHAEAKPSTELKVMDGVFKVDEEYKALRKMNHNQFNALIEGVEFKINIIGDTMRI

SEQ ID NO: 5834 - protein, 1422 aa, synthetic construct
  REGION 1..1422: note = Synthetic
MGKILGLDLGTNSIGWAIVEIEDGIYKLLAKGVRIFQEGVKIEKGIESSKAAERTGYRSARRIKYRRKLRKIEVLKVLSEQGYCPPLSEEELKLWRYKKIYPQNNAFKEWYLTDNEGDITERKALTKNPYYYRYLAATEKFDFTTEQDRHRFGRAIYHLAQRRGFLSNRLDSTPENENSKVTSAISYLNKLIKAADCKTLGQYFYQKYLQGEKIRSQYTHREEHYLSEFNFICEAQNIPVEVKTLLYKAIFYQRPLKSQKGLIGKCVFETNKQRCATSRPEFEEFRMLSFINNIKIKTPDDEKLRFLNEDEKQKIIPQFFRVSKDHFDFIDLAKKLANEKQCKFYKSKDVNPEDTLFNYSMNTTVSGCPVTARFKSLFGDDYLNLAISYTREKDNKESTITMDDVWHVLNTFDSNEKLAEFAQKRLGFDDDQIKSFVNTKLKNDYASLSLKAINKINRYLKAGLIYSHAVFLANMENAIPKEIWNEEENQRIIQEEILRIIETQNEEKLIIDVVNGIIKTAKNEKSTWSNEAAQLYKEDILRQLKAIIGPKRFASYTPEKQNQLHKDAFALLEEYMPKNNGIGEFIKVQTIDERIKGFISDNFNIEAASLEKLYHPSALDIYKAPYKGKDGKYYLGSPMVTSVRNPMAMRAMHQLRKVTNELIKNELIDKDTKIHIEMARDLMNANERAGLKNYQKARENQRESYRKAITEHFEEQNIKADPSEDDILKYQLWEEQKRVCLYTGDPIALSDFIGADPKYDIEHTIPRSLSFNDSQENKTLCEGVFNRKIKRNKIPSELANHSEILERITHWKEEYEKVDKLISIQAKKAKTAFDKNQKDKAIQERHKLTLERNYLRNKYTSFARLDVPSGFKNSQLVDTGIITKYARLYLQSLFNKVYTVKGNTVADFRKCWGLQDNYSKKARVNHVHHCIDAITIACMSKQNYELLAKHYHDMEDSFVKNNEKKPFFPKPWKTFTEDIKNIENEILVSHHTPDNLPKQSKRILRKGGKKQYDQTGKEIFLKGDTVRGSLHKDTFYGAIIQKNKNSNGKTETVTKYVKREWLDPLNDTQLKNIVDDRIREIVSNGRKEQKLLEKSIAKLKAQLTKAEEHEEPAIKASIEGLKNDITNIYCLPNKNGAPIPIKKVRVYQPSVSSPIILNKKQRDVNSRNPKPHKENYYVVNDGNYLMAIYDGTDAKGMVKRDYKLINNLEGGDFFKKSTKDTLLPQNKHTINDLINSGLDDDVTIKYVLKQGQSALLYTESPDELWEMNNHELGQRLYVIRGLDKDGIKLYYHQEARPTTDVIKFMNEVIDTGYRNECKIDTKKTSSLLKSLGIKISDKEINTIAKESNGKYLVLNNDGETLATLDEIDSLLKTSKLSTPKGGDVIGRKDEFPYIKFKAGNFKALVEGVDFELDTLGQITRLN

SEQ ID NO: 5835 - protein, 1351 aa, synthetic construct
  REGION 1..1351: note = Synthetic
MAKILGLDLGTNSIGWAVVENENGNFSFIDKGVRIFQEGIKIEKGVESSKAAERTEYRSARRLKFRRKLRKIETLKVLSEHGYCPELTKDELNNWRYNKVYPYNLSFINWWRTSEEENKNPYYYRNLAVSEKLDLSNEFNKYIIGRAFYHIAQRRGFLSNRLEGTKESDGAVKKSIEEISKAKGDKTLGQYFYEKYLNGEKIRDQYTHREDHYLEEFNRICEVQQLPDDFRKKLYNAIFYQRQLKSQKGLIGKCVFEPKKHRCSVSHPLFEEYRMLCFVNNIRIKTPNDEKMRPLNNSEREKVMARFYLKRDYFPFEDLAKQLAPKNQHKYVNDRNKNPEDYQFNYKMNTTVSGNPVSAKFRNWFGYDFYNLKIEHTRKKDNNTSHIDFNDVWHVLMTFNSEDKLKEFAKDKLKLNDEQIKEFANNTHLKKEYSSLSLNAIKKILPYLREGLIYSHSVILANMIEALPSNVWNNPNKRNDISQKVKEIIQTQNEEKAITEILNGIIKNCRESGECWSEEAKECFRKDIVKGLKAYYGEKTYSTLPEEERSRIEENAMEMLRKQMQKNFDRGEFLKIKTIDDRVREYLINNHEVDEEKLHKIYHPSAIEIYKPSKAGKDGKKYLNSPIISSIRNPMAMRALHQLRKVINELIKNDIIDENTKVNIEMSRDLLNANERKALQRWQRDRENDRKEYAQKIKEHYEKQSLNIEPSNDDILKYQLWVEQNHKCIYTGEEIGLSEFLGANPKYDIEHTIPRSLSYDNSQENKTLCNNRFNRSTKKNKIPYELSNSEQIQQRVDDLWKSRIEELDKQIEQAVRQSRSAADKDAKDGAIQKRHRLSYERNYYRDKRNRFFMKDVPQGFKNSQIVDTGIIAKYSRLYLKTVFNKVYTVKGITVADFRSIWGLQNEYKKKERINHVHHCIDAVVIACMTKENYENLAKYYHDREDSFVKNDDSKPFVKKPWKTFTEDVKKLEDEIFVSHYTPDVLTKTTKKKFRKRGQIVKNKQGNPIYQKGDTVRGSLHKETFYGAIEKEFTNRTGEKEKQVKYVLRKPISDIKDENIKNIVDDKVRKIIEEGRKQEKVLKREIDNLKKKLAKTEEYEKKELNSKIEKIQNKINNLYSLPNKNGEPIPIKKARIYTPTVTNPIKLKPHRDKAKNNPKSYKENYHVENDGNYLMAIYEGKDANGKIERDFEIINNLEAGEFFKYSTQRELKAQGISGYEGLIPESKTSSKIELPLKAIIKIGTMVIFWENYPEEVWELDYNDLKKRLYKVTGLSYQRIVRRTGKINNYATIVMRFHQEAKQSSDLKLQDGAFVYDEEYKAKRKVNHNQFNVIIEDVDFKLTSLGKIIPITK

SEQ ID NO: 5836 - protein, 1303 aa, synthetic construct
  REGION 1..1303: note = Synthetic
MRILGLDLGTNSIGWAVVEKNNGKFKLLDKGVRIFQEGVKIEKGIEGSKAAERTGYRSARRLKFRRKLRKINTLKVLSEYGYCPRLSDNELNGWRYDKIYPINDDFRKWWLTDEKENKTPYYFRNIAVTKKLSLDNKFNRYLIGRAFYHMAQRRGFMSNRLEGTREADGAIKKSISDINEAKGDKTLGQYFYERYIKGEKIRDTYTHREEHYLAEFNAICEFQGLPKELVDRLNRAIFYQRPLKSQKGLIGKCVFETNKARCSVSRPEFEEYRMLCFINNIKLKSPSDDKLRPLSKDERDKAKQMFYRKSKEHFDFEDIAKQLAPKKQYKFYKDSTNNPEDWLFNYSMKTTVSGCPVSARFKEIFGDDFMNLKKEFIRGKDNKKSFIDIQDVWHVIYSFDSENKLIEFAKIRLGFEEEKINKFLMIKLKKDYSSLSLKAINKILPYLREGLIYSHAVFLAKMEDIIPQNIWANHENRKIIRDQIQQIIQTQNEEKQIIEVVNGIISKSREEKTCWSNEASEIFKNELIEKIKTYYGKNNYAEFSDERRDRIGENSFSLLKNQMQKNMGKGEFAKIQRMDERVRAFISDNFEVDDINLNKLYHPSANEVYKPPQKGEKGRLYLGSPMVSSIRNPMAMRALHQLRKVINEMIKNDIVDANTKVNIEMARDLKNANERKALKSWQNERENKRKEYSSKIREHFESNGNNVEPSDDDILKYQLWEEQNHKCLYTGKEISVSAFLGANPQYDIEHTIPRSLSFDNSQENKTLCENKFNRTIKRNRIPYELSNHFEILSHIEHWKEKYESLDKDIQQAIRQTRNALEKESKDRLIQKRHKLNFERNYWRNKYQRFIMKDVPVGFKNSQLVDTGIITRYSRMYLNTLFDKVYTVKGNTVADFRKIWGLQEEYVKKERTNHIHHCIDAITIACITKENYELLAKFYHEWEESKIAGISSKPSVEKPWNSFTEDIKEIENEVLISHFTPDNLPKQSKKKLRIRGKIQTNDKQKVIYQKGDTIRGGLHQEGIYGAIKQEGEVVYVKRKYLQYDIQGTSGFKEFLQLDKIVDSEVKRKVKQQLNQKIEQGFTFKEAISEDIWMNEQKGIKIKKVRCITNVKNPLGWDKENRDKSETKKHKHSVHVVNEGNYMMAIYEGKDENKNLKRDFTVVNNLEAGKYFTGKIDNPIYDNHQNSGYPIKCVLKIGTKVILWENNPGEILELGISDVRKRLYKVIGLSVQRIKAKSGKINEYATIVLKHSNEARPGVDIRTQDGAFQVNEPYMAQRKLNHNQFNAFVEGYDFTLSPLGVLIPK

SEQ ID NO: 5837 - protein, 1085 aa, synthetic construct
  REGION 1..1085: note = Synthetic
LEEFNKIFDFQQIDPKFKDALENAIFYQRPLKSQKGLIGKCPFETNKPRCSSSHSLFEEYRMLCFVNNIKIKTPTDERLRFLSKEEKEKIEPLFFRKSKEHFDFDDIAKQLAPKKQYKFYKASQKHPEDYLFNYSMKTTVSGCPVSARFESIFGEHWKELKIEHKRAKDGKISFIDIFDVWHIVLTFDNDEKLAQYATSKLGLKDDKLKEFLNLHLKQDYSSLSLKAITNVLPYLREGLIYSHAIFLANMGNAIPYDIWSKEENRKIIQTAVLKLIQTQNQEKLIIDVINGLIKRCKENGWYWSEEAKEGFRKDIMQGVVSEFGTERWSKFDEEEQNNILDNALSQFKKQIQRNNGKTGFLRVETIDERVKIFLNDNFDVNTEDLEKLYHPSAIEVFKKPIRAEDGRKYLGSPMVSSVRNPMAMRALHQLRKLINELIRQDIIDENTKINIEMSRDLKNANERKALQSWQRDRENLNKEYYARIQEHFNSSGIKRDPSETDILKYQLWEEQEHICIYTGESIGISDFLGNSPSFDIEHTIPRSLSFDNSQQNKTLCHNRFNRETKRNKIPFELTNHAQILDRIEGWKKRYEELDVKIQKLKKVTTSDKESKDRVIQNRHKTAIEYDYWRKKYERFAMKEVPSGFKNSQMVDIGIITKYSRLYVKTLFDKVYTVKGNTVADFRKLWGLQDEFVKKARVNHIHHCIDAITIACITKQNYDNLAKFYHDSEEMYLSGSGKKPHVSKPWPTFTEDVKEIENEVLVSHHTPDNLPKQSKKKLRNRGVAVRNNQGDVMYQKGDTVRGSLHKETFYGAIQREVVNKKGEKEEKVLYVVRKPVDSLAAADIKNIVDNVVREKIEAAINEKGLKQALSEPIWMNEQKQIPIRKVRCYVPTVTNPIHLKAHRDISKHDYKQSYHVANDGNYLMAIYEGLDSKGKIKRDFEIVNNLTAGEYFKRSAQEVLKAQGINSLEGLVPESKEAKKTLLPLKYIVKTGTMVLLWEETPNEIWDLDIAKQNKRLYKIVKFDKIGRIFFRPHNEARPASDLKEVYILNVDKYCEQLGLRVSKFNALVEGYDFRINILGQIERVE

SEQ ID NO: 5838 - protein, 1299 aa, synthetic construct
  REGION 1..1299: note = Synthetic
MGKILGLDLGTNSIGWAIVETEDNKSFELIDKGVHIFQEGVKIEKGIEGSKAEERTKYRSARRLKFRRKLRKINTLRELIKYDYCPKLTEQELNDWRFKKKYPKNEDFREWLLTKEDSNKNPYFFRNLAVTEKLDLSVKENRYNLGRAFYHLSQRRGFLSNRLEGTKESDGAIKKAISELTDIKGDRTLGQYFYEKYNAGEKIRNQYTHREDHYLEEFNKIFDFQQIDPKFKDALENAIFYQRPLKSQKGLIGKCPFETNKPRCSSSHSLFEEYRMLCFVNNIKIKTPTDERLRFLSKEEKEKIEPLFFRKSKEHFDFDDIAKQLAPKKQYKFYKASQKHPEDYLFNYSMKTTVSGCPVSARFESIFGEHWKELKIEHKRAKDGKISFIDIFDVWHIVLTFDNDEKLAQYATSKLGLKDDKLKEFLNLHLKQDYSSLSLKAITNVLPYLREGLIYSHAIFLANMGNAIPYDIWSKEENRKIIQTAVLKLIQTQNQEKLIIDVINGLIKRCKENGWYWSEEAKEGFRKDIMQGVVSEFGTERWSKFDEEEQNNILDNALSQFKKQIQRNNGKTGFLRVETIDERVKIFLNDNFDVNTEDLEKLYHPSAIEVFKKPIRAEDGRKYLGSPMVSSVRNPMAMRALHQLRKLINELIRQDIIDENTKINIEMSRDLKNANERKALQSWQRDRENLNKEYYARIQEHFNSSGIKRDPSETDILKYQLWEEQEHICIYTGESIGISDFLGNSPSFDIEHTIPRSLSFDNSQQNKTLCHNRFNRETKRNKIPFELTNHAQILDRIEGWKKRYEELDVKIQKLKKVTTSDKESKDRVIQNRHKTAIEYDYWRKKYERFAMKEVPSGFKNSQMVDIGIITKYSRLYVKTLFDKVYTVKGNTVADFRKLWGLQDEFVKKARVNHIHHCIDAITIACITKQNYDNLAKFYHDSEEMYLSGSGKKPHVSKPWPTFTEDVKEIENEVLVSHHTPDNLPKQSKKKLRNRGVAVRNNQGDVMYQKGDTVRGSLHKETFYGAIQREVVNKKGEKEEKVLYVVRKPVDSLAAADIKNIVDNVVREKIEAAINEKGLKQALSEPIWMNEQKQIPIRKVRCYVPTVTNPIHLKAHRDISKHDYKQSYHVANDGNYLMAIYEGLDSKGKIKRDFEIVNNLTAGEYFKRSAQEVLKAQGINSLEGLVPESKEAKKTLLPLKYIVKTGTMVLLWEETPNEIWDLDIAKQNKRLYKIVKFDKIGRIFFRPHNEARPASDLKEVYILNVDKYCEQLGLRVSKFNALVEGYDFRINILGQIERVE

SEQ ID NO: 5839 - protein, 1097 aa, synthetic construct
  REGION 1..1097: note = Synthetic
MKYIIGLDLGINNVGWSIINQETNEIEDYGVVRYQESSDAQERRRLRAARRLRNRRLHRVERLALLFKENGIPTQRTIEPELLLKRTKGLKEEIFVQDIINIIYYFAVHRGYIPFDDEKLDREVVNLEDGQFPCEYIFSEYKKNGKYRNSEKLIKCSDNIREIKKLLETQRKYHPKFTIELTDKIIEIITSKRKFYEGPGGARINQLTPYGLFRTVADLEQYKVNPNKFKYLYEKLIAKCKIALGETCAPRINYFAEEFNFFNDFINMRVKEVSLLPQIYSYKVDEKGKFIEETILEIRDYVLSNETIRLDKMFKQILGIGIDNIEGYRIDKNKKPEVSLYNFYKYVRKQFAQNGLNPIWLFDKEKVIYNKTMYVLTVVPSSVQIEEMLSERVSEYSFSPEEIKVLKEIKTKKLTNNTSLYHSLSVKVLKRALSDMKKTQYQLNYMQLMKKLDYEKEAKEFFEANYTNRTVAPYFIEKKYIDDLIANPQVKKTLRKAISVINAIIKRYKEYPTIIAIESTREMNSKAKKDAIVKEQAKLEKLRKDAITFLEENDIKVNEANILKTMCYKETNGHCMYCNNPIQASQLTTLEIEHILPISQSYDDSFDNLTVACLKCNKEKSKKTPYEFLTSINSYEPFKERVIELPISDKKKSNLLFEGDISKYELKFINRNLRDTAYGSMALVEELRKFNVFLERRANRYINLVTIPGQLTSRIRKKHELEEKDRTQLYHHAIDATIVASIANTPFGELLIKGQNDAKFWFENKEKRIELGGMLPKITLKNIENIRKINESNIKRSFEVRKSINQQISNQNPIKLVWLGNDYYKVQQINNIYEEKKNDNFIKLFDENDKKMILLCELEDPKLFKRLKEIFFSNLKANKNPFLEYCLFEHGIESTPNSFNYLIHGIKKSPKNPKSPIVKRLRYLEKRTSPYIIKKDYPNRKKNELGEFVTPKVKEKTIYGLDQLSQYCTEIYYNYETQKFIFLPIFMVSVDVNSKKINRDEHYFKETYERLIGNKKPKYIATLYNGSWCEITKKNNQTAEGRYIGYHKTNNLLTFGKDGEYSSSAPLYMSPNDKRIIIYGFNILGKKYKILDSNDII

SEQ ID NO: 5840 - protein, 1110 aa, synthetic construct
  SITE 716: note = misc_feature - Xaa can be any naturally occurring amino acid
  REGION 1..1110: note = Synthetic
MKYIIGLDLGINNVGWSIVNQETNEIVDCGVVRYQESSDAQERRKLRASRRLRNRRLHRVERLALLFKENGIPTQRTIEPELITKRAKGLKEELSVQEIVNIIYYFAMHRGYIPFDDEKQEREVVQLDDNQFPCEFIINEFKKYGKYRNSNKLIKCSDIIREIKQILETQRTFHPELTPELTDKIIKIITSKREFYEGPGGARINQLTPYGRFRTAADLEEYKVNPQKYKYLYEKLIAKCKIALGETCAPRINYFAEEFNFLNDFINMKVKDVTLLPQEFAYKVDEKGKLSGETILEIRDYVLSNETVRLDKMFKQILGTGIENIEGYRIDKNKKPEVSLYDFYKYVIKQFSQNNLNPTWLYDKDKKIYNKTMYVLTVVPSSVQIEEMLIERIPEYSFSQEEINVLKGIKTKKITNNRGMYHSLSEKVLLRTLADMKKTQYQLNYMQLMKELDYEKEAKEYFEKNYTNRTVEPYLVEKKYIDGLIANPQVKKTLRKAISVINAIIKRYKEYPTVIAIESTREMNSKAKKDAIIKEQAKLEKLRKDAITFLEENDLRVNETNILKAMCYKETNGHCMYCNTPIPASQLSTLEIEHILPISQSYDDSFDNITCACLKCNMEKLKKTPYEFLMSINSYEPFKERVIDLPISDKKKNNLLFEGDISKYELKFINRNLRDTAYGSMALAEELRKFNVFLERKTNRYINIVTIPGQMTSKMXMRRKYELEEKDRTQLYHHAVDATIVASIANTPVGRLIIKGQNDAKFWFKNKEKRLELSKLFPYAELENIKEIKELIPKKGEELLCEKDDRIKRSFEVKKSINQQIANQNIVKYKIIDGEYYLVQQINNIYEEKSNDIFYKLFDESKKDKILLCELEDPKLYNRLREIFYAHEKSKINPFLEYCLFEHGIETTPNNFNYLIHGIKKSPNKPNSPIVKKLRYLERKTNPYIFKKADLNRKRNNFGEFVIPKLKDKTINGLDSLSQYCVEVYYDSDAQRFIFLPIYMVSVDINSKKINREERYYKETVARLIGKKTPLYITTLYTGNWCKVVKRDSSFSQGRFIYYHKTHNKLVFGKDGSYSSSDAFYMTTNDKQIIIYGLDILGKKYKILDSNDII

SEQ ID NO: 5841 - protein, 1108 aa, synthetic construct
  REGION 1..1108: note = Synthetic
MTKIFSFDLGSGSIGECVREGEEVKHLNSLLIDSDFASLDSIRTQRRAFRTRLAHKARESWWIQIAQQSGLPIPATDIRKDKFGNYVFTADEKMLREFPKTNDETIYNSALLRIALIEGKKLEGWQIFKAVWSAFQHRGYETNNWKDEELSEEEKKAEKEEQDAKKRYEDKLLTLPEGCRFPCYYEAYKMGLWNPQTKQTVTRLKTSTGNARNKDGRGEQIIAPRDIVEKELRLLLEQAKKQYPALPDIEYILYGTNRKAHAGIYEHSARKFESEGLLGQKTPRFDNRIIAKCSLIPRLNVCKSKEPLSKEVRFLLALKNFRFIKNGQVAAFDFEEISELFNIHKARLLDDKGHANYIDKRDIKNYLKSKQYEIFSEDVIPMPKDGGRSRFCRPALRILKELILSGKNPHDFYREITESITNTDTQKGLVKEDYKFLLAMPNDWYSIHIPDFREEDKNLSQEERLCKIDNLLNSITNAIVRHRLIMLMHRIEYLHKTYGTPDYCIMEIGREDFLSKKAKKKYEDEMSKNYARNIAACKELKDNNIPITYKNIDMIKLYNEQKGINIYEVDSDKRHFFNTDKINNISWNLLDIDHIVPVSKDGSNSFLNKVLTTKDLNESKKGNKTPYEWLFSDKDKWSDYLENIKKTNIDVNSKKYLYLVSPDAVKEARRQKDLRATQYMEKLAKKLISLYFGWGEQTTGDKRRMFVCTGGLTDQIRKTYSLNVILYEDLKKLPKEEIVRMTSTGELDDIKKKRDNKKHHALDALVISFAREMSYDKKTGTPVLPEYAGNRKYFEDAINKVFPITIRSKKPILGDTIYALRARQEGKELKYYMVSRFNTNMEKISDAQKNLKKIFDLHVKKQFEDKINQLNKEEQIRWQKFLEDLRASGKYTDEISIMENLSDAPKNLKKISDSPIKDIFKDKLNQKQKEWEQFLKDFRICGNPVRKMCMTESSAFTKKEVFNDDGSFKKNIGEYCAISKKVKGQYIRPKKSNKGQIIYNDGKKWIVKQIYPFDSVAKKLKEAKEKYGKVLFWHTDITLCISNEIKGTKVIKTEDNNKKRIPCDILPGKYQLNTISSGVEMTCLSSGIRYAVPLKTLIEEGKTYKERS

SEQ ID NO: 5842 - protein, 1077 aa, synthetic construct
  REGION 1..1077: note = Synthetic
MKIPYRLGLDIGTNSIGWCMLRLDGNDAPIGFVRGGVRIFPDGRNPKDLASLAAGRRLARQMRRRHDRVLKRQARFMTGLIHFGLMPEDDGKRQSLSALDPYELRAKGLGSELIVYEVGRALYHLAKRRGFKSSRKDQTADEKETGKINDAIARTRQQIVNSGSRTYGEYLAKRHKKGETTRARLDGKGEYVLYAQRELIAEEFDALWAAQQPFHPQAMTEEARDYLRNTLLFQRPLLPVEPGRCIFEPAEYRIPMCSPLQQRFRILQELNNLRIQEGIEWRSLTMAERNLLRDELCCREKLTFARIRMLLGLEKKAGLNLEGGRKSTGKPREFLKGDAVTEQFSSQAGIGAAWHDLSSIQQEALAVLVEVATNNDDLVEALVSLPGESGALDRIIRKNDLSRRHYRQVLAALPLRITREKAEGIARFRLPDDHGSLSRKALEKIVESLDGDVITYDRAVRTTFGRSHSDFHTGEIRMRLPYYGEVLTGYTSPMPKATNEEEKRWGRLPNPTVHVGLNQLRLVVNEIIRRWGLPQEVIVELAREFGMSGARRTELLSEQKKNEERNAKLNEELRTLGQRENRENRQRLQLYRELGKDDAMSHPCVYTGAQIGIEKLFSSEVEIDHILPYSRSLDDSLSNKVLCLSRANREKRNRTPFDAFGHTAAWESIEARLENLPSNKAKRFREGAMQAFLDRSKLTTEDLQAWGFEKGDSFLARHLTDTAYLSRLARQYLASVCPPNKVWSNTGRLTSQLRSVWGLNELLRPGESRKNRDDHRHHALDAAVIAACDRSCIQQLANAAARAEATGENRKLKDFPMPWPAFREDLAAVLGKIVVSHKADHGTQASLHNDTNYGKRGEPGKKGALSVSHRVPLSAITDTAKVERIADPILREEIARAIKGLSGKELKVALDAFSQDSGVRRVHVLEQLSVIPISDRMTKRPYRYVKGDGNYCYEIWQENGRWNGEIISIYEANRDEKWLTSRAARNGKPLVMRIRKGDLLKVEHEGKGKIMRVALFSSNGIALSEHYEANVDARDRDKTIAFSYIRKSPEPLRKMAARLVGVDALGYVNDPGFVGSK

SEQ ID NO: 5843 - protein, 1059 aa, synthetic construct
  REGION 1..1059: note = Synthetic
MARIKYRLALDMGANSLGWCVYRLDEFDEPDKIVRMGSRIFSDGRDPKTLASRAADRRAARQARRRRDRVLKRRHRLMQALIRFGLMPVDAAERKRLQALDPYVLRARGLEEPLTPFELGRALYHLARKRGFRSSRKDARDEESAKETGKVHAAIKALREKVQANGCRTVGEYLARQHAERKSVRARRSSDGQYVLYLQRAMVEEEFDALWAAQQQHHAELLTAAAFETLRDIMLFQRRLKPVEPGRCQFETNQYRARLCAPLQQRFRILQELNHLRVREGISDRALTLEERNRMLDRLLAEPNLVTFSDLAKAAGLRNAKAFNFGRDEKRRGFKGDAVGARFAATDALGESWQVLTDEQRYALAVLVEQADQVESLMAALAALPADVTPAREILKGQHDEDVVLAALASLPVRIGERQARVLAGFNFPDDYGSLSLKALSRIVPELERDVITYDEAVRRAGYLHHSQFHTGEFFMQLPYYGQLLVGYTSPATTAGNEDERQYGRIPNPTVHIGLNQMRQLVNALIKRYGHPHQVVVELTREFGASGDRRREIEKKQAEAQARNERDDAELERLGVRVGRENRLKLQLWEELGRDDAMDRYCVYSGQRLSKALLFSDEVEIDHVLPFSRTLHDGIGNKILCTRQSNRDKGNRTPFESWGHTERWAGIQERAERLPEHKRKLFREDALDVFLDGKDFLARHLTDTAYLGRAAKQYLTYICHKDSVWVSSGKLTGLIRGKFGLSRLLSEDGAKNRDDHRHHALDAAVIGLCSRSLIQRIATAAARSEGKGEQRLLEGLELPWPSFRDELAASLARVVVSHKPDHGKQAALHNDTNYAWRGAPDKRGDNPLVGRRRPLDSIKNASDAESIASEALRSEIVQLLAPLSSPKDIKAALLAYSERTGNRRVLCEERLSVIPIRHRRTGQPYRYVKGDGNHCYEIFRKPDGRWDGEVISTFEANQRSYLEAPTRAQNGLPLVMRIHKDDVLAMDCNGADQIFRVAKFSAGKIYLAAHKEANVDGRNRDPENPFRYLQFAPSKLREMRARIVGVDVLGYVNDPGFRE

SEQ ID NO: 5844 - protein, 1042 aa, synthetic construct
  REGION 1..1042: note = Synthetic
MAHVKYRLGLDLGTNSLGWCVYRLDQNDEPDKIIRMGSRIFADGRDPKTLASLAATRRQARQARRRRDRVLKRRQRLLQALIRYGLMPQNVDARKALQQADPYELRARGLDQPLAVYELGRALYHLTRKRGFRSSRRDGGNAEEEKETGKINEAIRRLREQIQTARCRTVGEYLARQHAERLPVRARRSSDGQYVLYLQRDMVAEEFDLLWESQRHFHPDVLTDAARDYLRDTLLFQRKLLPVLPGRCLFEGDELRAPLCSPLQQRFRILQELNNLRLIEGGAERALSLTERNVLLELLLRNREVSFAKLRHAIGVGRSSTARFNLESDKRKGLKGDLVGTQLGASQCIGDEWFRWPLDQQDKLALLVASADQKDQLLATLCAAPWQLTMDTANAIADCRLPDEYGNLSRKALLRIVPELEREVVTYDVAVQRAGYAHHSQLHTGEFFERLPYYGQILRGYTAPAERARVADEKQYGKIPNPTVHIGLNQLRQLVNALIARYGHPREIVVELTREFGLSGERRREVDKRQADNQRRNERYDAELERLGQRVSRDNRLKLQLWEELGSDDALDRYCIYSGQRLSKALLFSDEVEIDHILPFSRSLHDGVSNKILCTRQANRDKGNRTPYEAFGHSPGTYRWDDIAARVERVFAAGANPALRHKARLFRTDALEAFLGDKDFLARHLTDTAYLARAARQYLSYICHKDNVWVSSGKLTGMLRGKWGLSALLSDDGRKNRNDHRHHALDAAVIGMCSRSLIQRMAVAAGHAEEHGENRLLERLELPWHTFRDELRECLHQIVVSHKPDHGREAALHNDTNYGWRGEQDKKGAPLVGHHVPLESIVKAADVERVADIELRAQLRSLLRPLNSTKDIKAALAAFSARTGIRRVMIEERLSVIPIHDRRTGRPYRYVKGDANYCYDIFRGSDGRWEGSVISSFQANQKVDASTAGSAPDGRERIMRIHKGDILAIEDGTVTRYMRVAKFSAGKIALVDLHEANVDARTRDESDALSYFFKAPGTLRPLRARQVGVTVLGYVNDPGFKD

SEQ ID NO: 5845 - protein, 1062 aa, synthetic construct
  REGION 1..1062: note = Synthetic
MAKIDYRLALDLGANSLGWCVYRLDTRGEPDKIMRMGSRIFSDGRDPKTLASRAADRRLARQARRRRDRVLKRRRKLMQALEKYGLMPADVAARKSLQALDPFELRARGLDQPLKLHQLGRALYHLARKRGFRSSKKDARDDESAKESGKVKQAIAALRERVVAAGCRTVGEYLARQHAEREPVRARRSSDGGYVLYLQRAMVEEEFDALWRAQQPHHPDTLTDEAREELRDILLFQRRLKPIEAGRCPFESTQYRARLCAPMQQRFRMLQELNHLRVRDGIDERVLTLDERNAMLAELESDAGPKPVTWSRLAKAAGLRKVDFNLGRDEKRNGLKGDAVGARFAADTALGETWWRLGPDQQYALAVLVALADQVGTLEAALLALPAPSPASEEILKGIFAKEEREAVAASLQSLPLHLSESQARYIAGFNLPDDYGSLSLKALARIVPELEREVVTYDEAVRRAGYLSHSQFHTGEIFDRLPYYGQVLAGYTAPTPTAKNADERRSGKIPNPTVHIGLNQVRLLVNALIKRYGPPRQIVIELTREFGASGEKRREIMSKQKENQDRNDGYAAQLTKLGARNSRENRLKLQLWDELGKDDAMDRYCTYSGKRLSKAMLFSDEIEIDHILPFSQTLHDGIGNKILCTRQANRDKGNRTPFDAWGHTERWAEIEARAERLPAHKRKLFREGALEAFLGDQDFLARHLTDTAYLGRAAKQYLTYVCHKDDVWVSSGKLTGMIRGKYGLSKLLSDDGSKNRDDHRHHALDAAVIGLCSRSLIQRMATAAASAEEHGENRLLERLELPWPGYREELGACLATIVVSHKPDHGKQAALHNDTNYGLRGAPDKRGNPLVGRRRPLDNIKSATDAESIASETLREEIRQLLAPLSAGKETKAALEDYAARTGVRRVICEERLSVIPIKDRRNGQPYRYVKGDGNYCYEIFRKPDGRWDGEVISSFEANQRTFDESPSHAQNGMPLVMRLHKDDVLAVELDGRTNILRVAQFSDGKILLASHCEANVAARNKNTSDAFKFTQLAPSRLASVKARPVGVDILGYVNDPGFKD

SEQ ID NO: 5846 - protein, 1030 aa, synthetic construct
  REGION 1..1030: note = Synthetic
MKIRYRLGLDLGANSLGWCVYRLGGGNEPIDIVRAGSRIFSDGRDPKSLASRAADRRLARQARRRRDRMLKRRKRIMEALIRFGLMPATAELRKELQVEDPFELRATGLDKPLTPHQLGRALFHLCRKRGFKSSRKDQTAQEKETGKVKAAIAVLRERIAATNSRTVGEYLAKERAEGRPVRARRRSDGAYVLYLQRDMVAAEFDALWEAQRQFHPEVLIEEARHYLRDSLLFQRKLVPVEPGRCLFEIDEPRARLSSPFQQEFRILQELNNLRLIDGVEAKSLTLEERDLLLSHLRTQVKATFASLRALLGVRRNSGVRFNLETENRKDIKGDLVGVQFSKPECLGDSWWTFDRDRQESLANLVATVDDAEELERILKGTAWFFPASVAAALARCNLPDDFGSLSLKALKKIVPELQREVVTYDVAVQRAGYQHHSQLHTGEFFKSLPYYGEVLVGYTSPAVKATDPNEKRHGKVSNPTVHIGLNQLRQVVNALIKRYGHPTEVVVELAREFGMGAERRHELQKSQKDNQDRNQRDDERLLELGVRLSRINRQKLQLWDELGQANALDRRCIYSGANLSVAMLFSDEVEIDHILPFSKSLHDGNGNKVLCTRQANRDKGNRTPYEAFGHSPGVYDWQSILDRAATLSRGKAGHFSEDALLDFLDGKDFLDRHLNDTAYLSKVARQYLSYVCHKDYVWVSTGKLTSMLRGKFALNELLSADRSKNRSDHRHHALDAAVIGLCSRGLIQRISTAAARAESHGSNRLLESLELPWPSYREQLEAALAKIVVSFKPDHGRQARLHNDTNYGFRGAPDASGTTSVGHRVPLEGIQLKDIDRIAGDGLRTRLREALGGATSPKDIKAALAAFTEKTGIRRVIIEERLSVIPINDRRTGEPYRYVKGDGNYCYEIYVDSPGKWAGEVINNFSANQRGWIESPTIATCRKPLVMRIRKDDLVVIEENGVRRVMRVAKFSDGMIALVAPHEANVDARTRDKASGLKYLFKAPGPLRALRARIVGCDVLGYVNDPGFKN

SEQ ID NO: 5847 - protein, 1058 aa, synthetic construct
  REGION 1..1058: note = Synthetic
MAKVRYRLGLDIGTNSLGWCVYDLSDTAEPIAIRRLGVRIFSDGREPKSLASKAADRRLARQMRRRRDRVLKRRQRLLDALVRFGLMPSDAAERKELQQLDPWVLRARALDEELSPFEAGRALFHLSRKRGFRSSRKDGRDAEAEKERGKVHAAISETRQRVADAGFRTVGEYLASLHAERQPVRARRSPDGGYVLYLQRDMVSEEFDRIWAAQASHAPAVFTSEAHAALKDILLFQRRLLPVRPGRCVFEPSEPRARLCSPLQQRFRMLQELANLRIREGLASRPLSLDERDRMLGRLAEDPGVVSFTALAKSAGFKNSTVFNFGNDPKRKGFRGDVVGAGFSRKDALGAEWRKLDPAIQQGFAVLVEQADQQDALVAALLALPANTDPAAEILGKQEDAPDVLKALSRLPFTISEPVARVLAGLKLPDDFGSVSLKALRRIVPELEKEVVTFDVAVQRAGYTHHSQFYDGVLHDLLPYYGELLRGYTSPADKAKDPGEREFGKIANPTVHIGLNQVRQLVNALIRRYGHPAEIIIELTREFGASGEKRREILKKQAENQERNERYDRELEALGVRVNRENRIKLQLWEELGKDDALARYCVYSGTRLSKAALFSDEIEVDHVLPFSRSLHDGIGNKVLCTRQANRDKGNRTPFEASGHTPNWDGIVERAASLPGRKPELFAEAALETFLQGRDFLARHLTDTAYLGRVAKQYLSAVCPPDRVWVSSGRLTGMLRGKWGLSRLLSDDSQKNRDDHRHHALDAAVIGACSRSVIQRIATAAARAEAGGEQRLLERLELPWTSYREDLAEKLRGVNVSYKPDHGREAALHNDTNYGMREPAGDNRNPLVGRRVPVESLDSVAKAETIFDERLRSELVALLAPLSGTKEIRGALAAWIQKTGTRRVFCVERLNVIPIHDRRTGLPYRYVKGDSNYCYEIYRQSDGKWGGEVISTFEANQRGFDPHASTSRSGQPLLFRLHKDDVLALEADSSFRLVRVARFTDGMIALIDLHEANVDARTRTKGGGLKYLFKAPGTLRPLKARIVGVNVLGYVNDPGPLE

SEQ ID NO: 5848 - protein, 1061 aa, synthetic construct
  REGION 1..1061: note = Synthetic
VAKIKYRLGVDLGANSLGWCVYRLDAQDEPDKIVRLGSRIFADGRDPKTLASRAADRRQARQARRRRDRVLKRRHKLMQALIKLGLMPADGAARKAMQGSDPYALRARGLDQPLALHELGRALYHLARKRGFRSSKKDTRGDDAAKEAGKVNQAIAMLRARVQEAGCRTVGEYLAYQHAERAPVRARRSSDGGYVLYLQRTMVEEEFDALWQAQQAHHPDVLTDTAREILRDILLFQRRLKPVEAGRCLFEPSEYRARLCAPLQQRFRMLQELNHMRVKDGIEERALTLDERNRMLAVLEKDVGPRPVSFAKLAKAAGLRTSDFNLGRDGKRTGLRGDAVGSRFASDNALGNAWMSLSSTQQYAMAVLTTLADQVPVLEAALLALPANSPACEDILKGVFDKDEREAVALVLQSLPLRLSEAQARTVASFNLPDDYGSLSLKALARIVPELEREVVTYDEAVRRAGYTSHSQLHTGEIFSRLPYYGEVLAGYTAPTPTAKNPDEQRYGKIPNPTVHIGLNQLRLLVNALIKRYGSPHQIVIELTREFGASGEKRREITSRQKENQERNAAYDQELRALGVRANRENRQKLQLWEELGKDDAMDRFCIYSGKHLSKTMLFSDEVEIDHILPFSQSLHDGIGNKILCTRQSNRDKGNRTPFEAWGHTEGWADIEARAERLPAHKRKLFREAALQELLGDGDFLARHLTDTAYLSRAAKQYLSYVCPQNEVWVSSGKLTGMIRGKFDLSRLLSEDASKNRNDHRHHALDAAVIGLCSRSLIQRMANAAARAEEHGENRLLERLDLPWPSYRDELDSALAAVVVSHKPDHGKQAALHNDTNYGLRGSPDKRGNPLVGRRQTLDSIKNAKDAESIAGEALREEIVRLLAPLSSPKEIKAALEAYSARTGVRRVICEKRLSVIPIMDRRNGQPYRYVKGDGNYCYEIFRKPDGRWDGEVISTFEANQKGFKESATHAQNGMPLVMRLHKDDVLAINDGDSMTKMVRVAYFTPGKIAMVGIVEANADARVRAKHLNYLFKTPSTLRSLCARAVGVDVLGYVNDPGFKG

SEQ ID NO: 5849 - protein, 1031 aa, synthetic construct
  REGION 1..1031: note = Synthetic
MKFKKRYRLGLDIGTNSIGWCVLQLSDDDQPIGIIRAGSRIFSDGRSPKTLASLAADRRAARQMRRRHDRVLKRQTRFMDGLIRFGLMPNDDDERLALSALDPYELRHKGLDEPLTAFELGRALYHLAKRRGFKSSRKSKGENENEAGKIATAIGKTRERIAAAGCRTMGEYLAKRHEQRETVRARTTADGKEYLLYTQRAMVAEEFDALWAAQAPHHPNVCTEAARAFLRDTLLFQRPLLPVQPGRCIFETEEFREPLWSPLQQQFRVLQELNNLRVIEGLEERPLTLDERNTLRDALYRKREMTFAAIVRALKLPKDTRFNLESEKRKGLKGDVVASQLGVENSLGDAWFAMSRQQQRDLAELIDIIDDTEELKSRLMDGPWRFDAAIAAQLAKARLPEDYGSLSRKALEKIVPILDADVITYDKAAQKAGYNHSDFYTGEIFERLPYYGEILRSYTSPTPKAKDPNERTFGKLANPTVHIGLNQLRQLVNEIIRRWGHPTEIIVELARDFGLSGQKRRDLEGEQAKNQGRNEKLNQRLSALGQRENRENRQRLMLWDELGREDANDRHCIYSGQRFSMSQLFDGTVEIDHILPFSRSLDDSLSNKVLCLSRANRDKKNSTPFEAFGHSPSGYDWKEIEERAARLHKNKAKRFKENALQNFLGEKDFLDRHLTDTAYLSRVARQYLTAVCPPNKVWVATGRLTAMLRQKYGLNEILDPEHKGKNRDDHRHHAVDAAVIAVCDRSLIQRISTAAKKAEADGENRLLKSLDVPWVGFREELAEVVRRIVVSHKPDHGREAGLHNDTNYGQRGEPNASGAMLVSVRKPLTALTPKNVDAVADPALRGELKKLLDGLSGQELKAALDAYTIRTGVRRIRMEERLSVIPIQDRATKQPYRYVKGDGNYCYDIYRTENGKWNGDVVDIYTANQPDFDPKSKTAYSSGKSLVMRLRKGDILKLEHDGRFKLMRVALFSRNGVALHEHNESNVDARDRDRENSFSYIRKGADPLRKLGARLVGVDILGYINDPGFKE

SEQ ID NO: 5850 - protein, 1366 aa, synthetic construct
  REGION 1..1366: note = Synthetic
MKKILGLDLGTNSIGWAFIKEAENDNEKSEIVNTGVRIVPLTTDEETDFKKGNTISINADRTLKRGARRNLQRFKQRRDNLLEIFKKIKFIPNNFTYAETGTATTFSSYELRAQAANDKISKEELVKVLLMINKKRGYKSSRKAKSAEEGEAIDGMKIAKELFDNNYTPGQWVFTSLSKGKTFIPDFYRSDLQKELEKIIAFQNQFHPQIINDELFEAIQGKNRTFTSQYFSKTLNIPLVENKGTKEETKLQHYKWRNEAISTELDLEIIAFIITEINNQINKSSGYLGAISDRSKELYFNQETVGQFLCRQLKNNNHAKLKNQVFYRQDYLDEFEKIWETQAKFHSELNEDLKKEIRDITIFYQRKLKSQKHLVSFCEFEKGHKVIPKSSPLFQEFRIWQNINNIVVKNEITKESFLLEEELKQQLAQELFFKENFSDSQFITFCGLKKTDYSVNFKKIEGNRTNTEIYKAFEKILVVEGYDELDISKLEPLEISKVFKTAFTDLGINTSLLDFDPTVQGNDFDKQPYYQLWHLLYAAEDDDKLKESLKSKFGFKEEHLPFLLNVKLQADYGSLSARAIKKILPHLMDGHIYDKACELVRLDNIKNLTNKGLEIKEAKKIAGYNHSSSLTKEQNNDRVLKDTLELLKKNSLRNPVVEKILNQMINVINAIINDPMMGKPDEIRVELARELKNNNEQRKEMTNSINKATAEHEKIRKILHTEFGFPRVTRNDIIRYKLWKETDGISLYTGQPIEASKLFTKEYDIEHIIPKSRLFDDSFSNKTICERRLNIDKSNKTAYSFLKEKLSIEEFEQFEQRVKSFYGKISRTKQNKLLMADHEIPEGFIERQLRETQYIAKKAKEILLEVSRNVTTTIGSVTDKLREDWELVEIMKELNWNKYDKLGLTYEDKGKSGERLYKIKDWSKRNDHRHHAMDALTVAFTKPAYIQYLNNLNAKTQGEQKAKSILGIENKHLYRDKNNKLRFIAPIPNFREEAKKHLERILISYKAKNKVVTNNKNSIKIKGDVLEKIQLTPRGQLHKETIYGKLQQYVTKEEKINASFDEKRIQLVAKKQYRELLLKRLQENSNDPKKAFTGKNSLAKTPIYISLENNSVVPEKVKLVWLEDNYTIRKDITPDLKIDKVIDVGLKKILQARLDKFGGDAKKAFVNLEGSPIWQNKEKGIALKRVTISGVSNALALHTKKNHFGNEILDGNGKPVPVDFVSTGNNHHVAIYRDEKGNLQEEVVSFFDAVVRKNLGLPIINKNHEKGWEFLFSMKQNEYFVFPSDDFNSHEIDLINPDNYHLISPNLFRVQKFTIKDYFFRHHLETTVGDNKELKDISFKRVGLNGINDIIKVRLNHLGQIVQIGE

SEQ ID NO: 5851 - protein, 1364 aa, synthetic construct
  REGION 1..1364: note = Synthetic
MKKILGLDLGTTSIGWSFINEADNDNETSSIINTGVRITQFDNFSKVDKNGKVTESKNPVVDFNSGNGLSPNAGRTLKRGARRGLQRFKQRRNALLETFNRIKFIAPDFVYAETGTATTFSSYQLRAKAAVEAVSKEELVQVLLMLNKKRGYKSSRKAKTAEEGDAIDGMKIAKEIFENNLTPGQWVYNSLSKGGKFIPDFYRSDLQKELEKIVRFQNQFHSVQINDKLLEDIQGKSRTQTSQHFSKTLNIPLAENKGTREETKLQHYKWRNDALANELDLKVLAFIITEINNQINQSSGYLGAISDRSKELYFNQETVGQFQYKQLQKNTHAKLKNQVFYRQDYLDEFEKIWEIQTRFHPELNDKLKSEVRDITIFYQRKLKSQKHLVSFCEFEKGHKAIPKSSPLFQEFRIWQNINNIEFKKDKEVYPIGEELKQIISQDLLFKESMTDAQFIKFIVNQCKLEKGNYSINFKKIEGNRTNTEIYKAFEKILVLEGYDELDLSKLESLDIKNIIKSAFSDLEINTAILDFDPTIQGNDFDKQPYYQLWHLLYSAEDDDKLKETLKNKFGFKENHIPYLLNIKLQADYGSLSAKAIKKILPNLMDGHIYDKACLMVGYNHSSSLTTEQNNERVLKDNLELLKKNSLRNPVVEKILNQMINVINAIMKDPAMGKPDEIRVELARELKANNEQRKKATSDINTTTTEHERIRKLLHSEFNIPRVTRNDIIRYKLWLETGGISLYTGNPIKGSDLFSKDYDIEHIIPKSRLFDDSFSNKTLCERQLNIDKSNKTAYSFLQEKLLENDFAEYENRVKDLFKTGKIKSYTKYKKLLMADNEIPEGFIDRQLRETQYIAKKAKEILLEISRNVTATIGSVTDKLREDWELVDVMKELNWEKYDKLGLTHIEEGKHGERLYKIKDWTKRNDHRHHAMDAITVAFTKPAYIQYLNSLNAKTQGEEKAGAIYGIETKYLERDKNNKLRFKAPMENFREEAKKQLESILISYKAKNKVVTKNKNITKKSGGTNQKIQLTPRGQLHKETVYGKLQQYATKEEKVNANFTEEYIQKVAKKEYREALLKRLQENGNDPKKAFTGKNALNKTPVYVSLKDNIVVPEKVKIVWLEADYTIRKDITPDLKIDKVIDIGLKTILQNRLNEFNGDPKKAFVNLDENPIWQNKEKGIAIKRVSISGVSNAQALHTKKDHFGNEILDENNNPIPVDFVSTGNNHHVAIYKDEKGNLQEEVVSFYDAVVRRNLGLSVINKTHEKGWEFLFSMKQNEFFIFPSESFNPHEMDLLNPSNYHLISPNIFRVQKFTIKDYFFRHHLETTVEDKKELKDISFKRLGINGINNITKVRINHLGQIVQLGEY

SEQ ID NO: 5852 - protein, 1358 aa, synthetic construct
  REGION 1..1358: note = Synthetic
MKKILGLDLGSASIGWAFVHESDDIDEKSEIINTGVRIVPLTTEEESDFKKGNTISINADRTLKRGARRNLQRFKLRREALLEIFKEVGFIPEDYHYAEDREHTTFSTYELRAKAANEMISKEELVKVLLMINKKRGYKSSRKAKSEEDGQAIDGMAIAKELYNKDITPGQWVYASLSEGGKYIPDFYRSDLISEFEKIVYFQNQFYPEVFNDNLLEVIKAEKSKVYDYFKALHIELAENKGNYQEKRLQQYEWRANAVKQQLTVQETAYILTEINKQINNSSGYLGAISDRSKELYFNNLTVGQYLYRQLAENPHISLKNQVFYRQDYMDEFDRIWEVQSKYHKELTEALRKEVRDITIFYQRRLKSQKHLISHCEFEKQHRVIPKSSPLFQEFRIWQNINAIIIKNTETKETLLLDEDDKKSLDEELNFKDNLTDLQLLKFFNLDKRVHEVNLKKIEGNRTNTALYKAFEAVFRQEGQDDLDFSKMNAEDIKSTTASLFKDLNIDTRILDFNAELQGNDFDKQSYYQLWHLLYSAEDDAKLKKTLQEKFGFKPEHTHHIANIDLQTDYGNLSAKAIKKILPHLKDGLIYDKACAMAGYNHSSSLTKEENENRRLEEKLELLKKNSLRNPVVEKILNQMINVVNAIIADPAMGTPDEIRVELARELKANSEQRGEMTKAINKATKEHEEIRALLKSEFGLPRVTRNDIIRYKLWKETDGISLYTGKPIEASKLFTKEYDIEHIIPKSRLFDDSFSNKTLCERQFNIDKSNRTAFSICQEKHSEFDFEQYQSRVNDLFKTGKIKYTKYKKLLMPDNEIPEGFIERQLRESQYIAKKAKELLREVSRNVNSTIGSITDKLREDWQLVEVMKELNWEKYHKLGLTREETGKGGERLKKIDEWTKRNDHRHHAMDAITVAFTKDVYIQYLSNLNARDKGDKKADNILGIEKKYLLKDKGKLKFKSPIPNFREEAKKHLENIIVSYKAKNKVVTKNKNITKTAKGTKTKEQLTPRGQLHKETVYGKIIQYVTKEEKVNASFTAEVINTIVKKDYRNALLDRLAAYDNDPKKAFTGKNGLTKNPVYLHSNTQVVPDKVETSIPIEIYTIRKEVTPDNFKDEKSINKVIDAKVRELLLNRLQEYGDAKKAFSNLDENPIWLNKEKNITVKRVTISGVSNVEALHTKKDYKGNEVLDKDGKPIPADFVSTGNNHHVAIYKDEKENLQDNVVSFYEAVIRKNLGLPIIDKNHKNGWEFLFTMKQNEFFVFPNIETGFDPATIDLLDPKNREIISPNLFRVQKFSKVEYGNSAVRDYVFRHHLETTLNDAKELKDVTYKSIKSLPYLKDIIKVRVNHLGQIVQVGEY

SEQ ID NO: 5853 - protein, 1354 aa, synthetic construct
  REGION 1..1354: note = Synthetic
MKKILGLDLGTNSIGWAFINEAENEIEVSSIVNTGVRIVPLTTDEESDFKKGNTISINADRTLKRGARRGLQRFKQRREALLETFNRIKFIATDFVYAETGAATTFSSYQLRAKSAVEAVTKEELVKVLLMLNKKRGYKSSRKAKTAEEGDAIDGMKIAKEIFENNLTPGQWVYNSLSKGGKFIPDFYHSDLQKELEKIVRFQNQFHSEQINDKLLADIQGKSRTQTSQHFSKTLNIPLAENKGTREETKLQHYQWRNEALANELDMKILAFIITEINNQINQSSGYLGAISDRSKELYFNQETVGQYQYKQLQENVHAKLKNQVFYRQDYLDEFEKIWETQAKFHSELNEKLKAEIRDITIFYQRKLKSQKHLVSFCEFEKGHKAIPKSSPLFQEFRIWQNLNNVVVKNETTKEVFELSEELKQLIAEELQFKESMTDVQMLTFCELKKGTHTVNFKKIEGNRTNTSIYKAFEKILEVEGYEIDFSKMKPLEIKETVAPIFETLNINTVILDFDPTIQGNDFDKQPYYQLWHLLYSAEDDDKLKETLKTKFGFKENHLPFILNINLQADYGSLSAKAIKKILPHLMDGHIYDKACLMVGYNHSSSLTTAQNNDRVLKDTLELLKKNSLRNPVVEKILNQMINVINAIMKDPAMGKPDEIRVELARELKANNEQRKKATSDINTATTEHERIRKLLHSEFNIPRVTRNDIIRYKLWLETGGISLYTGNPIKASDLFSKNYDIEHIIPKSRLFDDSFSNKTLCERQLNIDKSNKTAYSFLQEKLSENDFAAYENRVKDLFKTGKIKSYTKYKKLLMADNEIPEGFIDRQLRETQYIAKKAKEILLEVSRNVTATIGSVTDKLRQDWELVDVMKELNWEKYDKLGLTHIEEGKNGERLSKIKDWTKRNDHRHHAMDAITVAFTKPAYIQYLNNLNAKTQGENKANSIIGIENKHLYRDKNNKLRFISPMKNFREEAKKQLESILISYKAKNKVVTKNKNTTKKSGGTNQKIQLTPRGRLHKETVYGKLQQYATKEEKVNASFTEDYIQKVAKKEYREALLKRLEENDNDPKKAFTGKNALNKTPIYISLKDNIIVPEKVKTVWLETDYTIRKDITPDLKIDKVIDVGIKRILQNRLNEFNGDPKKAFVNLGESPIWLNKEKGIAIKRVTISGVSNAQALHTKKDHLGNEILDKNGNPIPVDFISTGNNHHVAIYRDEKGNLQEEVVSFYDAVIRRNLGLSVINKNHEKGWEFLFSMKQNEFFIFPSDGFNPHEIDLLNPNNYHLISPNIFRVQKISTKNYMFNHHLETKAVDGEMLKSKKELSKTSYHFIQTPTNLNGIIKVRINHLGKIVHLGEY

SEQ ID NO: 5854 - protein, 1353 aa, synthetic construct
  REGION 1..1353: note = Synthetic
MKKILGLDLGTTSIGWAYINEAENESEISSIINSGVRIVPLTTDEEADFKKGNTISINADRTLKRGARRGLQRFKQRRNALLQTFRGNNFITSNYVYAETGKQTTFSSYKLRAKSATEQVSKEELVQVLLMLNKKRGYKSSRKAKTAEEGDAIDGMKIAKELNDKNQTPGEWIYNSLLNGGKFVPEFYRSDLQTELERIIRFQNQFYPEIFNSKLLEEIQGKTRTATSQHFTKILKIELSENKGTREQTKLQHYKWRNDSLSCALDLKVIAFILTEINNQINQSSGYLGAISDRSKELYFNQETVGQFQFKQLEQNSHAKLKNQVFYRQDYVDEFEQIWETQSKFYPELDEKLKIEVRDITIFYQRKLKSQKHLVSFCEFEKGHKAIPKSSPLFQDFRIWQNLNNIVVKNETTKEPFLLGEELKNNIAQELLFKESMTDIQMLTFCELKKGTHTVNFKKIEGNRTNTALFKAFEKILTIEGYDLDFTKMSHSEIRNAISPLFETIGIDTSLLYFDNSIEGNDFDKQPYYQLWHLLYSAEEDEVLKQTLMKKFGFKENHIPFLLNINLQADYGSLSARAIKKVLPHLMDGHIYDKACLLTGYNHSSSLTTEQNESRILKNQLELLKKNSLRNPVVEKILNQMINVINAIIEDPNMGKPDEIRVELARELKANNEQRNEMTKAINNATKTHDDIRKLLAVEYGIARVTRNDIIRYKLWKETGGISLYTGKPIEPSRLFTKDYDIEHIIPKSRLFDDSFSNKTLCERTLNIEKSNKTAYSFLQEKLTEEEFDQFEKRIKGMFGKISRTKQNKLLIADNQIPEGFIDRQLRETQYIAKKAKEILLEVSRNVTATIGSVTDKLREDWELIDVMQELNWNKYDTLGLTYEEKGKNGERLYKIKDWTKRNDHRHHAMDAITVAFTKPAYIQYLNNLNARTNTDKKGNSIIGIENKYLKRDKNNKLRFIEPMPNFRSEAKKQLESILISYKAKNKVVTNNKNITKKIGGTNQKLQLTPRGQLHKETVYGKMQQYATKEEKVNANFTQDYIAKVAKKEYREALLKRLSENDNDPKKAFTGKNSLAKTPIYISLEDNIVVPEKVKIVWLEDNYTIRKDITPDLKLEKVIDVGLRQILQNRLNEFKGDAKKAFVNLDENPIWQNKAKGIAMKRVTISGVSNALALHTKKDNFGNEILDKDENPIPVDFVSTGNNHHVAIYRDEKGNLQDEVVSFYDAVVRKNLGLSIINKTHKYGWEFLFTMKQNEYFIFPSDSFDPQEVDLFNPANYHLISPNMFRVQKFSKVEYGNSSVRDYVFRQHLETTLNDKKELKDIAFKSIKSLPYFSNIIKIRINHLGQIVQIGEY

SEQ ID NO: 5855 - protein, 1353 aa, synthetic construct
  REGION 1..1353: note = Synthetic
MKKILGLDLGTTSIGWSFINESESENETSSIINTGVRIVPLSTDEEADFKKGNTISINADRTLKRGARRGLQRFKQRRNALLETFSKIKFIPRDFIYAETGKETTFSSYQLRAKAAVEAVTKEELVQVLLMLNKKRGYKSSRKAKTAEEGEAIDGMKIAKEIFENNLTPGQWVFNSLSNGGKYIPDFYRSDLQKEMEKIVYYQNPFHSEQMNNKLLEDIQGKSRTQTSQHFTKTLKIELAENKGTREETKLQHYKWRDEALTNELDLKVLALILTEINNQINQSSGYLGAISDRSKELYFNQETVGQFQYKQLQKNVHSKLKNQVFYRRDYLDEFENIWETQTRFHPELNDKLKSEVRDITIFYQRKLKSQKHLVSFCEFEKGHKAIPKSSPLFQEFRIWQNLNNVVVKNEITKEPFLLDEDLKKLITQELLFKDSMTDSQLLNFCGLKKAEYSVNFKKIEGNRTNTEIYKAFEKILVLEGNDELDISKLDAIDIKTTIKSVFSDLEINTKLLNFDTTIQGNDFDKQPYYQLWHLLYSSEEDEPLKKTLMTKFGFKDNHIPFLLNVKLQADYGSLSAKAIKKILPHLMDGHIYDKACLLVGYNHSSSLTTEQNNERILKNTLELLKKNSLRNPVVEKILNQMINVINAIIADSTMGKPDEIRVELARELKNNNEQRSEMTKEINKSTAEHEQIRKLLHTEFGIHRVTRNDIIRYKLWKESDGISLYTGKPIEPSKLFSKEYDIEHIIPKSRLFDDSFSNKTICERQLNIDKSNKTAYSFLKEKLTPEEFDQFEKRVRGLFGKVSRTKQNKLLMADSDIPEDFIARQLRETQYIAKKAKEILLEVSRNVTTTIGSVTDKLREDWELVDVMKELNWDKYHKLGLTKEEEGKNGERLYKILDWTKRNDHRHHAMDAITVAFTKPAYIQYLNNLNAKTQGEKKAGAIYGIETKYLERDKNNKLRFKSPMKNFREEAKKQLENILISYKAKNKVVTKNKNITKKSGGTNQKIQLTPRGQLHKETVYGKLQRYETKEESVNAKFTKEYIAKVAKKEYREALLKRLQQNNNDSKKAFTGKNALNKIPIYISLKDNIVVPEKVKIVWLEDNYTIRKDITPDNFKDIKSTAKVMDSGLKTILENRLAEFGGDAKKAFVNLDENPIWQNKEKGIAIKRVTISGVSNAQALHTKKDHLGNEILDENENPIPVDFVSTGNNHHVAIYKDEKGNLQEEVVSFYDAVVRINLGLSVINKNHKKGWEFLFSMKQNEFFIFPSESFNPHEMDLLNSSNYHLISPNIFRVQKFGSLLSGFWFRHHLETQIETPKELKGITFKVIQSANNLKDIIKVRINHLGQIVQLGEY

SEQ ID NO: 5856 - protein, 1352 aa, synthetic construct
  REGION 1..1352: note = Synthetic
MKKILGLDLGTTSIGWAFINEGENDNETSSIINAGVRIVPLTTDEEADFKKGNTISINADRTLKRGARRGLQRFKQRRDALLQSFRGINFISSNYVYAETGKQTTFSSYKLRAKSATELVTKEELVQVLLMLNKKRGYKSSRKAKTAEEGDAIDGMKIAKEIFENNLTPGQWVYNSLSIGGKFIPDFYRSDLQKEVEKIVRFQNQFHPEQMNEKLLENIQGKARTVTSQYFSRILNIPLAENKGTREETKLQHYKWRNEALTEELDLKVLAFIITEINNQINQSNGYLGAISDRSKELYFNQETVGQFQYNQLKENAHTKLKNQVFYRQDYLDEFEKIWETQSKFYPELNDELKSEVRDITIFYQRKLKSQKHLVSFCEFEKGHKAIPKSSPLFQEFRIWQNINNIVVKNETTKEPFLLGEDLKKVIAQELSFKESMTDSQLLTFCDLKKGTHTVNFKKIEGNRTNTSLFKAFEKILVLEGYDELDLSKLDASDIKSIIKSAFSDLEISTAILDFDPTIQGNDYDKQSYYQLWHLLYSSEEDDFLKKSLMDKFGFKESHLPFLLNINLQADYGSLSAKAIKKVLPHLMDGHIYDKACTLVGYNHSSSLTTDQNNERVLKDTLELLKKNSLRNPVVEKILNQMINVINAIIKDPAMGKPDEIRVELARELKNNNEQRSEMTKAINKSTTEHEQIRKLLHTEFGIHRVTRNDIIRYKLWKECDGISLYTGKPIEPSKLFTKDYDIEHIIPKSRLFDDSFSNKTICERQLNIDKSNKTAYSFFQEKLSAEEFDQFEKRVKSLFGKISRTKQNKLLMANNEIPEGFIDRQLRETQYIAKKAKEILLEVSRNVTATIGSVTDKLRDDWELVDVMKELNWEKYDKLGLTYIEEGKNGERLYKIKDWTKRNDHRHHAMDAITVAFTKPAYIQYLNNLNARTNTDKKGNSIIGIENKYLKRDKNNKLRFIEPIPNFREVAKKQLESILISYKAKNKVVTKNKNVTKKSNGTNQKIQLTPRGQLHKETVYGKLQQYVTKEEKINANFTPEYVTKVAKKEYREALLKRLIENENDPKKAFTGKNALSKNPIYISLENNILVPEKVKIVWLKSDYTIRKDITPDLKIDKVIDIGLKTILQNRLNEFNGDTKKAFVNLDENPIWQNKEKGIAIKRVTISGVSNAQALHTKKDHLGNEILDENGQPLPVDFVSTGNNHHVAIYRDEKGNLQEEVVSFFEAVTRNNLGLSIINKNHEKGWEFLFSMKQNEFFIFPTDGFNPHEIDLLNTENYHLISRNMFRVQKIATKNYMFNHHLETKSVDGEMLKTKKQLSKISYHFIQTPSYLNYIIKIRINHLGQIVQLGEY

SEQ ID NO: 5857 - protein, 1351 aa, synthetic construct
  REGION 1..1351: note = Synthetic
MKKILGLDLGTTSIGWSFINEADNDNEESSIINTGVRIVPLTTDEEADFKKGNTISINADRTLKRGARRGLQRFKQRRDALLESFNKIKFIPSTFIYAETGKKTTFSSYKLRAKSATEAITKEELVKVLLMLNKKRGYKSSRKAKTVEEGEAIDGMAIATILFEKNITPGQWVFNSLSNGGKYVPDFYRSDLQKELKKIVHFQNQFHSEQINDKLLEDIQGKSRTQTSQHFTKELKIELAENKGTREETKLQHYKWRNAALINELDLKVIAFIITEINNQINQSSGYLGAISDRSKELYFNRETVGQFQYKQLKNNTHSKLKNQVFYRQDYLDEFERIWETQAKYHPELNDKLKSEVRDITIFYQRKLKSQKHLISHCEFEKGHKAIPKSSPLFQEFRIWQNLNNIVVKNETTKEPYLLSEELKQQIADELQFKDSLTDIQLMAFCELKKGSHSVNFKKIEGNRTNTALFKAFEKILEVEGYEMDFSKMNPFEIKEAIVKIFETLNINTNILDFDPTIQGNEFDKQPYYQLWHILYSSEEDEPLKKTLINKFNFKENHIPFLLNINLQADYGSLSAKAIKKVLPHLMDGQIYDVACSLSGYNHSSSLTKEANNSRILKDTLDLIKKNSLRNPVVEKILNQMINVINAIIADPTMGKPDEIRVELARELKNNNEQRSEMTKAINKSTAEHEQIRKLLHTEFGIHRVTRNDIIRYKLWKESDGISLYTGKPIEPSKLFSKEYDIEHIIPKSRLFDDSFSNKTICERQLNIDKSNKTAYSFLQEKLSPEEFDQFEKRIKSLFGKISRTKQNKLLMADSDIPEGFIDRQLRETQYIAKKAKEILLEVSRNVTATIGSVTDKLREDWELVEVMKELNWDKYHKLGLTKEEEGKNGERLYKIQDWTKRNDHRHHAMDAITVAFTKPAYIQYLNNLNARDINTKKGNSILGIESKYLKRDKNNKLRFIAPMKNFREEAKKQLESILISYKAKNKVVTNNQNKTKIKGGSNEKTQLTPRGQLHEATIYGKLQQYATKEEKVSASFTQEYINKVAKKQYREALLNRLAENSNDPKKAFTGKNALAKNPIYLDAEKTETVPEKVKIVWFENNYTIRKDITPDLKIDKVIDIGLKTILQNRLNEFNGDTKKAFVNLNENPIWQNKEKGIAIKRVSISGVSNAQALHIKKNHLGNDILDENGNAIPVDFVSPGNNHHVAIYRDEKGNLQEEIVTFYDAVIRKNLGLSIINKNHEKGWEFLFSMKKNEFFIISNETLNTDDIDLFNPNNYNLISPYLFRAQSISSKYYIFNHHLETRNADGNLFKNYKNLSGITYNFFQTTNKLKNLTKVRINHLGQIVQIGEY

SEQ ID NO: 5858 - protein, 1349 aa, synthetic construct
  REGION 1..1349: note = Synthetic
MKKILGLDLGTTSIGWAYIHEAENNDETSSIINSGVRIVPLTTDEESDFKKGNTISINADRTLKRGARRGLQRFKQRRDAILETFNKIKFISTGFVYAETGKSTTFSSYQLRAKAAVEPVSKEELVQVLLMLNKKRGYKSSRKAKTAEEGDAIDGMKIAKEIFENNLTPGQWVYNSLSKGSRFIPDFYRSDLQKELEKIVRFQNQFYPEQINNKLLEDIKGKSRTQTSQYFSKTLKIELAENKGTREETKFQHYKWRTEALTKELNLKILAFILTEINNQINQSSGYLGAISDRSKELYFNQETIGQFQYKQLKKDPHAKLKNQVFYRQDYLDEFEKIWETQRQFHSELNDLLKTEVRDVTIFYQRKLKSQKHLVSFCEFEKGHKTIPKSSPLFQEFRVWQNLNNVVVKNEATKESFILDEDLKKNISQQLLFKESMTDSQILSFCELKKGTYSVNFKKIEGNRTNTEIYKAFEKILVLEGYDELDLSKLHAFEINEVIKSAFSDLEINTDILDFDTNIQGNNFDKQSYYQFWHLLYSAEDDDFLRKSLMSKFGFKENHIPFLLNINLQADYGSLSAKAIKKVLPHLIDGHIYDKACTLVGYNHSSSLTTEQNNGRILKDTLELLKKNSLRNPVVEKILNQMINVINAVLEDPTLGKPDEIRVELARELKNNNEQRSEMTKAINKSTAEHEQIRKLLHKEFGIHRVTRNDIIRYRLWKECDGISLYTGKPIPPSMLFTKDYDIEHIIPKSRLFDDSFSNKTICERQLNIDKSNKTAYSFLQEKLSMEEFDQFEKRVKSLYGKISRTKQNKLLMADNEIPEGFIERQLRETQYIAKKAKEILLEVSRNVTSTIGRITDKLREDWELVDVMKELNWNKYDKLGLTYIEEGKNGERLYKIKDWTKRNDHRHHAMDAITVAFTKPAYIQYLNNLNGKTQGDKKADSIYGIEAKYLRRDKNNKLRFIEPAPNFREDVKKQLENILISYKAKNKVVTKNKNITKMQGGTNERIQLTPRGQLHKETVYGKLQQYVTKEEKVGGAFTAEYIKKVAKKKYREALLKRLLENENDPKKAFTGKNALHKTPVFICEKENSIVPEKVKTVWLEADYTIRKDITPDLKVEKVIDIGLKTILEERLAEFGNDPKKAFINLDENPIWQNKEKGIAIKRVTISGVSNAQALHTKKDHFGNEILDKNGKPIPVDFISTGNNHHVAIYKDEKGNLHEEVVSFYDAVVRKNLGLSVINKNHEKGWEFLFSMKQNEFFIFPSENFNPHEIDLLNPSNYHLISPNIFRVQKFGELGSSGFWFRNHLETTLDNSKPLKSTTYKDIYSHKALENIIKVRINHLGKIVQLGEY

SEQ ID NO: 5859 - protein, 1348 aa, synthetic construct
  REGION 1..1348: note = Synthetic
MKKILGLDLGTTSIGWAYIHEAENNDETSSIINSGVRIVPLTTDEEADFKKGNTISINADRTLKRGARRGLQRFKQRRDALLETFNKIKFISTGFVYAETGKETTFSSYQLRAKAAIEPVSKEELVQVLLMLNKKRGYKSSRKAKTAEEGDAIDGMKIAKEIFENNLTPGQWVYNSLSKGSRFIPDFYRSDLQKELDKIVRFQNQFYPEQLNNKLLEDIQGKSRTQTSQHFSRTLKIELAENKGTREETKLQHYKWRNDALTNELDLKILAFILTEINNQINQSSGYLGAISDRSKELYFNQQTVGQFQYKQLEKDPHAKLKNQVFYRQDYLDEFEKIWETQRQFHSELNDLLKTEVRDVTIFYQRKLKSQKHLVSFCEFEKGHKAIPKSSPLFQEFRVWQNLNNIVVKNETTKEPFVLDEDLKKILAQQLLFKDSITDSQLLSFCELKKGTHTANFKKIEGNRTNTEIYKAFEKILVLEGYDELDLTKLDAFEINKIIKSAFSDLEINTDILDFDTNIQGNDFDKQPYYQFWHLLFSAEDDDFLKKSLMSKFGFRENHIPFLLNVILQADYGSLSAKAIKKILPHLIDGHIYDKACTLVGYNHSSSLTAEQNNNRVIKDTLELLKKNSLRNPVVEKILNQMINVINAILKDPTLGKPDEIRVELARELKNNNEQRSEMTKAINKSTVEHEQIRKLLHHEFGIHRVTRNDVIRYKLWKECDGISLYTGKPIEPSKLFTKDYDIEHIIPKSRLFDDSFSNKTICERQLNIDKSNKTAYSFLQEKLSAEEFDQFEKRVKSLFGKISRTKQNKLLMADNEIPEGFIERQLRETQYIAKKAKEILLEVSRNVTSTIGSVTDKLREDWELVDVMKELNWDKYDKLGLTHIEEGKNGERLYKIKDWTKRNDHRHHAMDAITVAFTKPAYIQYLNNLNAKTQGDKKADSIFGIETKYLKRDKNNKLRFIEPMPNFREEAKKQLESILISYKAKNKVVTKNKNITKKGGGTNQKTQLTPRGQLHKETVYGKLQQYGTKEEKVGVNFTAELINKVAKKQYREALLNRLSENKNDPKKAFSGKNTLSKNPIYLDVNKTIELPEKVKLVWLESDYTIRKDITPDLKIDKVIDIGLKSILQSRLNEFGGDPKKAFINLDENPIWQNKEKGIAIKRVTISGVSNAQALHVKRDHFGTEILDDNGTSIPVDFVSTGNNHHVAIYRDAKGNLQEKIVSFYEAVTQISLGLSIIDKDYRKSEGWGFVFTLKQNEYFIFPSEGFNPQEIDLLNPSNYSLISPNLFRVQKLGTKDYNFRHHLETQLLDNSKLNNIAYKRIRSPKELSTIVKVRINHLGQFVQLGEY

SEQ ID NO: 5860 - protein, 1348 aa, synthetic construct
  REGION 1..1348: note = Synthetic
MKKILGLDLGTTSIGWSFINEAENDNETSSIINTGVRIVPLTTDEEADFKKGNTISINADRTLKRGARRGLQRFKQRRSALLEIFSKIKFIPTDFVYAETGSATTFSSYRLRAKSATEAITKEELVQVLLMLNKKRGYKSSRKAKTTEEGDAIDGMKIAKEIFDKNLTPGQWVYNSLSKGGKFIPDFYRSDLQKELEKIVSFQNQFHPEQMNDKLLEDIQGKARTVTSQYFSKTLNIPLAENKGTREEIKFQHYKWRNDALANELNLKILAFIITEINNQINQSSGYLGAISDRSKELYFNQETVGQFQYKQLQKNTHAKLKNQVFYRQDYLDEFEKIWETQSKFHPELNDKLKSEVRDITIFYQRKLKSQKHLVSFCEFEKGHKAIPKSSPLFQEFRIWQNINNIEFKKSKEVYAIGEELKQIISQELLFKENMTDNQFIKFIISQCKLEKADYSINFKKIEGNRTNTEIYKAFEKILISEGYDELDISNLETEEIKKIIKSAFSDLEINTDILDFDPKIQENKFDKQPYYQLWHLLYSAEEDEFLKKSLMSKFGFKENHIPFLLNINLQADYGSLSAKAIKKILPHLMDGHIYDKACLMVGYNHSSSLTTEQNNDRVLKETLELLKKNSLRNPVVEKILNQMINVINAIMKDPAMGKPDEIRVELARELKNNNEQRSDMTKAINKSTAEHEEIRKLLHNEFGISRVTRNDIIRYKLWKETDGISLYTGKTIEPSKLFTKDYDIEHIIPKSRLFDDSFSNKTVCERNLNIEKSNKTAYSFLQEKLSPEEFDQFEKRVKSLFGKISRTKQNKLLMADNEIPEGFIARQLRETQYIAKKAKEILLEVSRNVTATIGSVTDKLREDWELVDVMQELNWEKYDKLGLTYEEKGKNGERLYKIKDWTKRNDHRHHAMDAITVAFTKPAYIQYLNNLNAKTQGDKKANSIIGIENKHLFRDKNNKLRFKSPMNNFREEAKKQLESILISYKAKNKVVTKNKNITKKSGGTNQKIQLTPRGQLHKETVYGKLQQYATKEEKVSGSFTKEYIQKVAKKEYREALLKRLEENNNDPKKAFTGKNTLTKTPIYISLKDNIVVPEKVKLVWLEADYTIRKDITPDLKIDKVIDIGLKTILQDRLNDFGNDPKKAFVNLDENPIWQNKEKGIVIKRVTISGVSNAQALHTKKDHFGNEILDENNNPIPVDFVSTGNNHHVAIYRDEKDNLQEEIVSFYDAVVRRNLGLSVINKNHEKGWEFLFSMKQNEFFIFPSDNFNLPEMDLLNPSNYHLISPTIFRVQKLATKNYFFRHHLETTVEEVKELKDIAYRSIRSTSPLNGIIKVRINHLGQIVQVGEY

SEQ ID NO: 5861 - protein, 1346 aa, synthetic construct
  REGION 1..1346: note = Synthetic
MKKILGLDLGTTSIGWSFINEAENDNETSSIINTGVRIVPLTTDEEADFKKGNTISINADRTLKRGARRGLQRFKQRRDALLESFNKIKFISSTFIYAETGKETTFSSYRLRAKSATEAVTKEEFVKVLLMLNKKRGYKSSRKAKTAEEGEAIDGMAIATALFENNLTPGQWVYNSLLNGGKYIPDFYRSDLQKELEKIVHFQKQFHPESINSKLLEDIRGKSRTQTSQHFNKILKIELTENKGSREETKLQHYKWRNDALANELDLKVIAFIITEINNQINQSSGYLGAISDRSKELYFNKETVGQFQYKQLQNNTHSKLKNQVFYRQDYLDEFEKIWETQAKYHPELNDKLKSEVRDITIFYQRKLKSQKHLISHCEFEKGHKAIPKSSPLFQEFRIWQNLNNIVVKNETTKEPHLLSEELKKQIAEVLQFKDGMTDIQLMDFCELKKGSHSVNFKKIEGNRTNTVLYKAFEKLLEVEGYEMDFSKMSSFEIKEAIVKIFENLNINTNILDFDPTIQGNEFDKQPYYQLWHLLYSSEEDETLKKSLMSKFNFKENHVPFLLNINLQADYGSLSAKAIKKVLPHLMDGQIYDQACFLSGYNHSSSLTKEANDIRILKDTLELLKKNSLRNPVVEKILNQMINVINAIIADPTMGKPDEIRVELARELKNNNEQRSEMTKAINKSTAEHELIRKLLHTEFGIHRVTRNDIIRYKLWKESDGISLYTGKPIEPSKLFSKEYDIEHIIPKSRLFDDSFSNKTICERQLNIDKSNKTAYSFLKDKLSPEDFDQFEKRVKSLFGKISRTKQNKLLMADSDIPEGFIDRQLRETQYIAKKAKEILLEVSRNVTSTIGSVTDKLREDWELVEVMKELNWDKYHKLGLTKEEEGKNGERLYKILDWTKRNDHRHHAMDAITVAFTKPAYIQYLNNLNARDINTKKGSSILGIESKYLKRDKNNKLRFIAPMKNFREEAKKQLESILISYKAKNKVVTNNKNRTKIKGGWAEPKTQLTPRGQLHKETVYGKLQLYATKEEKVSASFTAEYISKVAKKQYREALLVRLFENSDDPKKAFTGKNALTKNPIYLDPENTEVVPEKVKMVRFEDNYTIRKDITPDLKIDKVIDIGLKTILQNRLNEYNNDPKKAFVNLDENPIWQNKEKGIAIKRVTISGVSNAQALHTKKDHFGNEIFDEKGNPIPVDFVSTGNNHHVAIYKDGKGNLQEEVVSFYDAVVRQNLGLSIINKNHAHGWEFMFTMKQNEFFIFPTDSFNPQEIDLKNPNNYYLISPNIFRVQKIATKNYMFRHHLETIIEEKNELKDITYRNIRSTSPLSGIVKVRINHLGKIVQLGEY

SEQ ID NO: 5862 - protein, 1345 aa, synthetic construct
  REGION 1..1345: note = Synthetic
MKKILGLDLGSSSVGWAFIHETDETAKIIGAGVRVVPISTDEANDFQKGNAISINKNRTLARGARRGLQRFKLRRDALLRIFKENGFISKDFKFAEQGKNTTHQSFAIRAKAATEQVSPAELVRVLLMLNKKRGYKSSRKGQDASADGVENVGQVIDGMEVAKEMQAKNQTPGQYAFHLLEQNPKTKIPDFYSSDLENEIVKIVEKQLQYHSDLPNDLILLLNNKSKNATYYLFNTRLGIPYAENKGNREEKKFQAYTWRSKAVTQKIDKSEIAFVIGEIKDAIGKSSGYLGNISNRSKELLFNQQTVGQYQYAKLVENPHASQRNMVFMRSDYMHEFDQIWEVQKAHYPQLTDELRKEVRDITIFYQRKLKSQKHLISFCELESRFRVAPKSSPVFQQFRMWQNINNLAVEDNSFEFDEDVRNGIFEILSNAGRLKDSDLLKAIGANPKKDKLNFKEIQGDVTRSQFLQAIISVWESKGYEQDQLGSPIRSVDVQKILSDLNLPTDLLEIDWTLSGNDFDKQVYFQLWHLLYTVEDDEVLVLNLQKKFGFTEELARALLNVRLESNYSSLSVRAMRKILPHMEDGLEYSSAVVCAGYASHSKASLTNEENDARVLLDKLSLVKKNSLRNPVVEKILNQTINVVNAIIESEQFGRPDEIRIELARELRANNEQRKNMTAGIAKATKANDEVRKLLQQEFKLKRVTKNDIVRYKLWHEAGHISIYTGKPIPASDLFTNKFDIEHIIPQSRLFDDSFSNKTLCERDLNIEKSNQTAFSFLSQKWSALEFDQYIARVKELLKSDKISKAKADKLLLSNEQIPDDFIARQLNETQYITKKAKEILLTISHKVNTTTGSITDRLREDWGLTDVMKELNLEKYKLAGLTYEETGKGGERLVKIKDWSKRDDHRHHAMDAITIALTRQAYIQYLNNLNARSDKSGAIFGIEAKYLERIDGKMRFKSPIANIRESFKQILEGILVSHKAKNKVVTKNKNKVKTKFGVKEVTQLTPRGQLHKETVYGKRKQYETNYVAVGLKMNAEVIAQVAKKNERDALLTRLQANDNDPKKAFTGKNNLINNPIYLDGDKKVMLAEKVKLVSMEDVYTKRMAVGPDLDLKKIEKIIDPGVKMRLLARLAEFGGDSKKAFVNLDENPIYLDQAGKIVIKRVTMSGVNNVEALHTKKDLHGNILLNTSGAPIPVDFVSTGNNHHVAIFEDQEGNLQEEIVSFFEAVSRAATGEPIIQRSHNNGWKFLFTMKQNVFFVFPSEEFDPSEINLEDPMNYALISKHLYRVQKFTTKYYVFRHHLETNVSDNNQLMGITWKRITMLNRLKKVYKVRLNHLGQIVRVGEY

SEQ ID NO: 5863 - protein, 1343 aa, synthetic construct
  REGION 1..1343: note = Synthetic
MKKILGLDLGTTSIGWAYINEAENNDEKSVIINSGVRIVPLTTDEEADFKKGNTISINADRTLKRGARRGLQRFKLRRAALLETFYKIKFITSDFVYAEKGKSTTFLSYQLRAKAAVEAISKEDFVQVLLMLNKKRGYKSSRKAKTSEEGDAIDGMKIAKEIFENNLTPGKWVYNSLLSGGKFIPDFYRSDLQKELEKIVLFQNQFHPEQINYKLLEEIKGKSRTLTSQYFTRILKIELSENKGSRDETKLQHYKWRNDALTNELDLKVLAFIITEINNQINQSSGYLGAISDRSKELYFNKETVGQFQYKQLEKNAHAKLKNQVFYRQDYLDEFEKIWETQTKFHPELNEKLKSDVRDITIFYQRKLKSQKHLVSFCEFEKGHKAIPKSSPLFQEFRIWQNLNNVLVKNETTKESFLLDEDLKKLIAQELLFKESMSDAQMLTFCELKKGTHTVNFKKLEGNRTNTSLFKAFEKILVLEGYDDLDLSKLDANDTKQIIKTAFTDLEINIDILDFDPTIEGNDFDKQAYYQLWHLLYSAEEDDALKNSLIGKFGFKENHISYLLNINLQADYGNLSAKAIKKILPHLMDSHIYDKACKLVGYNHSSSLTTEQNNDRILKDTLELLKKNSLRNPVVEKILNQMINVINAIIQDPKMGKPDEIRVELARELKNNNEQRSEMTKAINKSTTEHEQIKKLLHNEFGISRVTRNDIIRYKLWKETDGISLYTGKAIEPSKLFSKEYDIEHIIPKSRLFDDSFSNKTICERQLNIDKSNKTAYSFLQEKLSTEEFDQFEKRVKSFFGKISRTKQNKLLMADNEIPEGFIDRQLRETQYIAKKAKEILLEVSRNVTSTIGSVTDKLRDDWELVDVMKELNWNKFEKLGLTYIEEGKNGERLYKIKDWTKRNDHRHHAMDAITVAFTKPAYIQYLNNLNAKTKGDKKADSIFGIETKYLRRDKNNKLRFIEPMPNFREEARKQLEAILISYKAKNKVVTKNKNITKKSGGINQKIQLTPRGQLHKETTYGKLHQYVTKEEKISANFTKEYIQKIARKEYREALLKRLEENDNDPKKAFTGKNALSKNPINLKNNFVVPEKIKIVWFEDDFTIRKDISPDLKIDKVIDVGLKIILQNRLNEFGGDPKKAFVNLDENPIWQNKEKGIAIKRVTISGVSNAQALHTKKDQLGNEVLNEDGKPIPVDFVSTGNNHHVAIYRDEKGNLQEEVVSFYDAVVRTNLGLSVINKNHEKGWDFLFSMKQNEFFIFPSENFSPNEIDLLNPNNYHLISPNIFRVQKFTIRDYFFRHHLETSVEDKKELKDFSYKRLGLNGINNIIKVRINHLGQIVQLGEY

SEQ ID NO: 5864 - protein, 1224 aa, synthetic construct
  REGION 1..1224: note = Synthetic
MLNKKRGYKSSRKAKTAEEGDAIDGMKIAKEIFENNLTPGQWVYNSLSKGGKFIPDFYHSDLQKELEKIVRFQNQFHSEQINDKLLADIQGKSRTQTSQHFSKTLNIPLAENKGTREETKLQHYQWRNEALANELDMKILAFIITEINNQINQSSGYLGAISDRSKELYFNQETVGQYQYKQLQENVHAKLKNQVFYRQDYLDEFEKIWETQAKFHSELNEKLKAEIRDITIFYQRKLKSQKHLVSFCEFEKGHKAIPKSSPLFQEFRIWQNLNNVVVKNETTKEVFELSEELKQLIAEELQFKESMTDVQMLTFCELKKGTHTVNFKKIEGNRTNTSIYKAFEKILEVEGYEIDFSKMKPLEIKETVAPIFETLNINTVILDFDPTIQGNDFDKQPYYQLWHLLYSAEDDDKLKETLKTKFGFKENHLPFILNINLQADYGSLSAKAIKKILPHLMDGHIYDKACLMVGYNHSSSLTTAQNNDRVLKDTLELLKKNSLRNPVVEKILNQMINVINAIMKDPAMGKPDEIRVELARELKANNEQRKKATSDINTATTEHERIRKLLHSEFNIPRVTRNDIIRYKLWLETGGISLYTGNPIKASDLFSKNYDIEHIIPKSRLFDDSFSNKTLCERQLNIDKSNKTAYSFLQEKLSENDFAAYENRVKDLFKTGKIKSYTKYKKLLMADNEIPEGFIDRQLRETQYIAKKAKEILLEVSRNVTATIGSVTDKLRQDWELVDVMKELNWEKYDKLGLTHIEEGKNGERLSKIKDWTKRNDHRHHAMDAITVAFTKPAYIQYLNNLNAKTQGENKANSIIGIENKHLYRDKNNKLRFISPMKNFREEAKKQLESILISYKAKNKVVTKNKNTTKKSGGTNQKIQLTPRGRLHKETVYGKLQQYATKEEKVNASFTEDYIQKVAKKEYREALLKRLEENDNDPKKAFTGKNALNKTPIYISLKDNIIVPEKVKTVWLETDYTIRKDITPDLKIDKVIDVGIKRILQNRLNEFNGDPKKAFVNLGESPIWLNKEKGIAIKRVTISGVSNAQALHTKKDHLGNEILDKNGNPIPVDFISTGNNHHVAIYRDEKGNLQEEVVSFYDAVIRRNLGLSVINKNHEKGWEFLFSMKQNEFFIFPSDGFNPHEIDLLNPNNYHLISPNIFRVQKISTKNYMFNHHLETKAVDGEMLKSKKELSKTSYHFIQTPTNLNGIIKVRINHLGKIVHLGEY

SEQ ID NO: 5865 - protein, 1197 aa, synthetic construct
  REGION 1..1197: note = Synthetic
MKIAKEIFENNLTPGQWIYNSLSKGGKFIPDFYRSDLQKELEKIVSFQNQFHPEQMNDELLEGIQGKARTVTSHYFSKILNIPLAENKGTREETKLQHYKWRNEALTNELDLKILAFIITEINNQINQSSGYLGAISDRSKELYFNQETVGQFQYKQLQENAHAKLKNQVFYRQDYLDEFEKIWETQSKFHPELDEKLKSEVRDITIFYQRKLKSQKHLVSFCEFEKGHKAIPKSSPLFQEFRIWQNLNNIIIKNETTKEPFVLNEELKNVIAQELLFKDSMTDAQMMAFCDVKKGNHTANFKKIEGNRTNTEIFKAFEKILILEGYDELDFSKLDSIDIKQIFKSAFKNLEINTAILDFAPTIQGNDFDKQAYYQFWHLLYSSEEDEPLKKTLMTKFGFKENHVPFLLSIKLQADYGSLSAKAIKKVLPHLMDGHIYDKACLMVGYNHSSSLTKEQNNDRVLKETLDLLKKNSLRNPVVEKILNQMINVINAIMKDPTMGKPDEIRVELARELKNNNEQRSEMTKAINKSTAEHDKIRQLLRTEFGIPRVTRNDIIRYKLWKETEGISIYTGKTIEASKLFTKEYDIEHIIPKSRLFDDSFANKTICERQLNIDKSNKTAYSFLQEKLTSEEFDQFEKRVKSLFGKISRTKQNKLLMADNEIPEDFIARQLRETQYIAKKAKEILLEVSRNVTATIGSVTDKLRDDWELVDVMKELNWEKYEKLGLTHIEEGKNGERLYKIKDWTKRNDHRHHAMDAITVAFTKPAYIQYLNNLNTKTQGDKKANAITGIENKHLYRDKNNKLRFKSPMENFREEAKKQLDSILISYKAKNKVVTKNKNVTKKVGGTNQKIQLTPRGQLHKETVYGKLQQYATKEEKVNASFTQEYIQKVAKKEYREALLKRLEENDNDPKKAFTGKNILSKTPIYISLKDNIVVPEKVKIVWFEDNYTIRKDITPDLKIDKVIDVGLKTILKNRLAEFGNDPKKAFINLDENPIWQNREKGIAIKRVTISGVSNAQALHSKKDHFGNEILDEKGKTIPVDFVSTGNNHHVAIYKDEKGNLQEEVVSFYDAVILAKEGLPVVNKNHEKGWEFLFSMKQNEFFIFPSDSFNPHEIDLLNPNNYHLISPNIFRVQKISTKNYMFNHHLETKAVDGEMLKSKKELSKISYHFIQTPTNLDSIIKVRINHLGQIVQLGEY

SEQ ID NO: 5866 - protein, 834 aa, synthetic construct
  REGION 1..834: note = Synthetic
VSKIVRFQNQFHSEQINDKLLADIQGKSRTQTSQHFSKTLNISLAENKGTREETKLQHYQWRNEALANELDMKILAFIITEINNQINQSSGYLGDISDRSKELYFNQETVGQYQYKQLQENVHAKLKNQVFYRQDYLDEFEKIWETQAKFHPELNDNLKSEVRDITIFYQRKLKSQKHLVSFCEFEKGHKAIPKSSPLFQEFRIWQNLNNVVVKNETTKEVFELSEELKQLIAEELQFKESMTDVQMLTFCELKKGTHTVNFKKIEGNRTNTSIYKAFEKILEVEGYEMDFSKMKPLEIKETVAPIFETLNINTVILDFDPSIQGNDFDKQPYYQLWHLLYSAEDDDKLKETLKTKFGFKENHLPFLLNINLQADYGSLSAKAIKKILPHLMDGHIYDKACLMVGYNHSSSLTTAQNNDRVLKDTLELLKKNSLRNPVVEKILNQMINVINAIMKDPAMGKPDEIRVELARELKANNEQRKKATSDINTATTEHERIRKLLHSEFNIPRVTRNDIIRYKLWLETGGISLYTGNPIKASDLFSKNYDIEHIIPKSRLFDDSFSNKTLCERQLNIDKSNKTAYSFLQEKLSENDFAAYENRVKDLFKTGKIKSYTKYKKLLMADNEIPEGFIDRQLRETQYIAKKAKEILLEVSRNVTATIGSVTDKLREDWELVDVMKELNWEKYDKLGLTHIEEGKNGERLSKIKDWTKRNDHRHHAMDAITVAFTKPAYIQYLNNLNAKTQGENKANSIIGIENKHLYRDKNNKLRFISPMKNFREEAKKQLESILISYKAKNKVVTKNKNTTKKSGGTNQKIQLTPRGRLQTLSRKVCKLKS

SEQ ID NO: 5867 - protein, 821 aa, synthetic construct
  REGION 1..821: note = Synthetic
MKKILGLDLGTNSIGWAFINEAENEIEVSSIVNTGVRIVPLTTDEESDFKKGNTISINADRTLKRGARRGLQRFKQRREALLETFNRIKFIATDFVYAETGAATTFSSYQLRAKSAVEAVTKEELVKVLLMLNKKRGYKSSRKAKTAEEGDAIDGMKIAKEIFENNLTPGQWVYNSLSKGGKFIPDFYHSDLQKELEKIVRFQNQFHSEQINDKLLADIQGKSRTQTSQHFSKTLNIPLAENKGTREETKLQHYQWRNEALANELDMKILAFIITEINNQINQSSGYLGAISDRSKELYFNQETVGQYQYKQLQENVHAKLKNQVFYRQDYLDEFEKIWETQAKFHSELNEKLKAEIRDITIFYQRKLKSQKHLVSFCEFEKGHKAIPKSSPLFQEFRIWQNLNNVVVKNETTKEVFELSEELKQLIAEELQFKESMTDVQMLTFCELKKGTHTVNFKKIEGNRTNTSIYKAFEKILEVEGYEIDFSKMKPLEIKETVAPIFETLNINTVILDFDPTIQGNDFDKQPYYQLWHLLYSAEDDDKLKETLKTKFGFKENHLPFILNINLQADYGSLSAKAIKKILPHLMDGHIYDKACLMVGYNHSSSLTTAQNNDRVLKDTLELLKKNSLRNPVVEKILNQMINVINAIMKDPAMGKPDEIRVELARELKANNEQRKKATSDINTATTEHERIRKLLHSEFNIPRVTRNDIIRYKLWLETGGISLYTGNPIKASDLFSKNYDIEHIIPKSRLFDDSFSNKTLCERQLNIDKSNKTAYSFLQEKLSENDFAAYENRVKDLFKTGKIKSYTKYKKLLMADNEIP

SEQ ID NO: 5868 - protein, 1347 aa, synthetic construct
  REGION 1..1347: note = Synthetic
MKKILGLDLGTTSIGWSFINEAENENETSLIINTGVRIVPLTTDEEADFKKGNTISINADRTLKRGARRSLQRFKLRRNALLEIFSKIKFIPANFVYAENGTATTFSSYQLRAKAATKAVSKEELVQVLLMLNKKRGYKSSRKSKTADEGDAVDGMKIAKEIFENNLTPGQWVYNSLSKGGKFIPDFYRSDLQKELEKIMHFQNQFHSEQMNEKLLENIQGKARTVTSQYFSKTLNIPLAENKGTREETKLQHYKWRNEALTIELDLKVLAFIITEINNQINQSSGYLGAISDRSKELYFNQETVGQFQYKQLQENRHTKLKNQVFYRQDYLDEFEKIWETQAKFHSELNEKLKSEVRDITIFYQRKLKSQKHLVSFCEFEKGHKAIPKSSPLFQEFRIWQNINNIEFKKEKEIYPLGEELKQIISQELLFKENMTDAQFIKFIVNECKLEKGNYSINFKKIEGNRTNTEIFKAFEKILILEGYDELDFSKLDAIDIKQIFKSAFKDLEINTAILDFDPTIQGNDFDKQEYYQLWHLLYSSEEDEPLKKTLMTKFGFKENHVPFLLNINLQADYGSLSAKAIKKVLPHLMDGHIYDKACLMVGYNHSSSLTKEQNNDRVLKETLELLKKNSLRNPVVEKILNQMINVINAIIEDPAMGKPDEIRVELARELKANNEQRNEMTKAINKSTAEHDKIRQLLRTEFGIPRVTRNDIIRYKLWKETEGISIYTGKTIEASKLFTKEYDIEHIIPKSRLFDDSFANKTICERQLNIDKSNKTAYSFLKEKLSAEEFDQFEKRVKSLFGKISRTKQNKLLMADNEIPEGFIDRQLRETQYIAKKAKEILLEVSRNVSATIGSVTDKLREDWELVDVMKELNWDKYDKLGLTHIEEGKNGERLYKIKDWTKRNDHRHHAMDAITVAFTKPAYIQYLNNLNAKTQRENKARSIVGIEEKYLKRDKNNKLRFIAPMPNFREEAKKQLENILISYKAKNKVVTKNKNTTKKSGGTNQKIQLTPRGQLHKETVYGKLKQYATKEEKVGANFTEEYIQKVAKKDYREALLKRLQENDNDPKKAFTGKNTLIKNPIYISLKDNIVVPEKVKIVWLEADYTIRKDITPDLKIDKVIDIGLKTILQNRLNEFGNDPKKAFVNLDENPIWQNKEKGIAIKRVTISGVSNAQALHTKKDHFGNEILDKNSKPIPVDFVSTGNNHHVAIYRDEKGNLQEEVVSFYDAVVRRNLGLSVINKTHEKGWEFLFSMKQNEFFIFPSDNFNPHEMDLLNPNNYALISPNMFRVQKFTVRDYFFRHHLETTVEDKKELKDISFKRLGLNGINGIIKVRVNHLGKIVHVGEY

SEQ ID NO: 5869 - protein, 1350 aa, synthetic construct
  REGION 1..1350: note = Synthetic
MNKILGLNVDVTTIGWAFINEAQNENEVSKIIDTGVRIVSLSSEEENDFKKGKSISINTDRTLKRAARRGLQRFKQRRTAILEIFNNLNFISDDFIYSETGKQTTFSSYELRAKSASEAITKEELVKVLLMLNKKRGYKSNRKLNVIEDGEAVDAMILAKELFEHNLTPGQWVYKSLSNGNNHIPDFYRSDLQNELEKIVKFQKQFHSQKINNELLEEIKGKSRTLTSQHFNRILKIELAENQGTKEESKLQHYKWRNDALDNALDLKVIAFIITEINNQINQSSGYLGAISDRSKELHFNKETVGQFQYKQLQNNAHSKLKNQVFYRQDYLDEFDKIWETQAKFHPELNDKLKAEVRDITIFYQRKLKSQKHLINHCEFEKGHKAIPKSSPLFQEFRIWQNLNNIVVKNETTKELFLLEEELKQQIAEELQFKENMTDIQLMAFCGLKKGSHSVNFKKIEGNRTNTAIYKAFEKILEVEGYQMDFSKMSPFEIKEAVFPIFETLKITTNVFNFDSSIQGNEFDKQPYYQLWHLLYSCEEDEPLKKTLMTKFGFKENHIPFLLNINLQSNYGSLSAKAIKKVLPHLMDGQIYDQACLLSGYNHSSSLTTEQNHDRILKDSLDLIKKNSLRNPVVEKILNQMINVINAIIADPSMGRPDEIRVELARELKKNNNQRNQMNKAINKSIAEHDQITKFLQDEFKILKPTRNDIIRYKLWKESEGISLYTGKPIKVSKLFSNEYDIDHIIPKSRLFDDSYSNKTICERQLNIYKNNRTAFSFLQETLSPREFSDFQKRVENLFGKISPAKQNKLLMSDNEIPEGFIDRQLKEAHHIVRNTKKILLKVSTNLTITSSSITTKLQQDWELLEVMKELNWEKYNKLDLTITAEGKNGKLTSQIKEWNKHYDLRHHALNAITIAFTKPYYIERLNNLSTRHFSNKITNTIATTETKYLEKDHINKLFFTPPIKNIREETKKHLINTLISYKTKNRVLTSNKNIAKSKNSRNEKIQFTPRGQLHKETVYGKIQHYDTNLEKIGAHFTALHIANVAKKKYRDALLVRLAENNNNPKKAFTGKNALAKNPILLASQKNNIVPEKVKMVRLKDKYTIRKDITPTNFKDLKSIEKVIDPKIKQILLNRLKHFNDDPKKAFSNLEDNPIWLYKEKKITIKRCTISGVSSVQALHTKKDHLGNEILDENNNPIPSDFVSPRNNHHVSIYKDEKGKIQEEVVSFYDAVVRKNSGISVVNKNHEKGWEFLFSMKQNEFFIFPTESFNPHDIDLKKTENYHLISPNIFRVQKIAKKNYLFRHHSDPKIEELKDLKDTNYKTVRSTSHLQNIIKIQIDTLGKIIHIGEY

SEQ ID NO: 5870 - protein, 1348 aa, synthetic construct
  REGION 1..1348: note = Synthetic
MKKILGLDLGTTSIGWAYIHEAENNDEISSIINSGVRIIPLTSDEEADFKKGNTISINADRTVKRAARRSLQRFKQRRDALLETFNKINFIYNDFVYAETGKSNTFSSYQLRAKAAVEQVSKDELVQVLLMLNKKRGYKSSRKAKTTEEGDSIDGMKIAKEIFENNLTPGQWIFNSLSKGSKFIPDFYRSDLQKELEKIIHFQHQFHSEHINKKLLEDIRGKSKMQTSQHLSKTLKIELSENKGNREETKLQNYKWRNEALTKALDLKILAIIITEINNQINQSSSYLGAISDRSKELYFNQQTVGQFQYKQLEKNSHSKLKNQVFYRQDYLDEFEKIWETQTQFHPELNNKLKIEVRDITIFYQRKLRSQKHLVSFCEFEKGHKAIPKSSPLFQEFRIWQNLNNIVVKNETTKEAFLLDEDLKKIIAQQLLFKESMTESQILSFCELKKEKHTVNLKKIEGNRTHIAIYKAFEKILILEGYDELDFSRLEVSEINKIIKTAFSNLEINTDILDFDTTIQGNDFDKQPYYQFWHLLYAAEDDYFLKKSLMNKFGFKENHTPFLLNIKLQADYGNLSAKAVKKILPHLIDGHIYDKACMLSGYNHSTSLTKEQNNDRILKDTLELLKKNSLRNPVVEKILNQMINLINAILKDHTLGKPDEIRIEIARELKNNNEQRSEITKAINKDTLEHEQVRKLLYNDFGIHRVTRNDITRYKLWKECDGISLYTGKTIEPSKLFTKDYDIEHIIPKSRLFDNSFSNKTICERQLNIDKSNKTAYSFLKEKLSDEEFDQFEKRVQNLFGKITKTKQSKLLIADNEIPEGFIERQLRETQYIAKKVKEILLEIARNVTLTTESVTDKLRKDWELIDVMKELNWKKYNQLGLTNIEKGNSGERLYRIKDWTKRNDHRHHAMDAIIVAFSNPAYIKYLNNLNAKTQGDKKADSIFKIETKYLRRDKNNKLRFIEPIPNFREETKKQLESILISYKSKNKVVTKNKNITKKSGGTNKKIQLTPRGQLHKETVYGKVQQYVTKEEKVGINFTVELINRVTKKQYREALLDRLAENENDPKKAFSRENSISKNPIYTDSQKTIELPEKLKLVWLEPDYTIRKDVNPDLKIDKVIDIGLRSILQSRLKEFGGDSKKAFINLDESPIWQNKEKRIPIKKVTIRGISNAQALHTKKDNLGTEILDDKGNPIPVDFVSTGNNHHVAIYRDTQGNLQEKTVSFYEAVIQNNLGLSTIDKEFKKTEGWEFVFSLKHNEYFIFPSDGFNPQEIDLLNKRNYSLISPHLFRVQKLGTKDYNFRHHLETQLLDNSELNNISYKRIRSPKELSNIVKVRINHLGQIVQIGEY

SEQ ID NO: 5871 - protein, 1357 aa, synthetic construct
  REGION 1..1357: note = Synthetic
MKKILGLDLGTTSIGWAFIKEPEKGVAGSEIVEMGVRIVPLSSDEENDFAKGNTISINADRTLKRGARRNLQRFKQRRNALLIIFKEKNLIPSNFNYAEDGPSSTFSTLKLRDKAAKEKIEIEDLVKVLLQINKKRGYKSSRKAKSEEDEGSAIDSMGIAKELYENDLTPGQWVYEALKKGRKNVPDFYRSDLQEEFRKIVSSQSAFYPEILNPSFIEDWMGKPSTPTKHFFNKKGVQLAENKGKREERRFQEYKWRAEAVSSQIDLSEIALILSQINNQISNSSGYLGAISDRSKELYFKNLTVGQYLYQQVQRNPHTRLKGQVFYRQDYLDEFEKIWSVQSEYHPQLNDDIKKEIRDVTIFFQRRLKSQKHLISNCEFEDHHKVVPKSHPIFQEFRIWQNLNNLHLIKKENLNEKFELALEGKIALANELAFKRDLSVKEALNILGLKPSEWELNFTKIEGNRTNHAFFEAFTKIIELEDGEPLDFGNMKSDDILDQFSEAFLRIGFEPGLLQVNNEIEGAEYEKQPYVQFWHLLYSSEDDQKLKQNLIRKFGFKPEHAKILASISLQDDHASLSSRAIKKILPHLQSGLIYDKACTYAGYNHSSSFTKDENEKRELRAELELLKKNSLRNPVVEKILNQMINVVNAILKDLELGRPDEIRVEMARELKANAEQRKNMTSNIASATRDHEKYKEILKKEFGLKRVTKNDLLRYKLWLETDGISLYTGKPIEASKLFSKEYDIEHIIPKARLFDDSYSNKTICERQLNVDKANITAFSFLQNKLSADEFEQYQSRVKSFYGKLSKAKIQKLLMANDKIPEDFIARQLQETRYISKKAKEILFEITRRVTVTTGTITDKLREDWGLVEIMKELNWEKYDKLGLTYTIEGKHGERLNKIKDWSKRNDHRHHAMDALTVALTKPAYIQYLNNLNAKAIDDKKGSEIFAIEQKYLKRENGKLCFIPPIENIRTEAKKHLSRILVSYKAKNKVVTINKNKTKKKAGFNEQIALTPRGQLHKETVYGKSFHYSTKFDKIGASFDVQKINTVAKKEEREALLKRLAENGNDPKKAFTGKNALSKMPIYLDLERNIKLGEKVKTVTLEENYTIRKEIVGVSPNSKQIVPDYKSIEKIVDSGVKLILKERLDQYNGDSKLAFSNLDENPIWLNKEKGISIKRVKIHGVSTVESLHVKKDHFAEPILDQEGNEIPVDFVSTGNNHHVAIYEDEKGNLQEEVVSFFEAVIRKNQGLPIINKNHSLGWKFLFTLKQNEYFIFDSYGFDPADIDLLDERNYHLISPNLFRVQKIGTKDYTFRHHLETVLNDSSELDSVAYLRLRSPEKLKNIVKVRLNHLGKIIQVGEY

SEQ ID NO: 5872 - protein, 1354 aa, synthetic construct
  REGION 1..1354: note = Synthetic
MKKILGLDLGTTSIGWAFIKEPEKDVVGSEIVDMGVRIVPLSSDEENDFAKGNTISINADRTLKRGARRNLQRFKQRRNALLETFKEKNLIPSNFQYAEDGPSSTFSTLKLRDKAAKEKIELDDFVKVLLQINKKRGYKSSRKAMSEEDEGTAIDSMGIAKELYENDLTPGQWVYEALKNGRKNVPDFYRSDLQEEFKKIVNYQSEFYPDILNTSFVEDWMGKASTPTKQYFNKRGVQLAENKGKREERRLQEYKWRAEAVNFKIDLSEIALILSQINSQISNSSGYLGAISDRSKELYFKNLTVGQYLYQQVKKNPHTRLKGQVFYRQDYLDEFEKIWSVQSSFYPQLNDELKQEVRDVTIFFQRRLKSQKHLISNCEFEEHHKVVPKSHPIFQEFRIWQNLNNLTLIKKDNLNEKCELALEDKTALANELAFKKELSVKDALKVLGLKPSDWEFNFTKIEGNRTNHAFFEAFAKIIELEDGEPIDLGNLKADDILDQFSEAFLRIGIDTELLQVNSDIEGAEYEKQSYIQFWHLLYSSEDDQKLKQNLIRKFGFKPEHAKILASISLQDDHASLSSRAIKKILPHLQSGLIYDKACTYAGYNHSSSFTKDENEKRELRAELELLKKNSLRNPVVEKILNQMINVVNAILKDPNLGRPDEIRVEMARELKANAEQRKNMTSNIASATRDHEKYREILKKEFGLKRVTKNDLLRYKLWLETDGISLYTGKPIEASKLFSKEYDIEHIIPKARLFDDSFSNKTICERQLNIDKANVTAFSFLQNKLSADEFEQYQSRVKSLYGKLSKAKIQKLLMANDKIPEDFIARQLQETRYISKKAKEILFEITMRVSVTTGTITDKLREDWGLVEIMKELNWEKYDKLGLTYTIEGKHGERLNKIKDWNKRNDHRHHAMDALTVALTKPAYIQYLNNLNAKAIGNKKGTEIFAIEQKYLKRENGKLCFIPPIENIRAEAKKHLSKILVSYKAKNKVVTINKNKTKKKAGFNEQTALTPRGQLHKETVYGKSFHYSTKFEKIGASFDAQKINTVAKKEEREALLKRLAENGNDPKKAFTGKNSLNKMPIYLDLGKNIKLSEKVKTVVLEQNYTIRKNIDPDLKVDKVIDVGIKRILESRLEEFGGNAKLAFSNLEENPIWLNKEKGIPIKRVKISGVSNVESLHVKKDHFGEKILDEEGNEIPVDFVSTGNNHHVAIYEDEDGNLQDEVVNFYEAVIRRNQGESIIKYRHEEGWNFLYSIKQNEFFVFPSQDFNPNDFDLLDPKNYDLISPNLYRAQKFSKVMYGNSAVRDYVFRHHLETVLNDVKELKDVAYKQLKSLQYLNGIKKVRLNHLGQIIQVGEY

SEQ ID NO: 5873 - protein, 1358 aa, synthetic construct
  REGION 1..1358: note = Synthetic
MKKILGLDLGSASIGWAFVHEDDIDKKSEIINTGVRIVPLTTEEESDFKKGNTISINADRTLKRGARRNLQRFKLRREALLEIFKEAGFIPKDYQYAEDGNNTTFSTYEVRAKAATEMISKEELVKVLLMINKKRGYKSSRKAKSEDDGQAIDGMAIAKELYNKNITPGQWVYASLSEGGNYIPDFYHSDLTSEFEKIVHFQNQFYPEIFNDELLEVIKGIPRNKTLEYFTKTLNIELAENKGSREQIRLQQYEWRAKALEQQLTQQEVAYILTEVNNQINGSSGYLGAISDRSKKLYFNNLTVGQYLYQQLVENSHNSLKNQVFYRQDYMDEFDRIWETQSKHHKELTEALRKEVRDITIFYQRRLKSQKHLISHCEFEKQHRVIPKSSPLFQEFRIWQNINAIVIKNTETKETLLLDEDAKNSLSETLNFKDNLTDLQLLKFFNLDKRMHEVNFKKIEGNRTNTALYKAFETILRQEGQDNLDFSKMDAEDIKSTTASLFKDLNIDTRILEFNAELQGDAFDKQPYYQLWHLLYSAEDDTKLKKTLQDKFGFKPEHTHHIANIDLQADYANLSAKAIKKILPYLKDGLIYDKACDRAGYNHSSLLTKEENENRHLKEKLQLLKKNSLRNPVVEKILNQMINVVNAIIADPTMGTPDEIRVELARELKANSEQRGEITRAINKATKEHEEIRKLLKSEYGLRRVTRNDIICYKLWKETNGISLYTGKCIEPSKLFTKEYDIEHIIPKSRLFDDSFSNKTLCERQFNIDKSNRTAFSICQEKHNEFDFEQYQSRVNELFKAGKIKYTKYKKLLMPDNEIPEGFIERQKRETQYIAKKAKELLLEVSRNVTTTIGSITDRLREDWQLIEIMKELNWEKYHKLGLTREEEGKNGERLRKINDWTKRNDHRHHAMDALTVAFTKDVYIQYLSNLNAKNKDDKKAKNILGIEKKYLAKDKGKLKFKSPIPNFREEAKKHLENIIVSYKAKNKVVTKNKNVTKTAKGTKTKEQLTPRGQLHKETVYGKITQYVTKQEKVNVNFIAEVINTVVKKDYRDALLERLAAYDNDPKKAFTGKNSLAKNPVYFHNNTQVVPDKVAISVPIEVYTIRKEVTPDNFKDEKSINKVIDAKVRELLLNRLHEYGDAKKAFSNLDENPIWLKYYESENEKKKNISIKRVTISGISNAEALHTKKDHNGNEILDKNGKPIPADFVSTGNNHHVAVYRDEKGNLQEEVVSFYEAVMRKNLGLPIINKNHKNGWEFLFTMKQNEFFVFPNTETGFDPAAIDLLDPKNREIISPNLFRVQKIATKNYMFRHHLETTVEEKKELKEIVYKNIRSTSPLLNIVKVRANHLGQIVQIGEY

SEQ ID NO: 5874 - protein, 1359 aa, synthetic construct
  REGION 1..1359: note = Synthetic
MKKILGLDLGTTSIGWSFINESENENETSSIINTGVRIVPLTSDEEADFKKGNTISINADRTLKRGARRGLQRFKLRRDALLDIFSKIKFIPTNYIYAENGSNNTFSSYQLRAKAAVEKISKEELVQVLLMLNKKRGYKSSRKAKSADEGDAIDGMKIAKEIFENKLTPGQWVYNSLSNGGKFIPDFYRSDLQKELEKIILFQNQFHSEQMNDKLLQDIQGKTRTQTSQYFTNSIKIPLTENKGSRDEVKLQHYKWRSEALTIALDLKILAYIITEINNQINQSSGYLGAISDRSKELYFNQETVGQYLYKQLQANHHSKLKNQVFYRQDYLDEFEVIWETQLKFHPELTDKLKTEVRDITIFYQRKLKSQKHLVSFCEFEKGHKAIPKSSPLFQEFRTWQNLNNIVIKNEITKEPFVLNEELKNIIAQELLFKESMTDVQMMAFCDLKKGNHAANFKKIEGNRTNTKIFKAFEKILILEGYDELDFSKLKALDIKQIFKSAFSDLGINTSILDFDPTIQGNDFDKQGYYQFWHLLYAAEDDEKLKATLKNKFGFKENHLPYLLNISLQADYGSLSAKAIKKVLPHLMDGHLYDKACLMTGYNHSSSLTTEQNNERVLKDTLELLKKNSLRNPVVEKILNQMINVINAIIKDPEMGKPDEIRVELARELKANNEQRSDMTKAINKSTAEHDKIRQLLRTEFGIARVTRNDIIRYKLWKETEGISIYTGKTIEASRLFTKDYDIEHIIPKSRLFDDSFSNKTICERQLNIDKSNKTAYSFLQEKLSPEDFDQFEKRVKSLFGKISRTKQNKLLMADNEIPEGFIERQLRETQYIAKKAKEILLEVSRNVAATIGSVTDKLRDDWELVDVMKELNWEKYNKLGLTYEEKGKNGERLYKIKDWTKRNDHRHHAMDAITVAFTKPAYIQYLNNLNAKTQGDKNSLSIVGIESKYLKRDKNNKLRFIPPMENFREEAKKQLESILISYKAKNKVVTKNKNTTKKSGGTQTKIQLTPRGQLHKETVYGKLQRYETKEEKVNANFTASHIAKVANKAYREALLKRLEENENDPKKAFTGKNTLVKTPIYISLKDNIIVPEKVKLVWLEDNYTIRKDITPDNFKDLKSITKVMDSGLKTILEHRLAAFNNDPKKAFSNLDENPIWQNQEKGIAIKRVTISGVSNAQALHTKKDHLGNEILDQQGKPMPVDFVSTGNNHHVAIYRDEKGNLQDDVVSFYDAVTLAKEGMSAINKTHKNGWEFLFSMKQNEFFIFPSDGFNPHEMDLQNPINNKLISQNLFRIQKFSKVDYGNTSVRDYVFRHHLETTLNDSKELKNIAYKSLKSLPHFEGIVKVRINHLGKIVQIGEY

SEQ ID NO: 5875 - protein, 1375 aa, synthetic construct
  REGION 1..1375: note = Synthetic
MRKTVMLLFFFELNCEIKSLIMKKILGLDLGTNSIGWAFINEAENENEASSIINTGVRIVPLTTDEEADFKKGNTISINADRTLKRGARRGLQRFKQRRDALLKIFTEIKFIPNDFIYAETGSATTFSSYKLRAKSATEFVTKEELVQVLLMLNKKRGYKSSRKAKTAEEGDAIDGMKIAKEIFENNLTPGQWVYNSLSNGGKFIPDFYRSDLQKELEKIVRFQNQFHSDQINDKLLEYIQGKTRTVTSQHFSRTLNIPLAENKGTREETKLQHYKWRNEALANELDLKILAFIITEINNQINQSSGYLGAISDRSKELYFNQETVGQFQYKQLQKNAHAELKNQVFYRQDYLDEFEKIWETQSKFHTELDEKLKSEVRDITIFYQRKLKSQKHLVSFCEFEKGHKAIPKSSPLFQEFRIWQNLNNVVVKNETTKEIFELSEELKQIIAKELQLKESITDIQMLTFCELKKGIHTVNFKKIEGNRTNTSIYKAFEKILILEGYDELDFSKLDTKDIKNIIKSAFSDLEINTGILDFDSNIQGNDFDKQPYYQLWHLLYSAEEDDFLKKSLISKFGFKENHIPFLLNINLQADYGSLSAKAIKKILPHLMDGHIYDKACFLVGYNHSSSLTTEQNNERILKDTLDLIKKNSLRNPVVEKILNQMINVINAIIADPTMGKPDEIRVELARELKNNNEQRSEMTKAINKSTAEHEQIRKLLHSEFGIHRVTRNDIIRYKLWKECDGISLYTGKPIEPSRLFTKDYDIEHIIPKSRLFDDSFSNKTICERQLNIDKNNKTAYSFLQEKLSLEEFDQFEKRVKSLFGKISKTKQNKLLMADNEIPEDFIARQLRETQYIAKKAKEILLEVSRNVTATIGSVTDKLREDWELVDVMKELNWEKYDKLGLTHIEEGKNGERLYKIKDWTKRNDHRHHAMDAITVAFTKPAYIQYLNNLNAKTQGDKKASSVFGIETKYLRRDKNNKLRFIEPMPNFREEAKKQLEGILISYKAKNKVVTKNKNITKKSGGTNQKIQLTPRGQLHKETVYGKLQQYVTKEEKVNANFTEEYIQKVAKKEYREALSKRLQENGNDPKKAFTGKNALNKTPIYISLKDTIVVPEKVKIVWLEADYTIRKDITPDFKIDKVIDVGLKTILQDRLNEFANDPKKAFANLDENPIWQNKEKGIAIKRVTISGVSNAQALHTKKDHFGNEILDENNNPIPVDFVSTGNNHHVAIYRDEKGNLQDEVISFFEAITRKNLGLSIINKNHEKGWKFLFSMKQNEFFIFPSEGFNPKEFDLYNLISKELISKNLFRVQKFSKVEYGSASVRDYVFRHHLETTINDVKELKDKTYKSIKSLPYFEGIIKVRINHLGKIVQLGEY

SEQ ID NO: 5876 - protein, 1344 aa, synthetic construct
  REGION 1..1344: note = Synthetic
MKKILGLDLGSTSVGWAFIHESEETTKIIGAGVRVVPISTDEATDFQKGNAISINKNRTLARGARRGLQRFKLRRDALLRIFKSNGFISQDFKYAEEGKSTTHQSYAIRAKSATEKVTPEELVRVFLMLNKKRGYKSSRKGQDVSADGIENVGQAIDGMEVAKEMQEKNMTPGEYAFQLLTQNPKAKLPDFYSSDLENEILSIIKNQSNYYSDLPNDLDSQIKNKSKNATYYLFSTTLGIPYAENKGTRDEKKIQAYTWRSLAAKHKIQKSEMAFVIGEIKDSIAKSSGYLGNISNRSKELAFNQQTVGQYQYKKLQDNAHESQRNMVFMRADYMHEFDQIWEIQKQFHPILTEELRKEVRDITIFYQRKLKSQKHLISFCELEHRHRVAPKSSPLFQEFRMWQNINNINVVSETFDLDEDAKEGIHDILSNAGRLKDSDLLKAMGANPKKDKLNFKEIQGDITRSEFVRVFKTIWEERGHDVNTLSSPIRTSDVKRILHDLTLPVDLLELNMKLAGNEFDKQPYFQLWHLIYTVEDDQVLIENLKKKFNLPEEYAKAMLSIRLEPNYGSLSARAMRKIIPHLEAGNEYSAATIYAGYASHSKMSLTKEENDSRILADKLELVKKNSLRNPVVEKILNQTINVVNAIMESELYGKPDEIRIELARELRANNDQRKRMTADIATATKAHEDIRQKLRSEFQLNRVTKNDVIRYKLWQETGYISIYSGNPIPASELFTNKYDIEHIIPQSRLFDDSFSNKTLCERTLNIEKGNQTAFSFLKQKWNSTEFDQYVARVKELGKDNKIKKSKLDKLLLCNEQIPEDFIARQLNETQYISKKAKEILLQACRNVYSTSGSITDRLREDWGLTDVMKELNFEKYKLAGLTFEETGKGGERLQKIKDWSKRNDHRHHAMDAITIALTRQGYIQYLNNLNSRADKTGATYGLESKYLERIEGKLRFKLPMPTIREEFKKTLENILISYKAKNKVVTKNKNIIKTKTGSLEISQLTPRGQLHKETIYGKKLQYDTNFVAVGLKLNAELIAKVAKKNEREALLARLEANGNDPQKAFTGKNSLANNPIYLDSRQKYKVADKVKLVTLEELYTKRVSVGPNLDVKQIEKIIDPGVKQKLLDRLNSFDGDPKKAFINLDENPIYLDKGEKIAIKRVTMTGVNNVEALHSKKDLYGKQILNSSGIPIPADFVSTGNNHHVAIFEDTEGNLQEEIVSFYEAVSRVTIGESIIRKIHVSGWKFLFTMKQNEFFVFPADGFDPAEINLEDPQNYALISKHLYRVQKIAKKDYFFRHHLETSVDDVKELKGLSFKRSGLTGINGIIKARINHLGQIVKVGEY

SEQ ID NO: 5877 - protein, 1352 aa, synthetic construct
  REGION 1..1352: note = Synthetic
MKKILGLDLGTNSIGWAFINEAENEIEVSSIVNTGVRIVPLTTDEESDFKKGNTISINADRTLKRGARRGLQRFKQRREALLEIFSRIKFIATDFVYAETGASTTFSSYQLRAKSAVEAVTKEELVKVLLMLNKKRGYKSSRKAKTAEEGDAIDGMKIAKEIFENNLTPGQWVYNSLSKGGKFIPDFYRSDLQKELEKIVGFQNQFHSEQMNDKLLEDIQGKSRTLTSQYFSKTLNIPLAENKGTREETKLQHYKWRNDALANELDLKVLAFIITEINNQINQSSGYLGAISDRSKELYFNQETVGQFQYKQLHKNAHAKLKNQVFYRQDYLDEFEKIWETQVKFHPELNDKLKSEVRDITIFYQRKLKSQKHLVSFCEFEKGHKAIPKSSPLFQEFRIWQNLNNVVVKNETTKEVYELSEELKQLIAEELQFKESMTDVQMLTFCELKKGTHTVNFKKIEGNRTNSSIFKVFEKILEVEGYEMDFSKMKPLEIREAVAPIFETLNINTAILDFDPSIQGNDFDKQPYYQLWHLLYSAEDDDKLKETLKNKFGFKENHIPFLLNINLQADYGSLSAKAIKKILPHLMDGHIYDKACTLVGYNHSSSLTTEQNNERVLKDTLELLKKNSLRNPVVEKILNQMINVINAIMKDPAMGKPDEIRVELARELKNNNEQRSEMTKAINKNTAEHDQIRKLLHTEFGIARVTRNDIIRYKLWKETDGISLYTGKPIEPSKLFTKDYDIEHIIPKSRLFDDSFSNKTICERQLNIDKSNKTAYSFLQEKLSPEEFDQFEKRVKSLFGKISRTKQNKLLMADNEIPEGFIDRQLRETQYIAKKAKEILLEVSRNVTATIGSVTDKLREDWELVDVMKELNWEKYDKLGLTHIEEGKHGERLYKIKDWTKRNDHRHHAMDAITVAFTKPAYIQYLNNLNARSINIKEISEATDKKSKIIIGIETKYLERDKNNKLRFIPPMENFREEAKKQLESILISYKAKNKVVTKNKNITKKSGGTNQKIQLTPRGQLHKETVYGKLQQYVTKEEKVNANFTAEYIQKVAKKEYSEALLKRLLENDNDPKKAFTGKNTLNKTPIYISLKDNIVVPEKVKIVWLEADYTIRKDITPDLKIDKVIDIGLKAILQDRLAEFGNDPKKAFINLDENPIWQNKEKGIAIKRVTISGVSNAQALHTKKDHFGNEILDENGNPIPVDFVSTGNNHHVAIYKDEKGNLQEEVVSFYDAVVRRNLGLSVINKNHEKGWKFLFSMKQNEFFIFPSDGFNPHEIDLLNPNNYHLISPNMFRVQKISTKDYFFRHHLETTVEDKKELKEISFKRLGINGINNITKVRINHLGKIVHLGEY

SEQ ID NO: 5878 - protein, 1346 aa, synthetic construct
  REGION 1..1346: note = Synthetic
MKKILGLDLGSSSVGWAFIHEDENTSKIIGAGARVVPISTDEANDFQKGNAISINKNRTLARGARRGLQRFKLRRNAIMHIFKSNGFISQDFKYSEQGKGTTHQSYAIRAKSALEKVTPEELVKVLLMLNKKRGYKSNRKGQDASADGVENVGQTIDGMEVAKEMYAKNLTPGQYAFSLLQKNTKAKLPDFYSSDFENEILRIIDSQLRFHSDLPEDLSSQLKNKSKGATFFYFTNTLNIPYAENKGTRDEKKLQAYTWRALALNEKINNEELAFIIGEIKDGISKSSGYLGDISNRSKELVFDNLTVGEYQYKKLLQNPHQSQRNMVFMRSDYLHEFERIWETQKEFYPVLTDKLKKEVRDVTIFYQRKLKSQKHLISFCELDPQHRVAPKSSPIFQEFRMWQNINDIKVTGESFEYDEDVRKGVHEILSNAGRMKDTDLLKAIGANPKKDFLNFKEIQGNSTRSEFLKVFKSLWEEQGNNINLLGTPLMSSDVSRILQDLSLPTNLLDLNLNLEGNDFDKQPFYVLWHLLYTVEDDETLIKNLEKRFNMPPVYAKALLNVKLEPNYGSLSARAMRRMLPHLEEGKDYSEAAILGGYKSHSKSSLSVDENNARELNDRLELVKKNSLRNPVVEKILNQTINVVNAIMESSQFGKPDEIRIELARELRANNAQRKEMTSAIAKATKDHEDIRQKLRSEFNISRVTKNDIIRYKLWQEAGYISVYTGNPIPASELFTNKYDIEHIIPQSRLFDDSFSNKVLCERALNIEKGSQTASSFLKQKFSPTDFDQYIGRIKDLGKEGKIKKTKLDKLQLTDDKIPEDFIARQLNETQFISKKAKELLLDVCRNVVTTTGSITDRLREDWGLTDVMKELNFEKYKLVGLTYEDTGKNGERLPKIKDWSKRNDHRHHAMDAITIALTKQGYIQYLNNLNSRADKNSTTSGLESKHLKRMEDGKLKFKEPIPNIRNEFKIALENILISHKAKNKVVTRNVNKVQTKSGVIEKTQLTPRGQLHKETVYGKRSFYETEWASVGLKMTVELIAKVAIKREREALLNRLIEFDNDPKKAFTGKNSLLNNPIYLDSGKKYPIADKVKLVGLETIYTKRVSVGPELDQKKIEKIIDPGVRQKLLDRLVEFNLDAKKAFANLDENPVYLDKAEKIAIKRVTMSGVNNVEALHTKKDLHGHEILDAHGKPIPVDFVSTGNNHHVAIFEDLEGNLQEEIVSFYEAVSRASIGEPIIKRQHAEGWKLLFTLKQNEYFIFPGDDFNPNDIDLLDQKNYPLISKHLYRVQKIATKNYMFRHHLETNVDDVKELKGLTYISIRSLGPLVGVVKVRINHIGQIVKVGEY

SEQ ID NO: 5879 - protein, 1018 aa, synthetic construct
  REGION 1..1018: note = Synthetic
MKKILGLDLGTTSIGWAFINEAENEIEVSSIVNTGVRIVPLTTDEESDFKKGNTISINADRTLKRGARRGLQRFKQRREALLEIFSRIKFIATDFVYAETGASTTFSSYQLRAKSAVEAVTKEELVKVLLMLNKKRGYKSSRKAKTAEEGNAIDGMKIAKEIFENNLTPGQWVYNSLSKGGKFIPDFYHSDLQKELEKIVRFQNQFHSEQINDKLLADIQGKSRTQTSQHFSKTLNISLAENKGTREETKLQHYQWRNEALANELDMKILAFIITEINNQINQSSGYLGDISDRSKELYFNQETVGQYQYKQLQENVHAKLKNQVFYRQDYLDEFEKIWETQAKFHPELNDNLKSEVRDITIFYQRKLKSQKHLVSFCEFEKGHKAIPKSSPLFQEFRIWQNLNNVVVKNETTKEVFELSEELKQLIAEELQFKESMTDVQMLTFCELKKGTHTVNFKKIEGNRTNTSIYKAFEKILEVEGYEMDFSKMKPLEIKETVAPIFETLNINTVILDFDPSIQGNDFDKQPYYQLWHLLYSAEDDDKLKETLKTKFGFKENHLPFLLNINLQADYGSLSAKAIKKILPHLMDGHIYDKACLMVGYNHSSSLTTAQNNDRVLKDTLELLKKNSLRNPVVEKILNQMINVINAIMKDPAMGKPDEIRVELARELKANNEQRKKATSDINTATTEHERIRKLLHSEFNIPRVTRNDIIRYKLWLETGGISLYTGNPIKASDLFSKNYDIEHIIPKSRLFDDSFSNKTLCERQLNIDKSNKTAYSFLQEKLSENDFAAYENRVKDLFKTGKIKSYTKYKKLLMADNEIPEGFIDRQLRETQYIAKKAKEILLEVSRNVTATIGSVTDKLREDWELVDVMKELNWEKYDKLGLTHIEEGKNGERLSKIKDWTKRNDHRHHAMDAITVAFTKPAYIQYLNNLNAKTQGENKANSIIGIENKHLYRDKNNKLRFISPMKNFREEAKKQLESILISYKAKNKVVTKNKNTTKKKRWNQSENSTNTSWTIT

SEQ ID NO: 5880 - protein, 1269 aa, synthetic construct
  REGION 1..1269: note = Synthetic
MRTNVGNRRYAMKIIGLDVGTNSVGSAWIDTGNGLIHTGVSIFPAGIEASSERGRGDPKNQARRRARQTRRRIQRLALRKKKLREVLVQHDLLPGDAIQRKALFDHPTITPWHLRRKGLYEELTPYEFGRVLTHLNQRRGTLGVRVEPHEEADEATGKKPKDEAEKEKQSTKEGIVRAMKWLNGRTFGEAMAEKLDSLQIQANNLKKGNFSPTPIRNRNKSYEYIADRSMIHDEFQRLWKKQSSFKGPLAPLLTDDLRSLLDQPDPSQYGDAQIWRYGGILFGQRKYYWNISSLGRCELEPTDRGCPEGDSRAQYFRVLCFANTIRIEQRDFGIRALTPEERAKVIAAMRSSPRITPAGIKKALGIDKKSLKAKGESEDYYRLNLDQDEKADIHGDWFQSCIVVPVWGEKAWSHLDERTRSSINRAVLKFQIDQPGDEAKLRQGAATWWKLDPEQIERFIAAWAKSPSADRRLNLSARAISNLLPYLENPHDIGGEQPGWHTVTTARQAFAEDPGNRATPEQRVRYAWQINDRVKQLLHEASGGETDKVARWLALRFSNKYDRHFVAKHPGKLPPPPILSNPVVRKAIYVVRDHIQAYMDQYGQKPDRIVIELARDASKTKTARDRELKLIKDREAKRKEIVDKYKLSGESPSQREKAIRRVLLCMQQNRLSAYSNTCITEQVAARGYSDEHGPLEIDHIVPRSRGGEDGLNNRVLCYAHENREKGNQTPVEWLSKEAFEGLESRFEKCLHKPDKTSPATAYFTKGGRKLKWKNLHRKGGEINEDWAESQLTDTAYAAREVATYLHAALFPDEPIERKGGCRRILFTNGAITAELRRDWGLSVTHGQEKDRADHRHHAIDAAIIAMTSSKVVYDLANARKDLESRVQEYKRAGKDPSQLKRHPILPPKPWSDLKALYQKVVDPMFARNPEGIPIWAVAHTPVKRRICGAFHMETLFGMMNSEKGHFTVRVPIAELAPAYFDLSQKQKQDLLMNRYPVAQDDPPLGRNSYLIRDPSLRVILRNQLLALGVDVDTCSKTALKAALTSNAFSLPSGVPIKKVVCYRTIAEPVIYEYTSAVDPEHREVNRVYMGRNTHHVEIRETSEGKWKGCAITMNDVAAQNALKLKALHDCKMRYPDESERNLRKQCLRRTQLDFPLVNRRDTQDGRFVMSLCEGETLLMKNPETGLPDVFAVVKIAVQGPKIAFKHHSIQKGPDKPEKTSKDVLVTSSSIPLIEITPGSLLGKHSLPNGSPPRKVKITPLGSITFVDRD

SEQ ID NO: 5881 - protein, 1250 aa, synthetic construct
  REGION 1..1250: note = Synthetic
MKKILGLDLGTSSIGWALIKVEDNNNPTEILDMGVRIVPLAENEGDKFTKGQDITVNADRTRARGARRNYDRYQLRRQALTEKMRQLEMLPDEHLIKLPMMELWQLRADAVTKKISLNELGRILYHLNQKRGYKHSRTDVNDSKQREYVKEINNRYTKLHESKMTIGQFFANKLVETAVVQDGKIFYIFRIKDQIYPRNAYEEEYDAIMKCQQKFYPDILTDDIIDEIRNSIIYYQRDLRSCKHLVSVCEFEKRCFYDADGNIKRNKKDKIIYDGPKVAPRTSPLFQVFKDWQSINNLRFHNRRNGYLYITREQKEQIAAFMDNHEILKLKDVQSLLNITSKSGWYCDKAIKAGIKGNSTKCAILASLSSLTHSKIAEITRFNLETETTNIVDEETGEMLVRIRNTYQNEPLYRLWHIIYSIKNDNERGNAISKFLKEFEVEDETVINSLKEIDFVTPGYANLSAKAICKILPYMMEGLDYSDSCEYVGYNHSDSLTKEENEKRELLDKIPALKKNELRQPTVEKILNQTINVFNQINEDLSKDGERISEVRVELARELKQSKDERNETEIGIRKQQKLNDEYAKILKEEGVRPTRNRILKYRLWRESNKSCFYCEQPISFHEFLDFSETEREHIIPKKLMYDDSFANQVCSCRNCNKEKGGRTAMDYMRTKQNLQFYLDKVDKMFQDHKISGKKRSHLLASYDDYLFRKENGKETKDDILIWEKPIERQLRLSQYISRKAQELLRMACRDVTVTTGEITALIRHTWGYDTILHDLNFSSYKEAGLTELVKGEDSGRTREIIKDWSKRLDHRHHAIDALAVACTSRSIVQRINTLNASREEIRGEIKAPRKEWKDSNLLQQWIKEKMPFDRQYVLHKVASILISMKAGKKATVPGKRKIYKKGKPIVIQTGLRIPRGQLHEQTVYGAINQYDKGQKVMKIVTRYKMGVGSMGYVFNGKETCDVIKKKNRYEIVDGIQKALDYIVDKHIREIVKARMNEAFPEGETYLTEAEKALAEGKAYDGKARCQKALDQLRTLSERPLYADKDKHITIKNVRCFTGLSAVQELRYNDNGKPISYVLTKNNHHVAIYVDEKGEPKENICSFWQVVERSRYKFPLIVKDPKNLWDEITQREKDGEKFPDSLIQSLPPSNWSFIESLQLNDMFIMDMDDDDYIRNIETNNYEELGKNLYRVQNISTLDYFFRLHTDTTSITTHDAALCKRFIRIKSFKSYFAHNPHKVQISLLGKIVQSS

SEQ ID NO: 5882 - protein, 1250 aa, synthetic construct
  REGION 1..1250: note = Synthetic
MSNILGLDLGTTSIGWALIKTDINNIPCEIQDMGVRRVPLAENEGDMFAKGQSITVNADRTKSRGIRRNNDRYQLRREALIKKLQTLEMMPNESLINLPLMELWGLRANSATKEVSLQELGRVLYHLNQKRGYKHSRTENNDSKQREFVKGVNERYSLLHDSNMTVGQYFAKQLSDTAVTKNGKTYYTYRVKDFILPRKAYEEEYDTIMQCQKKYHSEVLTDEIIDFIKTHIIFYQRDLRSCKHLVSVCDFEKRYFYDKDGHLKRNKKDEIVYNGPKVAPRTSPLFQVFKIWQSANNIRFHNKSKDYLDITCEQRQAIADFMDKNEKLKLDDVKHILELNGVSGWYCDNAIKNGIKGNGTKQAIVNALSSLPQNIIAEITRFNLEMESTGIADTETGEVLMKIKKTYQREPLYRLWHIIYSIKKDEERKNAIEKFLLSFGVSNDNVAQKLSDIDFTTPGYANLSAKAICRILPYMMEGIEYSEACEYIGINHSNSLSKEENQERELMDYIPQLKKNSLRQPTVEKILNQTINIFNGINAELSQKGERIDEVRVELARELKQSKEERNDASKEIKALEDKNKEYKDKIEKEYKLKATRKNLLRYRLWIESNNSCFYCEQPIKFTPFANEPEEEREHILPKALHFDDSYANQVCSCQKCNSAKGGRTALDYMRTTPNLQHYIDKVNKLHRDNKISSKKYSHLLASYDDYQKRKETGKETKEDKLIWEAPIDRQLRLSQYISKKAMEILSQACRDVVATSGTVTAIIRHAWGLDTVLEELNLPVYRNANLTEFVEINRKGQKRQKETIKNWTKREDNRHHAIDALVVACTSRSIIQKINTLHASKQEMRNEITSARKKWDEDDILSQWIREKNPFNRQYVLQHISAIFISMKAGKKVTVPGKRKVFLHGKPQIIQTGLRIPRGPLHEEGVYGSIKINGKKEIVIRYKLGKGTIGFLFSGKEKCEVKKNKAGKYIMEDGIAKVLDSIVDKHIRSLVEERLNRTFLQKGETYRSEAEKALEEGREYKDEKRCKEALEQLKGLDKDPIYSDKDNKCIIRYIRCKTGLKAVRPLRYNENNEPIAYVLTKNNHHVALYRDRSGKVVESVCTLWDAVERTNLDFPCIIRNPEQVWKDIMIRETNGEVFSPEFKESLPKPDLTFMESLQQNEMFVLNMSQDTLEEHISTGNYSIIGQHLYRVQALSEGDYIFRLHTDPGTLRNSETSACKRFIRLSLKKFVESQHQKVTISFLGKISIAQ

SEQ ID NO: 5883 - protein, 1256 aa, synthetic construct
  REGION 1..1256: note = Synthetic
MKNILGLDLGTTSVGWALIKVDDKNNPIDIQDMGVRIVPLAENEGDKFTKGQDITVNADRTRARGQRRNYDRFQLRRQALTEKLRSLNMLPDEHLIKLPIMELWQLRANAATQKVSLNELGRILYHLNQKRGYKHSRTDAKDSKQRAYVKEINNRYGELIKSGMTIGQFFAKKLSETAVTFEGKTFYVYRIKDQIFPRKAYEEEYDYIMKCQQAFYQEILTNDVIDEIRNRIIYYQRDLRSCKHLVSVCEFEKRCFYDAEGNVKRNKKGEIIYDGPKVVPRTSPLFQIFKNWQSINNLRFHNRKNEYLYITKEQKQQIANIMDIHKVLKLEDVQNVLDITSESGWYCDKAIKAGIKGNTTKHAILSVLSSLPQSKITELTRFNLETEATNLVDEETGEVLVRIKSTYQEEPLYRLWHIIYSIKNDDERFHAITKLLKEFCIEDDSIANALKDLDFVTPGYANLSAKAISKILPYMMEGIDYSDSCAYVGYNHSDSITKEENKRRELLDQIPALKKNELRQPTVEKILNQTINIFNQINANLKKNGERIDEVRIELARELKQSKDERKETENGIRKQQKMNDEYANILKEEGIRPTRNRVLKYRLWRESNETCFYCERPINFNEFLKFSDIEREHIIPKKLIFDDSFANQVCSCRKCNKEKGGRTALDYMQTTPNLQMYLDKVDKMFQEHKISGKKHLHLLASYEDYLIRKKEGKETKDDIKIWETPIERQLRLSQYISRKAQELLRTACRDVIATSGSITDLIRHTWGYDTILHELNFDCYKKAGLTEFIKDEKTGKIREVIQDWTKRLDHRHHAIDALAVACTSRSIIQRINTLHASREDIRKEIKSTRKEWQENDLLQQWIKEKMPFDRKYVLYKVASILVSMKAGKKATVPGKRKIYKNGKPTIIQTGMRIPRGQLHEQTVYGAITQFSKNNKGKVLQTKEIVTRYKMGVGSMGYVFSGKETCDVINDKKNKSLVIIDGIEKAINYIVDRHIRDVVRNRLNEAFPENETYRSEAEKALAEGKKYDGKERCQKALDQLRKLSEKPLYADKNKNIIIKSARCYTGLSAVQPLRYNNNHEPISYVLTKNNHHVALYKDENGKFQECIYTFWQVVERSKFKLPLIITDTKALWNEIQQRENKGDTFPDSLIQSLPLPNWTFIESLQLNDMFVMDINDDDFENYIATNNYEELGKKLYRIQNISSGDYFLRLHTDTTTDRNNAKLTEKFLRKSLMGFLSSNPHKVYISLLGKIIRNTE

SEQ ID NO: 5884 - protein, 1040 aa, synthetic construct
  REGION 1..1040: note = Synthetic
VETVFGIDLGTNSLGWAAISFQNGRASGIQHAGVRIFPAGVDGLESDGRGTPRNHERRNARQIRKQLDRRARRKNKLFRALQHYLLLPGQVERGEEAQEFVRHELLEGLDQQLQKEFGARENSERFFHMLRTKALDEELPAYAVGRLLYHLAQHRGFLSNRKADRKDDDSSKVLDAIKDLQAHLVEGHWRTLGEYLFHVDAGERMRARWTARSMYVEEFKAIWQKQASFHPNLMTEEARATIHEIVFHQRKLKSQSHLIGDCDLEPKKKRCIWAMPDAQRFRLFQRLNDLEITDEQTGEMFKPSAEQRELILAHLEQKGDLAFSRLRTMLKNKKLTFNLELGGDKGLVGNRTLSKLLAVDSSFITGLSKDALDKLVVELITVESHESMVRRLTDHWQCTPAVAEDLAKLHLEDGRAAFSLKAIRMLLPEMMLGLPLNTAIKKCYPKALQDDRQEDLLPAVTKAFPNLRNPVVARALTQLRQVVNSYIVKHGLPDKFRIEMARNLKQTPDRRERDIKRNRSREKERDIARERILKEAGIANPSRMDIEKFLLAEECNFTCPYTGVHFGMSDLFSGRVDVEHIIPRSRSLDNSFANKTLCMADENKRKGRRTPVEAYGGQSVRFAEILDRVRQFSENFRKAKLERFQMDAAEVELLLNDFEQSQLVDTAYATRLAGRYLGMLFGGEVDANGNRRVEKVAGRATALLRSAWHLNEALHDNPTKNRGDHRHHTLDALVVAVSSPAHVRDLSRALERCEEEGRRMAAQLDEPWPGFRNDATNCIQQTVPSHKVNRRVRGALHNESNFSQRRDAQGHPDPTGEWVHIRKPIEGAFKVEDVVDPAIRALLREAEATHGNKWNQNPASIPCLMNDQGEARPIRHVRIRKKSRVTAMGAGHRARFVETGGNHHIEVLESNAVGKTSWTGVMVSTFEANLRRIRQEPVIRKNHGPGLRYLFSLQQGDCFYLDKDPECVGVQIIRTLDNNAGGMRIAFVSSRDARMLKEINADKSPEGKLKVRTIKTLSERGFHKVHVGLLGEVGRHGADS

SEQ ID NO: 5885 - protein, 1081 aa, synthetic construct
  REGION 1..1081: note = Synthetic
MKYTIGLDIGVTSIGWAVINNEKKRIENLGVRIFDAAENPKDGSSLAVPRRLARSTRRRLRRRKHRLERIRRLYLKYRLLDEVSLENLFMNLVNYDPYELRNKALFERISDADLARILLHISKRRGFKSNRKSELQEKDMGVLLSSIDQNRKIIEEREITPGQLLNELEIKRNKRGEYKNTLLRSNLIDEITKIFEKQREFGNDKLTEEFEREFTEIFSSQRSFAKPGAIEDLTGKCTFEKTELRAPSAAYTSEIFMVLTKANSIVIQNQEGERKLNREEIRLIKDEALKKKKVTFSSLRNVLQLEEGDIFNFLDYNSKNKAGELLSREEIEKSPFIELKHYHKLRDTIVKDLGEVTWLKLLENPLSIDTIAYALTFRKSDEDIRNYFFGIENYGKNVIRPEIDIHPEIVECVLKLSFSRTKNLSLKAMNKMIPYLMEGFRYDEAASKAGYHHSVRNTKEKHIVLPVLEIEEIKNPVVFRALSQCRKVINSIIRIYGSPYRIHIELARDLSKSFTDRKEIEKKQKENLAEKERAANHFQELYHQVPKSSDILKWRLLKEQDGKCAYSLKTIDPYRLTESGYTEIDHILPYSRTFDNSYFNKVLVLTDENRDKLNRTPYEYFGHDNDRWHRFEAWVNAAKLPRDKKQKLLRMQLKRDQGIEMKDRALNDTRYISRYLKNYLEDNLLFAEGPQKKRVFTYKGQMTAYLRHRWGFEAKDRSNDLHHALDAVLVGVMNDGMVQEIERASKRREFYKRKIEREYVDPETGEIVEELYMKINNTKLNEPWVDFRQEVEIRLSENPQYGLKHKKFYNYDPEEIELIKPIFVSRMPFRKITGHAHMETIRGAKYLDKNIKTSKEVLSNITLEKLEKMIGKETDRLTYNLIKERLLQHNNKPQEAFKEPLYKLKKDGSNGPEIKSIKIGETYSAGVPINDGTGVADNGKMIRVDIFKKQGKHYAIPVYVHHIVNGALPNKVINPGRPFSEWKELDDTYEFLFSLYKNDLIKLQFKNGEEIFGYYIMIDSSVASVTIENDARSEKYRKSIMTCKEIQKWSVDVLGNISQIKKEQRRELEKPRHFKQGSAFN

SEQ ID NO: 5886 - protein, 1144 aa, synthetic construct
  REGION 1..1144: note = Synthetic
MKKILSLDLGITSVGYSILDELGNNKYSLIDYGVFMFDSPYDKDGNSKKSIHGQNTSTKKLYNLKKERKKNLAQLFEDFNLDKKDDLLNQEKKNLFINKWELRAKKVFEEKLTYQELFSVLYLIAKHRGYKSLDTDDLLEEFCEKLGLNQENKKEKKDDEKGKIKQALKTIENFKVQFPQKTIPQIIYEIEIQKENPTFRNHDNYNYMIRREYINEEIKTLILSQEKFGLFDTTFDTKLFIDKLIKIIDNQKDSSNDLSLFANCEYFKEEKVAHQFSLLADIYKMYQAISNITFNSKPSIKISKEQIKQIAENFFDRLKNGKNISDIKYKEIRKILKLDDNIKIFDKEDSYKLKDKVQDNTITKFHFINNLSKYDKNFIINILNKSNKYEIMKEIFDVLRDEKQPKPIYEKLSVVFSKYNLVNDESIKNKIILELIKNKVGKSLNISHLAMINIIPFFEEGLTLDEIKQKLNFSREEDYLSFKKGIKYLSITQFEKDDNLEINNHPVKYVVSAVLRLIKHLHSIYGIFDEIRVESTRELSLNEESRKNIDRANRENEAKIKNILENEQYQEKAKEYGKNLEKYVKKIIMWEEQNFICPYCQTNKRAISFEQIIKNEVDIDHIVPRSLGGLSVKHNLVLVHKDCNVSKSNQLPYNYLKNKEQYEKIVEDLFSQHKISWKKRKNLLATNLDEVYKDTFESKPLRATSYIEALTAQILKRYYPFQNQTKNSMEIRHIQGRATSNIRKLLNVKTKVRDTNIHHAIDAILIGLTNKSWLQKLSNTFRENLDVIDDMARENIKKTIPLIEGIEPKELIETIEDNYNIYGEDSVFYKDIFGKTKVVNFWVSKKPMVSKIHKDTIYSKKENDFYTVKENILNKFTSLKITNTTKPDKFFEDFKKNILEKMYVYITNPNDVICKIVKHRADEIKTLLNSFENIDKKDKEALSVAKQKLDELIHKPLLDNNNKPIRKVKFYQKNLTGFDVRGGLATKEKTFIGFKATLENNKLSYKRIDLSTAKKINNKFVVDSDNSFKAFKNDIIFFIFANDSYKGGKIVSFLEDKKMASFSNPRFPASIGNQPHFFLTLFNGKPNSHKQHYINKAIGIIKLNLDVLGNIKSLQTIGNIESELYTFLKGIKNGMESSTFNKNL

SEQ ID NO: 5887 - protein, 1121 aa, synthetic construct
  REGION 1..1121: note = Synthetic
MKQILSLDLGITSVGYSVIQEHETDKYSLVDYGVSMFDKPTDKDGNSKKLLHSQALSAKKLHKLRKQRKQKLASLFEKYNLGNRQELLEQEKNNIYKNKWELHGKTVFEKKLSIGEIFTILYHIAKHRGYKSLDSGDLLEELCDSLGIETEANKSKKDDERGQIKQALKNIEALREKHSQKTVAQIIYELENKKENPIFRNHDNYNYMIRREYINDEIRKIIKVQDAFGAFDNNLDSDAFVNDVVAVIDDQKESTNDLSLFGKCEYYSEYYVAHQYSLLSDIFKMYQAVANITFNKEKIKITKEQIALVAQDFLDKVKNAKSVKDIKYKDIRKILKLDDNVKIFNKDDSYLSRGKTQENSIVKFHFVDTLSKIDKSFVKDIFSSDESYALMREIFDVLHYEKSPKLIYEQLKNKISNEQVIIDLIRNKKGNSLNISSFAMLQLLPYFEEGLTLDEIKQKLGLQRQEDYAEYKKGIKYLHITSYEKDDDLEINNHPVKYAVSAALRVVKYLHAKYGAFDEIKVESTRELSLNEKAKKEIEKANRAFEKEIQQIVENTEYQKIAQSYGKNLHKYARKILMWEEQERFDIYSGKSIGITDIFSNNVDIDHIVPRSLGGLSVKHNFVLIHRDENLQKSNQLPMNYVADKETYKNRVEHLFHEHKINWKKRKNLLANNLDEIYKDTFESKSLRATSYIEALTAQVLKRYYPFQDVKKLKDGSAVRHLQGRATSNIRKVLGVKTKNRETNIHHAIDAILIGVTNHSWLQKLSNTFRENFGRINDEARKNIKKALPYMDGLEIKDLVKEIESQYNSFGEDSIFYKDIWGKVKTVNFWVSKKPMSSKVHKDTIYAKKDDGIYTVRENIIAKFIGLKVTPMTSPEEFIKKFHKDILQKMYSFKTNPHDIICKIVEQRAEEIKELLWNFEFLDVKNKEQMSEAKTKLELLIHKALVDNNGNIIRKVKFYQTNLPGFNIRGGLATKEKTFIGFRAYKNGEKLEYDRIDVANFAKIQKNNDGSFKAYKNDVVFFVYKNGSFRGGQIVSYIKKSSGSKLCAFLNPRFPTASEYQPSSFCKIEKGKHSGAKQQSIGSAIGIIKLHLDILGNIKSYQILGNAESQILNEIKSIVSQ

SEQ ID NO: 5888 - protein, 1118 aa, synthetic construct
  REGION 1..1118: note = Synthetic
MKKILSLDLGITSIGYSVLKEMENDKYFLIDYGVSMFDKATDKDGKSKKLLHSASASASNLVNLRKQRKKNLAKLFEEFGLGEQEYFLYQEKQNIYKNKWELRAKKTFSEKLKIEELFTIFYAIAKHRGYKSLDSTDLLEELCEELNIPFKEDKKSKKDDEKGKIKAALKNIENLKLEYPNKTVATIIFEEELKQATPTFRNHDNYKYMIRREDINDEIEKIIKSQEKFGLFDKDFNTDNFISKLIQTIDDQKESSNDMNLFAPCEFYKEHKVSHQYSLIADIYKMYQAVSNITFNKKPTIKISKEQIKLIADDFFQKIKKGKNILDIKYKDIRKILKLSDDIKIFNKEDSYLNKGKKQENSIIKFHFISSLSKIDNSFILKAFEKENPYVELKEIFDTLGFEKSPKTIYEKLKNKVDDKTIIELIKNKTGSSLRISSYAMIKLIPYFEQGYTLDEIKEKLELNRCEDYSEFKKGIKYLNVSQFEEDDKLPINNHPVKYVVSASLRLIKHLHITYGAFDEIRVESTRELSLSEDAKKEIEKANRALEKQIDEIVGNKEYQKIAEQYGKNLRKYARKILMYEEQNRRDIYTGKGIEFEDIFTNTVDLDHIVPQSVGGLSVKHNFVLVHRDSNLQKSNQLPMDFIKDKEDFKNRVEDLFKEHKINWKKKINLLATNLDEVFKDTFESKSLRATSYIEALTAQILKRYYPFSNEKKQKDGSEVRHIPGRATSNIRKVLKVKTKVRDTNIHHAIDAILIGLTNHSWLQKLSNTFRENLGVIDDKARARIKKDIPLIEGIEPKELVEMIEDRYNEFGENSIFYKDIFGKTKAVNFWVSKKPMVSKVHKDTIYAKKANGIYTVRENITNKFISLKVTTTTKYDDFMKKFEKEILHKMYLYKTNKNDVICKIVQNKADEIASLLEEFSAIDTKDKELVSESKIKLDNLIHKPLIDNNQNIIRKVKFYQTNLTGFEIRGGLATKEKTFIGFKAYLENEKLQYERVDVSNYEKIRKEKDNSFKVYKNDIVFFIYSDGSFRGGKIVSFLEDKKMGAFSNPKFPASIGLQPDSFLTIFNGKANSHKQQSLNKAIGIIKLNLDILGNIKSYQKIGSCNSEQLDFIKNIKS

SEQ ID NO: 5889 - protein, 1115 aa, synthetic construct
  REGION 1..1115: note = Synthetic
MSQKILSLDLGITSIGYSILNEIEDDRYTLVDYGVSMFDKATDKDDKSKKLVYSACRSAANLVNLRKERKKNLAKLFEEFGFGERKYFLYQEKQNVYKNKWELRAKKAFEEKLNIEELFTIFYAIAKHRGYKSLDTSDLLEELCAELHISFEDEKSKNDDEKGKIKSALKKIENLKINYPNKTVATIIYEEEMKGKNPTFRNHDNYKYMIRRENINDEIKKIIASQEKLGLFDKNFKVDLFASKIIKTIDDQKESSNDMNLFASCKFYKEHKVSHQYSLLADIFKMYQAVSNITFDKKTDKITKKQIKLIADDFFEKIKKGKNVPDIKYKDIRKILKLDDCVKIFNKEDSTFNKGKKQENSIIKFHFINNLSKIDNGFIVKAFEKENPLEELKEIFDVLGFEKSPKSIYEKLKNKVDDKTIIDLIKNKTGLSLHISSYAMIKFIPYFEQGCTLSDIKKELNISEDEDYDHFKKGIKYLNLLQFEADDNLLINNHTVKYVVSAVLRLVKHLHVKYGVFDEIRVESTRELSLNEEAKKEIDKANKALEKDISDIVANKEYQKIAEYYGKNLQKYARKILLYEEQNRRDIYTGEGIAFEDIFTNAVDLDHIVPQSLGGLSVKHNFVLVHRDSNMQKSNQLPMNFIKDREDFKNRVEDLFKQHKINWKKKINLLATTLEEIFKDTFESKSLRATSYIEALTAQALKRYYPFPNQTKNSMEIRYIQGRATSNIRKLLHVKTKTRDTNIHHAIDAILVGLTNKSWLQKLSNTFRENLGKIDDEARANIKKSIPLIEGIEPKELIELIEDRYNKFGVESIFYEDIFETIKTINFWVSKKPMVSKIHKDTIYSKKQNGIFTVRENIKAKFNTLNISPTTKAEIFMESFKKEILAKMYLYKTNPNDVVCKIVQKRADEIVKLLNEFIQLDAKDKALMSEAKTKLDDLIHAPLIDNNGNEIRKVKFYQTNLTGFEIRGGLATKEKTFIGFKAVLKNDTLQYERIDASNFEKLKKENDNSFKVYKNDLVFFIYPNGTTKGGKIVSFLEDKKTSAFSNPRFPASISNQPHSFLAFFNGKPNSHKQHSVGKAIGIIKLNLDILGNIKSYATIGEAQSEVLEFIKNIKS

SEQ ID NO: 5890 - protein, 865 aa, synthetic construct
  REGION 1..865: note = Synthetic
  REGION 701..707: note = misc_feature - Xaa can be any naturally occurring amino acid
MSKKILSLDLGITSIGYSILNEMDNDRYALIDYGVSMFDKATDKDGKSKKLLHSASKSSTKLYNLRKERTKNLATLFEKYGLGKASALLGQERENSFPNKWYLRAEKSFSESLTSPELFSILYLMAKHRGYKSLDTDDLLEELLLELGFDVEEKKVKDVEKGKIKQALKTVEELRQKYPEKTVARIIYEIEIQKENPTFRNHDNYNYMIRREYINEEIRKIVLAQKKFGLFSETLDVEIFIKKLIMTIDDQKDSTNDLSLFGNCEYYPTHKVAHQYSLLSDIFKMYQSVANITFDKTKISKEQIKIVSDNFFKKIKQGKNIADIKYQDIRKLLKLSDEVQVFGKEDYRLDKKGKKVHHTITKFHFLANLGKIDNSFIKSIFEKENSLKILKDIFDVLEFEKAPKSMYTQINELFLKYSLVDDERLKNETIINLIKYKTGNSLNISAHAMIKFMPYFEKGMSTDEIKKELKLERNEDYSTFMKGVKYLHTKSFEKDDNLEINNHPVKYVVSATMRLVKHLHATYGEFDEIRVESTRELSQNEETKKAIDKANREQEKKFQEIIENIEYQKIATHYNKNLKRYARKLMLWEEQEKLDIYTGKTIGIDAIFSNVVDIDHIIPQSLGGLSVNHNLVLAHRDENVKKSNQLPMNFVKDKVDYTNRVEYLFKEYRINWKKKINLLAMTLDDRYKDIFESKELRATSXXXXXXXELEKEFSTALKNISNAYSVGKLLQLEADLTKKLYKYAAKKTNQLGFVREHAKAENANGFLDHGNYLAYGLGATTLWVLGIPHGFAVMHGKTRRGALVFDVADLIKDGIILPWSFVCAKEKQSEKEFRSQILQSFVEHKALDFIFDEVKKASMYYKEEL

SEQ ID NO: 5891 - protein, 1111 aa, synthetic construct
  REGION 1..1111: note = Synthetic
MTKKILSLDLGITSIGYSILEELENNRYSLIDYGVSMFDKATDKDGKSKKLLHSASSSASKLVNLRKKRKKNLAKLFEEFGFGEKNYFLYQEKQNFYKNKWELRAKKAFEEKLNIEELFSILYAIAKYRGYKSLDTSDLLEELCVELDISFEEEKAKKDDEKGKIKLALKTIENLKLKYPNKTVATIIYEEEMKKKTPTFRNHDNYRYMIRREDINDEIKKIIFSQVKFGLFEKDFKVNEFTSQVIKTIDDQKESSNNEDLFARCKFYKEHKVSHQYSLLADIFKMYQAVSNITFNKEKTKITKEQIKLIHDDFFAKIKKGKNITDIKYKDIRKILKLDDNVKIFNKEDGTLSIVKFHFLSHLSKFGDVFNAILEKPNRYEILKEIFDVLGFEKSPKTIYEKLKDKVDDKTIIELIKHKTGSSLRTSSYAMVKFIPFFEQGYTLSDIKKELNISEEENYTHFKKGIKYLSLSQFEKDDNLSINNHPVKYVVSAVLRLVKHLHVKHGVFDEIRVESTRELSLSEEAKKEIEKANKALEKQIDDIVSNKEYQAIAEYYGKNLRKYARKILMYEEQNRRDIYTGEGIEFKDIFTSKVDIDHIIPQSLGGLSVKHNLVLVHRDSNLKKSNQLPMNFINDKEDFKNRVEDLFKERKINWKKKINLLATTLEETFKDTFESKELRATSYIEALSAQVLKRYYPFPNQTKNSMEIRHIQGRATSNIRKLLHVKTKTRDTNIHHAIDAILIGLTNKSWLQKLSSTFRENLGKIDDEARANIKKAMPLIEGIEPKELVEMIEERYNEFGEESIFYKDIFGNTKTVNFWVSKKPMVSKVHKDTIYSKKPNDIYTVRENITAKFIALKITPVTKAEVFVESFKKEILTKMYLYKTNPNDVICKIVQKRADEIVKLLNEFVWLDAKDKEAMSEAKIKLDDLVHSPLIDNNGNEIRKVKFYQTNLTGFEIRGGLATKEKTFIGFKSVLENDTLQYERIDVSNTIVVNGIYKLKENDDSFKVYKNDLVFFIYPDGGVKGGKIVSFLEDKKMAAFSNPRFPASISNQPHIFLTIFNGKANSHKQHSVGKATGIIKLNLDILGNIKSYITIGDVQSELLEFIKNIKS

SEQ ID NO: 5892 - protein, 1137 aa, synthetic construct
  REGION 1..1137: note = Synthetic
MKKILSLDLGITSIGYSILNEFENDKYSLLDYGVNMFDKPYDKDGNSKKVIHSQNTSTTKLYSLRKQRKKNLAKLFEEYNFGKKDNFLNQEKKNLFINKWELRAKKAFEEKLTFEELFSILYLITKHRGYKSLDTDDLLEEFCEKLGLNQEVKKEKNTDEKGKIKQALKIIETLKLQFPHKTIAQIIYEEEIKKENPTFRNHDNYNYMIRREYINEEIKALVSSQEKFGLFDKNFDSKAFIEKLIKTIDDQKESSNDLSLFKDCEYFKEYKVAHQYSLLADIYKMYQSVSNITFNPEKIRITKEQIKLIANDFFDKLKNGKNITDIKYKEIRKILKLSDGFKIFNKEDSYKLKDRTQENIITKFHFVNNLSKFNKDFIENILEKSNKYEILKDIFDILRDEKQPKPIYDKLNNIFSEYDLIKDESIKNNTILELIKNKTGSSLSISHQAMIHIIPYFEDGFTIDEIKQKLNLSREEDYLSFKKGIKYLSVAQFEQDTNLPINNHPVKYVVSAVLRLIKHLHSTFGTFDEIRVESTRELSLNEESRKNIEKVNKENEAKIKAILENQEYQQIAKNYGKNLEKYARKILIWEEQERFDIYNGKSISFGDIFSNSVDIDHIVPQSLGGLSVKHNLVLVHRDTNLQKLNQLPLNFISDKQGFTNRVEYLFKEHKISWKKRKNLLATNLDEIYKDTFESKSLRATSYIEALTAQILKRYYPFPTQTKNSMEVRHIQGRATSNIRKLLNVKIKVRDTNIHHAIDAILIGLTNKSWLQKLSNTFRENMGVIDDIARENIKKTIPLIEGIEPKELIEMIEDNYNIYGEDSVFYKDIFGKIKAVNFWVSKKPMVSKIHKDTIYAKKPNGFYTVKENIINQFIALKITNTTKTDKFYEDFKKNILEKMYVYMTNPNDIICKIVENRADEIKELLHSFESIDKKDKEGLTEAKQKLDELIHKPLLDNNNKAIRKIKFYQTNLTGFNIRGGLATKEKTFIGFKAFLENDKLSYERIDVLNYQKIKTQNDNSFKAFKNDIVFFIFTDGNYSGGKIVSFLEDSKKSAFQNSRFPSSLKYQPKSFCEVDKFEVHKKTMPKSIGKAIGIIKLNLDILGNINSLQTIGNVQSELYIFLKELKNGMEGNTFNKTL

SEQ ID NO: 5893 - protein, 1129 aa, synthetic construct
  REGION 1..1129: note = Synthetic
MKKLLSINLGITSIGYSVLNELDNDKYSLIDYGVNMFDTPYDKDGNSKKLIHSQIKSTKKLYELRKERKKNLSKLFEDFGFAKKEDFLNQEKENLFINKWGLRAKKAFEEKLTFQELFSILYLIAKHRGYKSLDTDDLLEEFCEKLGLNQEKKKDNGKDNEKGKIKQALKTIETLKLQFPQKTIPQIIYEVEIQKENPTFRNHDNYNYMIRREYINEEIKALVLSQEKFGLFDKNFDSKAFIEKLIETIDDQKESSNDLSLFGNCEYLKNEKVAHQYSLLGDIYKMYQSVANITFNSNPTIKISKEQIKLIANDFFDKLKNGKNISDIKYKEIRKILKLSDDFKIFNKEDSYKSKDKTQENSITKFHFVNNLSKFDKDFIKSILEKSNKYDILKEVFDVLRDEKQPKPIYDKLNNIFSKYDLIKNESIKNNTILELIKNKTGSSLSISHQAMINIIPYFEDGSTIDEIKQKLNLSREEDYLSYKKGIKYLSVAQFENNNNLPINNHPVKYVVSAALRLIKHLHVTYGAFDEIRVESTRELSLNDESKRNIDKVNRENEAKITAILENIEYQQIAQTYGKKLEKYARKILIWDEQERFDIYNGKSIGFGDIFSNSVDIDHIVPQSLGGLSVKHNLVLVHRDTNLQKLNQLPLNFIADKQGFIDRIEYLFKEHKISWKKRKNLLATNLDDTYKDTFESKSLRATSYIEALTAQILKSYYPFPNQTKNSMEVRHIQGRTTSNIRKLLKVKTKIRNTNIHHAIDAILIGLTNQSWLQELSNTFRENMGVIDDVARQNIKKVIPLIEGIEPKELIEMIENNYNAYGEDSIFYKDIFGKTKAVNFWVSKKPMVSKIHKDTIYSKKPNDFYTVKENILNQFIALKVNNDTKANKFYEDFKKNILEKMYVYKTNPNDVICKIVQNRAYDIKELLTSFETIDKKDKEALSEAKQKLDTLIHNPLLDNNNKPIRKVKFYQTNLTGFNIRGGLATKEKTFIGFKASLKNDKLFYERIDVANKNNIKDNDFLIIRNNLICINFKNKNLLGFVESFDENTNKIRMYDSRYPKRLENQPERFKVASGKGRKEFGIAGAIGIIKLNLDILGNINSYQIIGTIQNELYSFFKKLKNDKGNLPINT

SEQ ID NO: 5894 - protein, 1043 aa, synthetic construct
  REGION 1..1043: note = Synthetic
LKTLGLDLGTNSVGWALVDDSKLDRNGKPEINMGVYVFPDAGELEGGLFVSHRKKHGMTVRMRRNLRRKRERRDALVRKLTDNRMLPQDVTERTRFMCMNETDPYLLRQKGLDYELTLLEFGRALFHISRRRGYLSTALLKVKELESIRVAAEEHLASAEVELEEPNEDVVMTAEKKEESKLLKNMADTRRNIQLTESRTLGEFYAKNLANHTPVRGYGKTIKEGTKVVSRNPSRDPIGIRAERLLFESEFEILWNKQAEFHSVLTPGLKGELYRIIFGQRPLRSQSFLVGKCTFIPNRRRLAKATLLAQRSIILQYLNTLSIADATNGLVSKLSAEQIVALSNKLNQKGSISWQEAKDAISLPKHLRFSDEPLRSSRKGMSVRGRLRIKGNTTAESVRKAIGNDRWLALDVPMTNSKYDTPPTMQEDLVTRLITCREFKNIAEGLKRDFGFNNLELYMLATIEFPDGHLNHCAEVIRKIEPHLLAGNVYSVACELAGFREQNTSTEQVLEIVDMLPKLPNLNNPVVQRSVDSAIKVINAVLDKYGKPDRIHIEMPRDVSRTNHDREMTWKSQENNAKANAIARKQLEELGAITESTVDKQIKKIRLWEEAGRVCPYFPDVPVTLQQLLDHYDIDHIVPQSVCYDDSYANLTICPNIENQQVKRKQTPWQAYGITNRWKDIEAYVNGLKSMHSKKKERILSQEIDIEGFTNNALSDTRYISKLILTHVKQLGVEVNVSRGQLTALLRDQWGLKQCIPQLEEEQLKLAVWKQKTVKKDAKPRFDHRHHALDAIVTALTDSSSLRVLRRWFERKEDNLPNNKIQKEKPWGSIAKDITDLMDNCVVVHASTRGIGGPLHEQTALKPPSKEVVDRTIAALPENQRLRIDRCVVVGKQLVYFDDKGVPTKAYDLKSNHHAVVWESQYPNAKTGLYPREITVVTTIEASRRAQAGEPVIQKVRNGFKYLFSVCKNDIVLWTGENPGLKRVGAFSGGDYWEIQLQAITSAVKGKETLIRIRSVSDLDSLLGRVDRNSIGEIVSTEPENLA

SEQ ID NO: 5895 - protein, 1135 aa, synthetic construct
  REGION 1..1135: note = Synthetic
MRYALGYDMGVGSLGFAVIALSEDGEPEDVLDIGVRIFSTAREPDKGGKIGEPLAASRRAARGVRKRSDRLKMRRKSLMKQLIRYGLMPDSVTEQKMLETLNPLELRAKGVTEPLSLYELGRALFHMQQRRGYKSNRHEGDNEQTGVIETGGRELRQKLAAYDMTLGQYLYHKPDQQRGSRFRKNMEGTYTYYPMRDMVEREFTTLWNIQQGYHPMQLNDEARDAVHRAIFYQRPLKPQPRGACLYYTMEERAPMALPLAQRFRILQQIHNMRIIGGHHQFSGIPLSVEEKQRIYEKMLVSESVKESDVKKLLALQGTQHINLFRANVTDKLKGDKTAVEMEKVYGKEWYCVPLEVQNKIVSLLTDCEKITQPHGKSRLLEHEEIIERLIECFDCTDEQAHAMANVKLSSTMASFSAKLLAELVPQMEPLGGNRSLSEAIAMLNVPQSRMDKECDLLPYYAELLGNHCTKMPSADKHVRDYGRVSNPTVHVALNQLRKVHNSLITRFGGKPEYITIELVRELKKGQREIADIIKENDKNKKLRHRWKEEIKQELGIEANDRDLAKMKLWKELAESNAANERICVFTGKPIRLSQLLSADIEIEHILPRSLTLDDTSANKTVSFVSFNRLKGKQAPEALFASPVLWEGRTISYEDMVERADHLRNAKAWRFRKGAMQSFEEKSTKIIYKGEEVDTGLESFAARHLIDTSHMAKLAKKYLAYGCAQGERGMIATPGTLTGLLRQAWGWNSLLAEDDAKDRTDHRHHAVDALVIALTTRSMVKHIAEAAKIAEITGRKLSSVVGEMTNPFAHKRHIIQSLVDKMVVSHKPEHGTPAMNGGTTGRLHEDTYYGRTQETPKSNAVYVVRWKPEEFTTRKHVEKIEDKLLRDTILTYLEGVSDKETATYVQQFCKNQKIHTIRALDEKNAVYVVRWKPEEFTTRKDVEKIRDKRLRDTILTYLEGVSDKEIATYVQQFCAHQKIRAIRALDEKSKNAMVEVRDPVTKQPYKFMVGGSNHCVDIFIETTGKKAHIWQSEIIKTFDANQKDFVPEWKSEPNRKLIWRLHKDDIVGYEKEGKTMYARVQTLKANGQIFFVQHNDADGKTSFSMMPAPAQKAKLRKISVSPDGVVLDPMRVQQGE

SEQ ID NO: 5896 - protein, 1148 aa, synthetic construct
  REGION 1..1148: note = Synthetic
MLYRLGLDIGITSVGWAVVALEKDESGLKPIRIQDLGVRIFEKAEDSKTGASLALPRREARSARRRVRRRRHRLWRVKRLLEQQGIISMEQIEALYTQRTPSPDVYALRVSGLDRRLTAEEIARVLIHIAHRRGFQSNRKSELRDSDAGKLLKAVQENEARMQTKGYRTVAEMLVSEATVMNTEGKLIHGRSHSSVSNVRNKAGEYRHTVSRQAIVEEVRAIFTAQRALGNDLMSEALEDAYLHILCSQRNFDDGPGGDSPYGHGLVSASGVRQSIYERMVGICTFEYKQREKRAPRSSYSFERFQLLTKVLNLRIYRQKDDGGRYLCALTEDERSRIIQCAYEQTKITYSKLRKLLNMQDADTFSGLTYGANRAREKTEDAVFVELKFYHDVRRALQHAGMSIQDIPHETLDQIGWILSVWKSDDNRRIELSKLELSDNVIEELLPLNGAKFGHLSFKAIRNILPFLEDGYGYDVACGLAGYQFQGQEEHQKQKLIPPLDEGEVTNPVVRRGISQAIKVINAVIRKYGSPESIHIELAREMSKSLDERRKLEKAQKENQKNNERMKEEIRENLGIMHVTGRDIVKYKLFKQQQGLCMYSGETLELSRLFEPGYAEVDHIIPYGVSFDDSYDNKVLVKAEQNRQKGNRTPLEYLQDKPDQKAKLIALVESLQLSQKKKNYLLMDKRAVDLEQEGFRERNLSDTRYITRALMNHIQKWLLFDETASQRSKRVICVNGAVTAYMRARWGLTKDRDAGDKHHAADAVIVACIGDSLIQRVTKYDKFKRNALADRNRYMKQVNENQGTMQYVDVETGETFTWESFDERKFLPHETLEPWPCFRDELLARLSDEPAKNIRAIGLLPYSESEPIQPIFVSRMPTRKVTGPAHKETVRSPRIVRLDDKKGTEIQVTVSKVNLSELKLTKDGEIKDYFRPEDDRQLYETLRSRLIQFGGDAKAAFKEPVYKISKDGSVQTPVRKVKVQEKLTLGVPVHAGRGIAENGGMVRIDIFEKDGKHFFVPVYVSDVLKQELPNRLATAHKPYSEWRIVDDSYRFKFSLYPNDAIRIKPSREVDITYKDGSKEPLGCRLMYYVGADISSANITVKTHDDFGEARLGLQGLEVFDKYVVDVLGGAHPVHKEKRMPFRVRRKEK

SEQ ID NO: 5897 - protein, 1117 aa, synthetic construct
  REGION 1..1117: note = Synthetic
MLWGDTVMSYRIGLDVGITSVGWAVLELTTSNEGKRKPCRIIDLGVRIFEAAEDRGESLASPRRLARSSRRRLRRHRHRIARIKQLMDRRGIMPVPEIEKMYTTANSKRPDVYQLRAEALDRLLNNEEFVRVLIHIAQRRGFKSNRSSELLEGETGKLLKAVRDNREFLRQSGYRTVGEMLFRDSRFTQKRNKPGDYRHTVGRDLLLEEIRLVFAAQKQFSNPHASQNFLEEYLSIFASQRNFDSGPGGNSRYANLIEGMIGTCTFERSQKRAPKASYAFERFNLLTKLQNMRISHRNEDGTRKSENLSDDQKRLIIDLAHQKQVLTYTDIRKLLKLDENSSFTPLTYGNARARKEVEKSKFVSMPFYHQVKASWQKNGLDMATLTPERLDEFGWILSVWKSDENRRTKLAALDLSSEEIESLLPIGTGKFGHLSFIALRKLTPLLEQGLDYDKACSSIGYGQSEFLGIEKTNRLPPVSHEQITNPVVLRALSQSVKVINSIIREHGIPESVHIELAREMSKTFDERNQLTKLRNENERTNNKVKLEIANMLGVSKVSPIDIVKFKLYLQQQERCLYSGESFDRSRLFEPGYAEVDHIIPYSISFDDSYNNKVLVKTGENRQKGNRTPVEYLGVDPARLARYIALVDSLHLPRPKKNNLLRDLSKDIVERETFKERNLQDTRYITVELASHIERYLLFDMANSTQIKRVVSVNGPVTAFFRKRWGLRKDRELGDLHHAQDAVIVACVGDDLIQRVSKYDKFKRSYLANPKVFTKSFDKQTNTVRYVDNQTGELFTWDSFDDTHLALKDNLFPQAWPRFRDELLARLSPDPTYAVHMANISNISKDLMPVFVSRMPNRKCTGPAHKETVKSPRQLSDGVVISKVSLSELRLDGEGEIEGYYNPQDDTVLYAKLRRLLQEANGNAEKAFASPVYKVSKDGKTSTLVNKVKLSEKASYGVMVHQARGVATKPSMVRVDVFIKEGRFYLVPVYVPDIVRGLLPTRAITPGKIYEEWRVIDSSFRFQFSLYHNDVIKVKPKGRTVIKFKDGTERLLGEEIVYYKSTNIANGSIFVKTHDDAGEVKSLGAKTLTIFEKYNVDYLGRLTKVHDESRLEFKLKGR

SEQ ID NO: 5898 - protein, 1146 aa, synthetic construct
  REGION 1..1146: note = Synthetic
MAYRLGLDIGITSVGWAVVALEKDESGLKPIRIQDLGVRIFDKAEDSKTGASLALPRREARSARRRTRRRRHRLWRVKRLLEQHGILSMEQIEALYAQRTSSPDVYALRVAGLDRCFTAEEIARVLIHIAHRRGFQSNRKSEIKDSDAGKLLKAVQENENLMQSKGYRTVAEMLVSEATKTDAEGKLVHGKKHGYVSNVRNKEGEYRHTVSRQAIVDEVRKIFAAQRALGNDVMSEELEDSYLKILRSQRNFDDGPGGDSPYGHGSVSPDGVRQSIYERMVGSCTFETGEKRAPRSSYSFERFQLLTKVVNLRIYRQQEDGGRYPCELTQKERARVIDCAYEQTKITYGKLRKLLDLKDTESFAGLTYGLNRSRNKTEDTVFVEMKFYHEVRKALQRAGVFIQDLSIETLDQIGWILSVWKSDDNRRKKLSTLGLSDNVIEELLPLNGSKFGHLSLKAIRKILPFLEDGYSYDVACELAGYQFQGKTEYVKQRLLPPLGEGEVTNPVVRRALSQAIKVVNAVIRKHGSPESIHIELARELSKNLDERRKIEKAQKENQKNNEQIKDEIREILGSAHVTGRDIVKYKLFKQQQEFCMYSGEKLDVTRLFEPGYAEVDHIIPYGISFDDSYDNKVLVKTEQNRQKGNRTPLEYLRDKPEQKAKFIALVESIPLSQKKKNHLLMDKRAIDLEQEGFRERNLSDTRYITRALMNHIQAWLLFDETASMRSKRVVCVNGAVTAYMRARWGLTKDRDAGDKHHAADAVVVACIGDSLIQRVTKYDKFKRNALADRNRYVQQVSKSEGITQYVDKETGEVFTWESFDERKFLPNEPLEPWPFFRDELLARLSDDPSKNIRAIGLLTYSETEQIDPIFVSRMPTRKVTGAAHKETIRSPRIVKVDDNKGTEIQVVVSKVALTELKLTKDGEIKDYFRPEDDPRLYNTLRERLVQFGGDAKAAFKEPVYKISKDGSVRTPVRKVKIQEKLTLGVPVHGGRGIAENGGMVRIDVFEKGGKYYFVPIYVADVLKRELPNRLATAHKPYSEWRVVDDSYQFKFSLYPNDAVMIKPRKEVDITYKDRKEPVGCRIMYFVSANIASASISLRTHDNSGELEGLGIQGLEVFEKYVVDPLGDTHPVYKERRMPFRVERKMN

SEQ ID NO: 5899 - protein, 1524 aa, synthetic construct
  REGION 1..1524: note = Synthetic
MTRILGLDMGTNSIGWAVVDKEQEQIEDSGVRIFPEGVVNKNEGEGREKSKNALRTENRQIRRQVARRRFRKIKLLELLIEQDMCPLTKDQLMVWKHWDKSKKSEGRHFPQNERFSEWLTLNPYDLRNRGVNGELTKMELGRLLYHMIQRRGFLSSRKEKDTGKIYTGKENMVGIDDTKEALNSNTLGEYLYSIYPEDNESFQNMRDKKGDDLRIRGRYTLRDMYVEEFEKIWNQQAKRLGLDKVNVTKKKIVFLNGGKTRNRNAKKIEYLKKHRDKVDIDEIIIRRENANKKLTRVTSYKNISLHDHLGGRIELQDDKVKFDNKDSVLFYQRPLRSQKKLLGKCRYEKNKTPVSISHPDFEIYRAWLYVNTIKFGNNIPLPLEQKQKIIGYLKTKKSAVKFADIIKLLQMSHENFNYKDDDKVEGCPTIAQLSKLFSGSGWTQNYHNIWHDFYFYDDSELLFKKLSNAKAYELKDKITLDDIKKISIKDDAYARISLKAVRNILPFLKRGLLYNQAVVLGGVKNAFNYKVQSDEVPRWDRFEDDHDTIVKDILSIINQKNKQGETIERIKEYLTNPINEYGFEQNSPALKKLYHHSQEIEEKEKSDKISEIENLRNPIVQRAVQEMRRMVNELLKKHGKFDRIVVEMGREMKLGKKGRNELSRAIRQNFEANENVREILKEYQLAPSRQNIQKVLLFNEIQDKTGKVICPYTGKALNISDLLGVGNKVQIEHIIPRSYSQDDSFANKTLCDAKFNQLKGNLTPYQFYLKNSDKKLWGAASWDEIEQRAYNILHFNKAKRFTTKKLEWKTEEFISRQLNDDRYISRKTKEVLSEVCNEILVMPGAVTADLRRLWGLNNILQPTIGLPKDNFDIDENKSLSYWAVTDENKNIRKLYPTNNPRPDVAEGETVVAGNVTKNKFKSQRLNLEFDAPEIPDGKYYVKFPVSNPVETIRQYIEKPEYADNEVILRGLINRNKFKHDSLKQRVDVNENLEDGKYWAKFKIIDKGFEIPEKNKRPENKNGICLFGKVKDNHFTSYIYQCETDLKDGQYWVLLDLDFDNVEFIPTKNKKPEIRENQILVLGDVNEEKKFTAIHDMQLQFDWDEKPGRYWAVLNILSAEPEFTAIENKPPEIDDNEKLIEGKVWVDHKTGEIRFDPKKNRDDHRHHAIDAITIALTDYNIINQLNRYNAEKDTLQKGNAAEKPSFDEPWDGFFKQAKQIAGNILVSYHKDNTVTKKVKMFIEKNGKKFLSEGQAVRGELHKKYIYGKRKPPMGEQSFHKRKFLKDLKDNQLDKIVDENVKRIVKHAREREKILKAQITALQKDRTKAGDIEEKNIDEQIKSLEEEIRLLYTLPNKNGDRVPIKKVRIRENLGNTEMLKPSENVNQYVNPRNNHHVLIYRDNEGKLRESVVTLWEAVERKSQKEDVYQLPPDGKEKVTTLEVNDMFLLGLDSEQANNLLTIDKKILSKYLYRVQKVSGGDYSFRFHLASTLNKKEEEIRIASFTAWEKVHPIKIKINILGQIEKI

SEQ ID NO: 5900 - protein, 1068 aa, synthetic construct
  REGION 1..1068: note = Synthetic
MTYCQFLCEGFLMKKQSYILGLDIGTNSIGWAIIHNSNEPDDVSNKLVIGSRVFESVLDKTEIEKGQGQTKNVDRRNARQLRKQLDRRRRRKARIFSTLQQSQLLPDGNAEKVLPELDAEFRSKYFINKKIPAIEHTLSYYLRARALDERLELFELGRALYHLAQRRGFLSNRKNASNAEEDSGIKGEIHNLNENLKAENARTLGEYFSRIDPEIERIRQRHTSRQMYINEFELIWEKQSEYYPEVLTDDLKKRLSNDIFYQRPLRSVKHLIGQCSLEPKEKRAPYSCYEAQLFRTLSQVNNSSVLYGQTGEILELTAEHRKILLNELAKGDLSFSKAKQVLKLKRTDKFNYELGGEKRFIGNRIQETIMSVFGEEWFGMSEKQQLAIIEDIKSFEDKAALRKRGMKTWGLGKEQAEEFSDLVLEEGYCSLSRKAIQKMLPDMVGGMTYAEARKKHYPESFDAKQGYSVLPSVTSALSNLRNPVVERTLNELRKIVNSVIAEHGKPEAIRIELARDLRNSQKKRQEMSKTMDSRRKKREAVAKRIIEEAGIARPKRSDIERALLAEECGWTCPYTGKKISMTALFRDSAFDVEHIIPFSRCLDDSFANKTLCYHEENRNIKRNRTPYEAYHSSPDKWEDILKRVNDFEKEGGRNPKLQRFKMESIDDLEDFSQKQLVDTRYASRLAMEYLGLLYGGQSDQLNKRRIYAGNGRVTAFLRGLWGLNRILGDKEQKQRDDHRHHAIDAVVTALLSPRLIQQMSHSAEYAEGDPQAVWKRLFSKLEMPWDGFYDDVKEKVDDLTCSHRLRRKASGALHEETLYSNEKQSPDGSLHTHVRKRIDSLSVKDVGLIADARIRKVVQDKLTELGQTEPAKAFADPANHPVLHTPGRRIKETPIHKVRLRLNQKPIQIGKDKSTRNILPGNNHHIELYEVLDKEGQVTKWEGKVVSLLETRQRISNNLPIVERDHGKNTRFLFSLCGGDCILLKKANGSEQPYIIRGITQRSSGSVELSFVGINDARLKKEIENDDKARKLKGENKGFRTASPNALKDIGCRKILVTPLGQIRWAND

SEQ ID NO: 5901 - protein, 1067 aa, synthetic construct
  REGION 1..1067: note = Synthetic
MKHTIGLDIGIASVGWSVINLDKNRIEDLGVRIFPAPEHPKDGSSLAKQRREASGTRKRNQRKTARLQKIQALFREEKILTSLEIENLLNAHSEKSPYELRTDALSRELSAPEWFRALYHIAKHRGFQSNKKIKAGSKEKEKEEGALLEGVKTNALLMAEKGYRTVGEMFFLDPKFTDHKRNKGGDYAHTVSQELLREEVELLFAEQKRLGNPHTSEIFRKSFIEAFTSRLPFAAPGQIESKIGFCTFEKNEKRAPRMSWSAERFILLGKVNNLRILDTFKGERPLTPEERENLINLAYKKAEVKYKDIRKAFSLEESSYFSGIRYSKEDAREGSENGKFIALKGTHELRKEITERLGKEAWETYESTPAILDEIALTLTLLKTEEDIRSDLESKKIPSVLIDAVIDLDFKSTINLSFRALRKILPFMESGFRYDEACEKAGYPYENAERTKLLPPDDFDDITNPVVKRSLHQTRKVLNAIIRKYGSPWSIHIELAREMGKSFDDRKKIQKMQDENRNERERLKADFISNFHREPSGTDLLKYRLWKEQNCCDPYVQLPVGPGIFEPKYIDPIRLFQQGDGTYAEIDHIIPYSRSLDNSYTNKILVLAEENRNKGNKTPGEYLFSSTNPECWDAFVAWVQSNIRNGKKRRNLLRESFTLEDSREMTERNLTDTRYITRYLANYLESRLQFSDPSPSSKKVHRVNGGVTAALRGLWGLPKDREESHLHHALDAVVVAVTAPHLIERMTEYDRMRKAANFGTGQDRSSRNAPQPWAGFRKELLARISENPAEEIGKIALPSYKQEEIDSLRPIFVSHMPVRKATGAAHKETVRSLKLADTLGGTFVRTPLTKLKLADLENMVGKERDRKLYDALKERLSANDGKGEKAFGTSAPLFRKPTREGNPGPIVRSVKIFSPGTSGVRVRGGIADNDNLVRVDIYSYKNKFSLVPHYVDDIARGVLRRKGILAHKDENNWEPITPEHKFLFSLFPNDLVEVLQRNDDSVLGYYRTVDRDNGRLTLASHDGKEEDIRVSMRTCKSIRKFQVGLLGDFHEVKKEKLPSGKPVHELA

SEQ ID NO: 5902 - protein, 1068 aa, synthetic construct
  REGION 1..1068: note = Synthetic
MIGGLAMKHVFGLDIGIASVGWSVINLERNRIEDLGVRVFPAPEHPKDGSSLAKKRREAGGSRKRIQRKRSRLLGIRQLFQEHGVLSFQEIDALFRSPLDKNPYEIRVDALSRRLSTTEWFQALYHIAKHRGFQSTKKTTANSKEKEKEEGALLEGIKNNASLLHEGKYRTVGEMLLMDPKFQDHKRNKHGDYSHTIPQSLLREEIETLFFEQQRLGNPYTTDEFKRKILDTFASRLHFAAPGQIESRIGPCTFEAGEKRAPCMSWSAERFILFGKINNLRIRDYFRGERSLSIGEAHDLANLAYQKPEVKYKDIRKLFDLDDTAFFSGIRYSGKDTEREKSEGTVFVRLKGTHELRRAIASKLGKEAWETYASTPEILDEIARTLTWLKNEEDIRKSLSDKNIPPYLIEAVLDLDFKGTINLSFKALHKILPHMETGLRYDEAWPKAGYQGPVSEIESVRSVLLPPEDFDDITNPVVKRSLHQTRKVVNALVRKYGSPWSIHIELAREMGKSFDDRKKIKTMQEENNAEKERTKKDFIENYTREPSGTDLLKFRLWKEQGGFDPYHQVHIDSGRLFHQDDATYAEIDHIIPYSRSFDNSYTNKVLVLAEANRNKGNRTPREYIFSESRPEKWEAFVAWVEAQIRNGKKKSNLLRESFTLEDSNRMTERNLTDTRFITSHLANYLERCLVFSDPSPTSRKVLRVNGAVTATLRGKWGLHKDREAGHLHHALDAAVVAVTSHGLIQRITEYDQIRNSPGAKRNNGGAQDRTPQPREGFSRELLARISPNPTEEIGKVSLPSYGAEESASLRPFFVSHMPVRKARGAAHKESVRSVKLGENGGTSIRTPLAKLDFKSLEKMVGKERDRRLYESLKERLAAYGGDGGKAFGGSAPPFYKPTKDGSRGPLVRSIKVFSPGTAGVLVRGGIAENDNLVRVDVYKYKTKFSLVPHYVPDIAKGIVKKRGVLAHKEEKDWEVIGDEHKFCFSLFPNDLIEIIQKGTAKTLGYYRGMDRSDGKIALNLHDGSNKKEIRVSTRTCDSIRKFQVGLLGDYHEVKKEKPPQGKIDDGLA

SEQ ID NO: 5903 - protein, 1136 aa, synthetic construct
  REGION 1..1136: note = Synthetic
MANADRAARERYVLGLDLGSNSIGWAAVRVADDDRKDNEPVPVGVLDMGSRVFEAGVEGNIEQGREESRTVARRNARLLRRQHDRAARRIDIIGLRLQQKGLLPSLNEEHPLGHDDEQKRFPIDRNDQARSERTSQRHETLNRLDAELWEEAKRINAENPSPLPEADLRQRLPYFLRAMALDPDRCLSSYAIGRALFHLAQRRGFLSNRRTDRKAGKEEELGEVKKTIEVLKVKMKELGCRTLAEYFLRLPGEERIRGPKHWTARAMYEEEFDLIWKAQARRDPARFTDDFRKRLHRAIFRQRPLKSAAGLVGECPWEKGRRRAPWACLDAQRFRMLQQVNNIRVLGREQPELSPAERKVLVVRLEEGGDLPFKEAAKLLGLKKGEKLNFNEEKGGETKFVGNRTAKKLIDVFGLERWQSMSAVEHDAVVEDWRKTVKDETLERRGTKAWGLDREQAQKFAGLSLEDGYTGLSLRAIAKLLPEMGKGIPYMEAAKKVYGDRLPADVMDLLPRVDKAIPGLRNPAVARTLTELRKVVNALVRRYGKPESIRIELARELRKGRKSRETAWKRNREQEKRRQAAGKSVLDEMGNQNPTRADIEKILLWEECGKQCPYTGRPISMGALFDGSFEIEHIVPLSISLDNSYLNKTLCERQANRDKGKQTPYEAFGNNEQRWHEITLRLKKFPGGLANHKVRLFLSKDKPEFDEFCRRQLTDTAYAAKEAQAYLGLLYGADANRRIQAARGGVTAFLRDEWGLRGLVNNWPLNRKPAEVIEENLKSPGKGRADHRHHAVDALVVALTTRRAMHILSEAAVRAQREGRRWFGGYVELPWAGFSEDVREATDKIVVSRRVSRKVSGPLHEQTYWGPGPKSETPGKKRKRSKTTPNTETPGDAKKVDNDRPYHLRMPVHKLSAKDIKNDEVIVDKAVRQAIRDAFGRLPKADLKLFENPDCAPYLTTKDGRRTPIRKVRIRKVRIHKTQKLLAIAEGERRRYAVGGNNHHVEVLAKLNKNGGETGRTWRCVSMFEAYRRLKENISVVCRSHGPGFKFLFSLAPGESVMLTDDNGVDRPFVIRGTSEKKLDFTGNLDARPKKYIEKVNKGKNDAKDIVVIQSDGALKKRNVRKVVITPLGEIREAHD

SEQ ID NO: 5904 - protein, 1155 aa, synthetic construct
  REGION 1..1155: note = Synthetic
LLPKVPTIGKFDTVGTLGEHATTVNRLISGIKQFVIELKEPIMRYRVGLDLGTASVGAAVFSMDEQGNPMELIWHYERLFSEPLVPDMGQLKPKKAARRLARQQRRQIDRRASRLRRIAIVSRRLGIAPGRNDSGVHGNDVPTLRAMAVNERIELGQLRAVLLRMGKKRGYGGTFKAVRKVGEAGEVASGASRLEEEMVALASVQNKDSVTVGEYLAARVEHGLPSKLKVAANNEYYAPEYALFRQYLGLPAIKGRPDCLPNMYALRHQIEHEFERIWATQSQFHDVMKDHGVKEEIRNAIFFQRPLKSPADKVGRCSLQTNLPRAPRAQIAAQNFRIEKQMADLRWGMGRRAEMLNDHQKAVIRELLNQQKELSFRKIYKELERAGCPGPEGKGLNMDRAALGGRDDLSGNTTLAAWRKLGLEDRWQELDEVTQIQVINFLADLGSPEQLDTDDWSCRFMGKNGRPRNFSDEFVAFMNELRMTDGFDRLSKMGFEGGRSSYSIKALKALTEWMIAPHWRETPETHRVDEEAAIRECYPESLATPAQGGRQSKLEPPPLTGNEVVDVALRQVRHTINMMIDDLGSVPAQIVVEMAREMKGGVTRRNDIEKQNKRFASERKKAAQSIEENGKTPTPARILRYQLWIEQGHQCPYCESNISLEQALSGAYTNFEHILPRTLTQIGRKRSELVLAHRECNDEKGNRTPYQAFGHDDRRWRIVEQRANALPKKSSRKTRLLLLKDFEGEALTDESIDEFADRQLHESSWLAKVTTQWLSSLGSDVYVSRGSLTAELRRRWGLDTVIPQVRFESGMPVVDEEGAEITPEEFEKFRLQWEGHRVTREMRTDRRPDKRIDHRHHLVDAIVTALTSRSLYQQYAKAWKVADEKQRHGRVDVKVELPMPILTIRDIALEAVRSVRISHKPDRYPDGRFFEATAYGIAQRLDERSGEKVDWLVSRKSLTDLAPEKKSIDVDKVRANISRIVGEAIRLHISNIFEKRVSKGMTPQQALREPIEFQGNILRKVRCFYSKADDCVRIEHSSRRGHHYKMLLNDGFAYMEVPCKEGILYGVPNLVRPSEAVGIKRAPESGDFIRFYKGDTVKNIKTGRVYTIKQILGDGGGKLILTPVTETKPADLLSAKWGRLKVGGRNIHLLRLCAE

SEQ ID NO: 5905 - protein, 1110 aa, synthetic construct
  REGION 1..1110: note = Synthetic
MRYRLGLDLGTASIGCAAFSMDEQGEPEKLIWFHERLFSEPLINDKGQLKPKKADRRLARQQRRQIDRRASRLRRVAHTARLIGIDPVQTDTSSFSNDVPFLRAKAARERIELNELFAVLMRMAKKRGYAGTLKVASKTGDAGVVASGSSVLTEEMDALARKKDVQSVTVGEYLYARVQYGLPARLKVAANNDYIAPKYPAFREYLGLPVREDGRHQLPNMYALRESLEAEFHQIWNVQKEFHPALKKEGVRDSLFAAIFYQRPLKSFEDKVGKCSLEVHLPRAPRAQMAAQDFRIEKQLADLRWGMGKNSETLSEEQKEVVRAILGKQREASFKAIYKALEKSGCSGPSGKGLNMDRAVLGGRDSLTGNTTLHAWRKLGLEGDWLGLDEVTQIQVINFLSGLGSPEQLDVDDWPSRFRGKSGKPRNFSRGFVSFIDKLRANDKFDRMSKMGFDAGRASYSVKALVRITKWLKYPSWEEMPNIPRVDEDAAIRECYPDHLSEDAEEAVGRLGLPSSTGNEVVDVALRQLRVIINNAIDANGGTPAQIVVELAREMKGGVTRRNDMERKSKRFSNERKEAAKRIAQAGKSPTPTLIKRYQLWEEQNHQCPYCESSLGISDALSGAHTNFEHILPRSLTQVGYKRSEIVLAHRDCNDEKGNRTPWQAFGERDDKRWQIIEARAEALRKKKSYRKANLLVMKDFEGEVLTDKSIAEFSDRQLHESSWLAKVATQWLSTLGSDVYVSRGSLTANLRRRWGLDTVIPQVRLETGLPLVDESGELISHEEFNRFRPQWEGHPVTRETRTDRRPDKRIDHRHHLIDAIVIALTSRSLYQRYANAWRIAEEERKNGSINVRVELPVPVPNIRDVALAAVRECRISHKPDRYPDGRFFQDTAYGLEKRMNPATGEPEEWLVKREPLTSLAPDKWSADKVRKNIDDIVGEGVRLHVRSVFERRVNSGMTPQQALREPIEFQGNILRKVRCYASKASDHVRIEHNSRQGLHYKYLLNDGYAYMELHVEAGGLVGNPNLVRPREGCKIKLHDTKEGVVRFYKSDTVENKNSGMRYVIHQIKAQGGGMLVMAPVTETRPVRDLDSKWGLKKVSGKGLLNFRPV

SEQ ID NO: 5906 - protein, 1455 aa, synthetic construct
  REGION 1..1455: note = Synthetic
MAKILGLDLGTNSIGWAVVEDQNNKTTLIDKGVRIFSEGVKIEKGIEKSKAAERTDFRSARKIKFRRRLRKQETLKVLIENNMCPLTIEEWTKWKKDKKEYPKNPDFINWLKTDELKNINPYFFRDKASRTELPLMQTGRALYHLAQRRGFLSNRLDQGSDGFTEQIRLDLIKKIECETDKTELLTSVQSIIDTYSEEEDKDAKKLLKGVEKLCKINNELPITEFKEKLINYLNKADNLGAVKKGIADVSKKITETGCETLGQYFYKLYQNQSKIRKVYTARTEHYYHEFLKICETQNICDQLKHKLDKAIFYQRPLKSQKGLIGKCVFEKNKTRCAVSHPAYEEYRALQFINSIKVSETKDGKKDFLSFDERKKIWPKFIRKSKPNFDFKEIAETLDKKGLSRYYNYTGHTSVSGCPTIAQLTNIFGENWQETLFEKYTNKQNTKGLKTIDEVVTDIWHVLFTFDKDEKIIEFGKQKLGLNEVLAKKFGAINLKKDYASLSLKAINKILPYLREGLIYSYAVFLANIENVVGEEIWKNDENKNLIKKELHLLIDNFNEIKGLEAVVNDFIADFKKEYNNAHKDYVLDEQDKKILLEKIESNYGKNKFESLEPDKKTEIINSTEKMVAEQLRKQRGEFIKPKRLDEKISEFLINNFNVTKKSIARLYHPSDVEIFKTASRNSEGLLLLGSPIVSSIKNPMAMRAMHQLRKLVNTLIKENIIDEETKINIELARELNDANKRAAIKKWQDERQKAREEYKKSIKELFKAECGKDIEPSDSEILKYELWEEQQHICIYTGKTINICDFIGANPNFDIEHTIPKSLCFDNSNENLTLCDIQYNRDVKRNKIPTELSDYNSIKPRLDKWLVFIDDYEKLYNTRKKAKGIETKEQKDKRIKEKHYYKLHLDYWKGKYKRFIMVDVPSGFKNSQIVDTGIITKYAISYMKSIFPKVYSVKGNIVAEFRKIWGLQNDYEKKERVNHVHHCIDAITIACMSKQKYDTLAKIYHEDEAGFHKIKKETQLVSKPWTSFTMDVLNIEKEIFVSHHTPDNMKKQSKKVVRERGIIAPKVIYETDANNNTLRDKYGKKIVKEYILLKDVNGNLIPIKGKRLTPSDIINKVDGIDYFSLIINDKIQYYEFAKSKKTGKIIYKKEPIYLQGDTVRGSLHLDTFYGAIAKDINGNIITNTNGKIAPNYVIRKELSKLKETDIENIVDPVVRGKIIEAKKNKLITFNKSGAVIKTTIWMKENQIPINKVRVYSSLKNPLPDFKKHRDLSHLTYKQQYNVSNEENYCLAIYEGKNKKGNVCRTCELVNMIDAGNYYRLSNKNWKQQYPIVPEKDSVTNYSLKTIITKGLMVLLYEKSPEEIWELTYNQQMERLYEITQLDTEKSAEIKLLFHQEAREKKVITEYMGLKTGMKGGKNIGKHKEFPWIKVGPNSFDALIEGIDFKLTPTGKIIKL

SEQ ID NO: 5907 - protein, 1363 aa, synthetic construct
  REGION 1..1363: note = Synthetic
MAKILGLDLGTNSIGWAIVNRNDNQFELINKGVHIFSEGVKIEKGKESSKAAERTKYRSARRTKFRRKLRKIETLGVLIKHNMCPLSPEELQGWRINKKAYPKNQEFLKWLKTDEATNANPYFFRDKASREKIALKDLGRAFYHISQRRGFLSNRLDQGDDGLMDQIRKELLDIVGGETDRDELNASIKFILESYADEDDKVVNKFLNSFEKNRKTNELKPVEELKELLIKFLNRTENLGKVKKGIAVLSQKMEKESCETLGQYFYTCYKKNEKIRIQYTDREEHYLKEFEIICEVQKLALPVRKELENAIFYQRPLKSQRGLVGKCSFEKNKPRCPISHPSYEEFRALQFINSIRCNGDPLNKEQRKDIWHLFVRKSKPNFDFMEIRKDLTPKGIELKFNYSDRTNVSGCPTIAQLSQKNTFGEHWKESIYEKYIAKKTKIGIKSTDDVINDIWHVLFSFDKDEKLEVFGKNKLGLNTQQARKFSKITLKKEYSSLSLKAITKILPYLREGLIYSYAVFLANIEKVIGNEIWSDIENQKFIRSELNNLIENYNEIRKRESVVNDLMAHFKKDYNNADSDYVLDKKDKSEVIEKIQAVYGKKHFGSIEVNQQAELVIWVETKYQEQLRKNRGEFIRTDRLDEKIASFLQDNFNVSNESLEKLYHPSDIDVFKEAKISEDGKYYLNSPMIPSIKNPMAMRTMHQLRKLVNTLINEGEIEKETKIHIELARELNDANKRKAIQDWQKDRQEERENAKSEIIKLYKEQCGKDIEPSQDDILKYILWEEQDHKCLYTDNPSNSIGICDFIGPNPKYDLEHTIPKSLSFDNSQENLTLCEVSFNREIKRNKIPAELPNHSNILERLVKWEQKTSEYEKLFNSRKRARGIEAKEQKDKRIREKHYYKLYLDYWKGKYSRFIRKDVPEGFKNSQLVDTGIITKYARAYLKSVFFQVYSVKGGMVKEFRELWGLQEAYSKKERANHIHHCIDAITIACMTKDKYDLLSKLYHADEEGYQKEKKEMLQIIKPWTTFTEDIKAIEKQVLVSHHTPDNVKKQAKKKSRIRGKIEYGKDEKPIYQKGDTVRGSLHKETFYGAIIKPYQKEDLTPKYVIRMKIEDLKASDVKNIVDPVIQRIIQEAVDGKGLIQAVKDGLFMASGVSIKKVRCYAPTVASPIFLKPHRDKSKYEHKRNYHVMNDGNYLMAIYEGKNILSGKIVRDFEIINMLEAGEQLKFSNRNLNALVKPSKRSGKGKNEIEIFLKATIRKGTMVLFYKKNPEEIWELTNEERVQRLYKVQKFDDRPWITLRFHQEARGDKEIKDEINSENLIGSPQLAIGLGKFNVLVEGYHFTLTHTGKIETIKSHAQTNTVI

SEQ ID NO: 5908 - protein, 1357 aa, synthetic construct
  REGION 1..1357: note = Synthetic
MGKILGLDLGTNSIGWAVIETDNKSFSLKDKGVHIFSEGVKIEKGKESSRAAERTIFRSARRIKFRRKLRKIRTLKVLIENKMCPLTIDELNTWKQHKKAYPQNLEFLNWLKTDEATNINPYYFRDKASKEKLPLLDLGRAFYHLSQRRGFLSNRLDQGDDGLVDQIRGELLRSVEFDSDAEDLKGVLQIALQNYSEEEDKALKKFLKGFEKVLKESQLKSIEEMKVSLLKFLNKTENLGAVKKGIAELTIKIKDAGCETLGQYFYKCYREKQKIRTKYTSREAHYLSEFNRICEVQQLSETTRKNLENAIFYQRPLKSQRGLVGKCSFEKNKPRCPISHPAFEEYRALQFINSIKATDENGEMVFLSEDEREKIWHKFTRKSKPNFDFEDIAKELTSKGRQRKFNYKNNHAISGCPTIAQLKSVFGDNWKDVIYSTYTNKQTKKGAKSTDEVISDIWHVLFTFDKDEKLEEFAKIKLGLDAIKAKKFSKIVLRKDYASLSLKAINKILPYLHEGLLYSYAVFLANIDIVIGSEIWDKPENQKIIRNEIRILVDNHTENKKREGIVNDLIAQFREKYNNSESDYILDEQDKKDVKNKILAVYGNVFFPALPAEEQNEIISWIENKYVKQLRKYRSEFIKPKRLDEKISDFLHDNFNVSPAALEKLYHPSDIEIFKEPKRNEDGKIYLGSPVVSSIKNPMAMRTMHQLRKVVNTLIKEEAIDEETKIHIELARELNDANKRKAIQDWQKDRQNERNEYKEDIKKLYKAECNLDIEPSEDEILKFQLWKEQSGICLYTGKSINICNFIGGNPLFDIEHTIPKSLGLDNSQENLTLCDVRFNREEKRNKLPSELSNHNEILLRLAKWEKKIKEYEGKFNARKKAKGTETKEQKDKRIREKHYYKLYLDYWKGKYNRFNRTDVPEGFKNSQLVDTGIITKYARAYLNSVFNKVYSVKGSMTAEFRKAWGLQNEYEKKERINHIHHCIDAITIACMTKDKYDALASAWGQEDEGKKQEAKKILEESKPWATFAQDLKAIENGVLISHHTPDSMKKQAKKKLRKRGKIQYGEDRKPIYQQGDSVRGSLHKETFYGAIIKPHQKDDLIPKYVVRKKIDSLTAGDLKNIVDPVIQSIIQKAVDDKGLSQAVKDGFFMESGVPINKVRTYAPTVTKPIFLKGHKDRSRFEYKQNYHVMNDGNYLMAIYEGMDKKGKIIRDFKIVNTLESGEILKLSNKPNTSQLVKPFMIKGKGEKQIDISLKATIKKGTMVLFYKDSPEEIWELEKTELNKRLYKVQKFDDRPWITLRFHQESRSDKEIKENISSENEIGSPQLAVGLEKFKVLVQDYDFISTPTGKIERITRHA

SEQ ID NO: 5909 - protein, 1386 aa, synthetic construct
  REGION 1..1386: note = Synthetic
MTKILGLDLGTNSIGWAVVDSGKEQTSLLEKGVHIFSEGVKIEKGIESSKAAERTKYRSARRIKFRRKLRKIETLEVLINNNMCPLTMEELTAWRKNKKAYPKNEEFLQWLRTDEATNSNPYHFRDNASRGKVPMKELGRALYHMAQRRGFLSGRLDQSDDGIIEQVRQEFLSVVDIEENRDDLIDAINIIYDNYTEEPDKAVKKLLNSIAKFYGENRLKSDEEFKSGIYKLFNKRENLGAVKGGIADLSKHISDANCETLGQYFYKQYQKKEKIRTHYTSREEHYLQEFNKICDVQELSNQLREELLKAIFYQRPLKSQKGLVGKCSFEKSKSRCPISHPAFEEFRALQFINSIKIGTTEFGEKEFLSEEERKRVWPKFTRKSKANFEFADIAKELTPKNEKRYFNYKDYVTVSGCPTIAGLVNIFGDEWKQTIVESYTNAKGKSIDQVINDIWHVLFQFDKKEKLQEFAKNKLGLNDLKAKKFAGIILKKDYGSLSLKAINKILPYLHQGLIYSYAVFLANIDNVVGKDIWSKPENQELIKKELKNLIDNYNEIKKREGIVNDLMGQFKEHYNNSHKDYELDEKDKKDIKEKTIAAYGSKSYAKLDTIQHEEIINWIEEKYLTQLRKYRGEFIKPQRLDEKIAAFLSDHFGATPKDLEQLYHPSDIELFKTPRRAEDGNLYLGSPITGSIKNPMAMRAMHQLRKLVNELIREGKVDEETKIHIELARELNDSNKRAAIRRWQEERKKQRDEYRLEIIKLYKEQCGQDIEPTEEEILKYQLWIEQNGDCLYTGRKIGICDFIGGTPKYDIEHTIPKSLSYDNSQENLTLCENKFNREVKKNRIPFELANHKDILLRLAKWEKEVEKYEPLYNSRKKARGIETKEQKDKRIKDKHYYKLHLDYWKGKLNRFTREDVPSGFKNSQLTDTGIITKYSRAFLKSIFPQVYSVKGDAVAEFRKLWGLQQEYSKKERINHIHHCIDAITIACMTKDKYDMLAKLYHADEENRTTEAKEVLRNLKPWSTFTEDVKAIEQQVMVSHHTPDNMKKESKKKLRVRGKIKKDENNKPIYQTGDTSRGALHLETFYGSILTPEIDKKTGEKLLDENGEIKKVIKYVKRTELSKLKETDVANIVDPIVKIKIEEAVKELGFKKAMQSEIWMNREKGVSIKKVRVFAPSVTSPISLKHQRDSSKESHKHKETYYVANEGNYLMAIYEGKDNKGKTKRDFELLNTLDAANYLKQSNTDKNNLPIVPEKKIYSIGTKDEYSIPLAKRNNKEIILKIGDMVLLKQKPDEDINWNNKTELNKRLFKIKGLSHTYIQNKYDYGVIILIHHQEAQAVSTLKIGNGEFKINDNLLYRKLYHSQFNALIQGIDFTISSTGKIKEIKK

SEQ ID NO: 5910 - protein, 1383 aa, synthetic construct
  REGION 1..1383: note = Synthetic
MGKILGLDLGTNSIGWAVVENDSTEFELLNKGVHIFSEGVKIEKGIESSKASERTKFRSARRIKFRRKLRKIETLRVLINNGMCPLSIDELNEWKRNKKDYPNNPEFLKWLATDEDAGINPYFFRSKAASEKIKLFDLGRAFYHMSQRRGFLSNRLDQGSDEAIDDTRKELINLIEFEENKEELTASLKLLIENYKSEDSEDKAVKNFANKFSKHLSKFSEKPFEELKKELLIFLNRKENLGLVKLKISELNELIKESGCETLGQYFYEVYKRKGKIRKHYTAREEHYRAEFQKICTMQRLSELLCKDLEDAIFFQRKLKSQKGLIGKCSFEKTKSRCPVSQPAFEEFRALQFINSIKVGETENGKKEPLTAEERKQIWSKFIRKSKPTFDFEEIAKELTPKGKSRFFNYKNNATVSGCPTIAQFSNIWGTDWKNNIYEKYSNKAKKNGTKTQDEVINDIWHVLFTFDKEEKLQEFATTKLGLDSKQSRKFAKIILKKDYAALSLKAIHKILPYLHEGLIYPYAVFLSNLEEVIGKEIWNNKENQQYIRKEIKLLIDNHNEIKKREGIVNDLVSNFKKEFNNSSKDYVLDETDKKEVRKKIIDVYGKTYFEAFDSNTQAEIIIWIQNKYTEQLRKYRGEFIKSKRIDEQIADFLIGNFNADAKALSKLYHPSNIEKFRTPERNKEDDKLYLLSPAIPSIKNPMAMRTMHRLRKLVNTLIREDIVDEETKIHIELARELNDANKRKAIQDYQKERQTEREKYIGEIKTLYMEQCHKDIEPTDDDVLKYQLWTEQEHICLYTGKSIGICDFIGANPNFDIEHTIPRSISSDNSQENKTLCDVNFNRQTKGNKIPSELANHLEILPRLAKWKKTIAELDSKVQARKKARGIETKEQKDKRIRQKHYFKLQYDYWNGKYKRFEIIDVTKGFKNSQIVDTGIITKYAKEYLKSIFDKVYSVKGEMTAEFRKLWGLQDEYKKKERINHIHHCIDAITVACMTKDKYDMLASVYRADEENHKDEVKKLLRTMKPWETFTEDLKTIEQEVLVSHHTPDNMHKQSRKKIRVRGKIKRDKSGKPIYQQGDTARGSLHLDTFYGAILQEQTNKKTGEKVLDENGNGLLAIKYVVRKELSKLKETELENIVDPVVKEKIKMAAATEGFKKAMEGSVWMNKEKGIEIKKVRVFMPSVTEPLKLKAHRNQSKHEHKQSYYALNDSNYIIALYETTNDKGKIICDFEIINNIDAAAALKLSNKTDHPGSSLVPLNKEITNGKKKYIAPLKTIIKKGLHVLFYKNSPEELKSLSKNELTLRLYRIVKFDKSGRVYFRPHNEARPASELKESYELQYDKLVEQIPVSIRNLNALIEDKDFKISITGEITPVYAKAIPLLQ

SEQ ID NO: 5911 - protein, 1116 aa, synthetic construct
  REGION 1..1116: note = Synthetic
MIRVEKPKDRPCKYRIGIDVGQRGIGLAAIELDDDGFPIQLLSALTHRMDGGILPGTEKSPESRKAKAGLARRVRRMRKYRKQRLQKLDNKLRELGYPIIDGPATYEPWQARTRLVEGRITDQEQLKADLSMALRHIARHRGWRNPWLTWNTFCELPVPSNNHKKNIDAARERFGRDFPEDFTVGQLGALGNDPTIVIRPRKSKNSRTQTAGELPLFEHKLLQEDQLAEVEKYWDIQDLPADDRDSLIRVVFHQEKPRVPQENVGKDELPGMTQFYRAPRASLEFQEFRIRAAVANLGIRGGRGFRKLTDEEYDAATKLLLNWHKSHLPTETPVWADVAECLDVSPRALKTNALDDVVGNNPPINRTLDLLEYGIDQLPAKAKKPIKKWFAEADAELIQAFVSWLIDTTDGQDELFAQTGLDDVVTEWDETALEKLASIELENGRAAYSTQSLKRLNARMAGHREGLHEARKAVFGVDDTWKPTPPSLDERTEHPTVDQNLTAIRRFLLGCVQNWGLPEQVNLEHVRSAFMGAAALEEYRREQRKILSDREKAREALRGVLSHEPTRRDARRHEYVQRQNSQCAYCGTTIDAKSCELDHIVPRAGGGASTRANLVAVCRGCNQDKGRVPFAAWASRTQREGVSVDEAIARVKGWLGRGANASERKINRETIQRLRQGEEDEPLDERSMESTAYAARALRERIQKFLTDAAAQLGVAAPTANVYRGSVVSAARKASGIDSMIHLRGKDIKDRGDFRHHAVDAAVVSLMNHAVGQVLAIRDNMRNTAFWVGEQEWEKGWQRLYGERQSFLEWKLRAQRLGEVIRDAIRNDEIAVINPLRLGRNVGPVHEDTVRTLKSKSLHTEWSAKDVQRIVDPKIYLLVKKELEGTKAPQFLSEALVGNLTRRVGGEILTFPSDSAQLPVRGGAVELGSVHHARIYAWKNKKGAIELGILRVFAGEIAKMWPNPKVDLLTAAVPEWSMSRRDVQTKTEAALSSGIARQVGWIAPGDEIEVDVSMAAQGKDKFASFLRSTPEHRWTVSGLKMSRIISLRPLFLSSEGLDNNSDPLLREVVERTLVNPGVVLPLVKIVRRDALGRPRHFSRHLPHSFSPMEEAKRLLG

SEQ ID NO: 5912 - protein, 1054 aa, synthetic construct
  REGION 1..1054: note = Synthetic
MMVWSLGHTAVTPPMSKDHITLLGLDIGSNSVGWALVRAGFVLGALRPLGLLALGVRVFPENCDGDRSLGQDAPRNRQRREARKRRRMLDHRARRLAVVASLLQGQGLLPSGPSSNGPDRHRLLKDLDARLWTRQTQDRTITPDRSLRPALLPCLLRHQALKRPLEPFEIGRALFHLARRRGSQDLDQARAWAMGAGQVMAALDEATLAREGRGETPGSYLSRLARDGHPARGHVFSRCSLRQEFEAIWAMQAVHHPRLLDEPFRLRLAAAIFAQRPQKKSRTGAGPCSLEKDQRRAPWSHPLAQRFRLLLGLNDLRLLDPARLTHQARPLDPDQRARLLLRLETAGDASWTEIRSLLGLSPDTLFNPEATGSRGLPGDRLAQALLPVFGPAWLDFDLAQQSRVAEDLRGMVKPEALAARGRLVWSLTPDAAQALSRVVLEPGCCALSRKALARILPHLEAGLPLARAVALEYPDQNREEPRDRLPPLFLALDTAANPVVSRALGEMRKVVNALIREHGKPGLIRVELARDLGQGRGQRRREFEQNQKAQAARETAARDILAFRGHMDPPRAEVKRVARAEVERLLLARECRWACPYTGQALDMAALFGPEPGFDLEHIIPLSRRWDTSLANKTLCAATENRLRKAARTPREAYAHDPERYARILARVEGFDADPALKAAKLRRFLAQDPADLPPPAGRLLSDAAQAGRKAREYLGLLYGSQAQARVQALPGRATARMRAAWNLNALLGPGGKNRQDHRHHALDALAVALCGPAELAELAEPWPGFRGQAREMLQACLPSHRVCRKARGELHQETLYGLRAEGPHGPEVVLRKPLTALRPGDILSDRAMPDRAVRQAVREQWEDGGRKAPARFFADPANLPPRPGDPEASLRRVRVPQSVRVVSVGQAPHARLVHTAANHHLAVFEGRVGDKSVWRGQVVTLLEAMARKRDGRAIVDRQAGPEERFLFSLARSEVLEIRLNGITEYLRLRTFYPDPAGGARLELVRLTDARRQRDMEKKTRDNGWFKFSVKQLGGLPCRKVRITPLGRVVPAND

SEQ ID NO: 5913 - protein, 1277 aa, synthetic construct
  REGION 1..1277: note = Synthetic
MESKNTMESKNTMESKNTKESKNTKVRFGLDIGIASVGWSVIECDESGYAVDIVAAGSRVFTAAEVPGSDEGLGEARRSARGARRSARGARRRNRRHKFRLHRAKRLIVESGMLSQQQLDNLYDNSQPKQDIYEIRYRALDSVLTNQEFAKLLIHLLQRRGYKSNAKDTKVLDSQTDESKKAKAKATESEKTDDEAALKSIANNKIILSQYRSVGEMIYNDSKFRLNVGGNQVSVKGNYVFKARNSTGDYKFVMLRAWIVDEIKLIFERQFALGNHQYANPQLKDKYLEIFESQRHYSEGPGGIESKYGIEGINYHRQKQGLQPLISLIEKMTGKCTFEPQEERAVKASYSFEKFRLYQDFNHISIVDGRKNSRQHLTQEQFDALVKHAHDKEKITYKDIRKVLNLSQDCKFSNVDYKPKVKKDKDGNPIQDDQSKDPESDAKILGLPKYHAIKRVLKGVSIDITTLTTAQLNCIATVVSKYKDDNDLVEKLETELVKNGLDSVVAHNISQASLELSFSGVGHLSIKAVDKILDVWQVGDTYDQAVTRAGYDFKSEWTGERFKKLSLLEHAENGGTKPINNPVVRRSVGQVIKVVNSLVETYGSPIGINIELARDMAKSKKERQDIEKANKQNRERNERAKQEAVELRKSNSKLDSNPTGLDIVKINLYRQQNCICMYSGKSIDNTRLLEDGYVEVDHIVPYSISFNDSYQNKVLVFGEENQQKGNRLPLQYLTGEKRERYIANVERIFGKNLGKRSRLLKTVITDEDRNKFIERNLNDTRYATKVIANTLKNYLLFDEVVHTKDTQKKRVITVNGTMTSYIRARFGLNKVRNNGDTHHALDAIVVACTTDSYIQQISKYNKLIENKYRKPDITNQIDLETGEIIATIEEWVDYETGEVLTKEEYFKRGLHTKQTNSHVKKELERQLFDNEMSPLSNYKATQFRNLVTQLIEQSQGLHDGNPVHVDGKDTHINKIFVSRKLNRKATGQGHQETTFGKVAKIKSSEVGVCKDRVQENEQLDPTLMVKRTELKNLKLDKDGEIDNYYKPDSDKLLYQALKQYLKEQSKLPEKDKFKEPFYKPIRNQDGTMTFGNVVLKVNTIEKKSSFVTLKNNGAAANGGMIRIDVFKVENAPKKGDNGYYWVPVYVNDFVKHTLPNLARPSLKEMKDEDFIFSLYPNDCIYVKHKDNMEFTREDEVVEGDKVVKNISKTTCNDVYIYYVKAGISGGAITVKSHDSLYNLSSLGVKGLKEISKCSVDTLGNITKITTKQVREKFPNQK

SEQ ID NO: 5914 - protein, 1058 aa, synthetic construct
  REGION 1..1058: note = Synthetic
MYRLALDIGTNSIGWCLFSLDEALVPQSILRAGVRIFPDGREAKSGKSLAEDRRLARQDRRRRDRFIRRRNKLLQTLIAYGLMPESEAARKDLEGEDPYCLRARALDHKLTSPELGRALFHINQRRGFKSNRKTDNTANEKGVVKSGIKALHERLAMDSARSLGEYLHKQKQSGEPTRARPERERAKLEYPFYPERSLLEQEFDLIRNAQKQYHTQLTQEQWAELRSIIFTQRPLKEVLPGRCSLEPSLRRAPLALPLAQKVRILLDLNHLRILGPDMKEEKLTLAQRDTALKTLLTGNDLTFNALRKLTGLGAEYSFNLERSTQEKLMGDLSAKKLKDKKVLGSGWAALDSKAQNRLVELLLEEEDGKRLKALLTQELGLSDEQADKAAETNLPAGYASHSEKVLHKLARELEKGVFSYAEAREAAGYPYKDTTGEVLPYLPYYGVVLERYVGNTGDAGDALEKRYGRIANPTVHVALNQVRRVVNEIIKEYGLPAQVFLEVGRDLKNGLKAKQEIAQRQKDEKKRNDAWRAKLEENGIAISAESMLRMRLWTELAAGQATACCPYTGEVISFSRLFGDDIEIEHILPVARTLDNSPANKTLCLRRANRDKGNRSPYEAFHSMPGYNWAEILSRAATLPGNKKWRFAEDAMQRFEEKGGFLARQLTDTQYIARVAREYLCAVCPSNLVWVTPGRLTGLLRKVWGFPKKDRDTHYHHALDAALIGVADRSLLQRAATYSARAEGQGERRFLAGFAPPWPSFKNEVLEKITSIIVSHKADHGIEAALHNETAYGILAPNGAPRNAQHRKPVSSFTKLEHILAIKEIKLRAELLRDVTQKPLAECLEFLRRAEELQDKKAKAALLEFIDMTEKSFTEKFQCFAHKRGIRGIRIVETLTLVPICNKKGKEYKGLLSSSNAWYDIYENDKGKWIHDAVSTFDANNKRKNKEFIPEYAEKGFRHVMRLFKNDMVEQEIDGVKRYYYVLKIETKGPIYLVEHMQANVNKRHDDKNESDGFKLKAISAGPLQKMKAKAIFVTPAGRIIYKERPCHAAPPSGNKRK

SEQ ID NO: 5915 - protein, 1077 aa, synthetic construct
  REGION 1..1077: note = Synthetic
MAQILGLDIGITSVGWCVLDDEKHKITGLGVRVFTKAENPKDGASLALPRRLARSARRRLKRRRKRLDEIRSMMISDGLADSESEIDAIFTHVTEKQGSPYQLRAEGLDRLLANKEWIRVLLHIAKHRGFQSNRKSAERNDKETGQLLEGIQDNEARLREKKYRTVGEMLWRDEKFALCKRNHGGSYSHTLSRSLLDQEAAALFAAQRKLGNHFASEDFEKRFRQAFKYQLPFASSGDILEKVGFCTFEKDKKRAPKMSYTAGYFVLLTTLNHLRIFDCSADGNFIERGLSNDERRALIQLAHKKEAIKYSDMRKALKLDDSSRFVGLSYQGSQPEEISAAEKKTVKVMQGYHQMRKAFGKEGQALWESLCGDTKLLDAVAWILTCEKSDDAIKSALEKLFLKKQVNLKAIEYLLPLSFQKFQHLSIEAMQKIIPGLEKGLTYDAACQEAGYNHADVNISVKKQPFLPPLDEYMRDCGEEIRNPVVTRALGQVRKVVNAVIRKYGPLSEIHVELARDLARPFDERNKIKKQQEENHAERERLVKDITTTFSNVFSSQNLPCGGDVLKYRLFREQNGVCAYSQIPFDRHRLFEENYAEIDHVIPYSRSFNDGMSNKVLVLCSQNRNKGNRTPWEFFGSDVNRWDSFCGWVRTTIKNSQKQRNLLRADLQDSASHDMKERNLNDTRYITRFAANWLRSSLIFAPDAPRNPVRTVPGRFTAMLRGRWGLANMKDREKNNLHHALDAAVIAASSPGMVAAIENYAKKRELNHFRTNSSGERHREPFPEPWAGFHFELKVLLSSDPLEALKETRLPDNYSEEERKNLRPIFVSRMPERGTTGQAHDDTVRSVKRRTPEQRGCVSRIDLQKLTLKDLENMVGKERDWKLYEALKKQLEDFGDDPKKAFAKPFYKPVNGDGAAPLVRKIRVYDTVNSGVKVRGGLAANSPGSQVRVDVYRKNQKYYLVPHYINDISRGVLRTRAITRGKNEENWTVMDESFEFIFSLFKNDLIKITEKSGEEIKGYYITTDINTERITLETPQEKLSWRNGVKTASLFEKYTVTPLGEYYKVKKEKHPEGKPLS

SEQ ID NO: 5916 - protein, 1122 aa, synthetic construct
  REGION 1..1122: note = Synthetic
MNAMKHYHAGIDVGTNSVGLAAIEVDSKGLPLNILNSMVVLHDSGVDPGKAKTGATRLANSGTARRTRKLIARRRKRLQKLDRYIEAQGWPLIDLSSLPDPYTPWKIRAELTQGRLKGEEQGRALSIALRHMARHRGWRSPYERIESLRSPKEASKQFKDLKQRVTELSGVIFDEDATPAEVVCDAGLSPSLRLRSAPSTNYTKGAILAGEPVGGKPKKGLLGGKLMQSDNANELRKIGEVQGLDTETVNELIDHIFAAESPKGKASKRAKKDDLPGQDQYVRAPRAHLAFQRFRIVAAVANLRIRETGSKHGRLLSKEEKTKTIEFLMSADGTDGVTWSDVAKELRIERESLCGTAKCGAEGERPSSFPPVNSSNISITRSKIEPLAKWWKEASDDERSALIIALSNADELTDEQPGAETVRQFLSSLDEQVLEKIDKISLPRGRAAYSVNSLERLTRRMLEDSVDLFDARKLEFGVENNWSPKPDPIGEPVGNPAVDRVLKIVNRWLLAVTRKWGPPNIVNIEHVRAGFTSEIQVREYERENKKNRNRNLAILEELRDKLGTSDKIRREDITRFAALRRQNCQCAYCGEAITFSDCEMDHIVPRKGQGSTNTRNNLVATCERCNKSKSNMPFSVWAQNCDIPGVSVEAVIGRVRTWIKDPELSPKQYNNFKRDVIERFRKTAEDDAIDNRSIESVAWMATELADRIGSHFREAGADTQVKVYRGWLTSEARKASGFEGKVNLIGGRGKTRLDRRHHAMDAATIALMRQSVAQTLVERASIRESERLRRVVSSSWKDYRGADRDKQFSYGSWLNSMKVLAELFNRAIDADEIPVTQNLRLRLGNGEAHDATIRKFGDSKKCVGAPWKIEEIDRASTPQLWLALTRQADFDKKDGLPKNPLREIRVKNQWFNAEENVALFPTKSAAIAIRGGYAEIGNTIHHARLYKLPGKKPTYGMIRVFAIDLLRTQHSDLFSSPLLPESISLRTAETKVRRAVEDGTAMYIGWLVDGDEIVIDPETKAFDSNNIGEYLSEFPGTKRWRVDGFPDKERLRLRPLQLAGEGLPEDASAGIKEILGPKGKGWRVAINTLFKSPQLVVVRRTALGTVRKLSRGHLPLTTRLRG

SEQ ID NO: 5917 - protein, 1120 aa, synthetic construct
  REGION 1..1120: note = Synthetic
MNAMKQYNAGIDVGINSVGFAAIEVDSKGLPLNILNNMVVLHDSGVDPGTAKTGATRLANSGTARRTRKLIARRRKRLQKLDRYIEVQGWPLVDFSSLPDPYTPWKIRAKLTQDRLEGEEQGRGLSIALRHMARHRGWRNPYEGVESLHSPKEASKQFKDLKDRVTKVSGVIFDEDATPAEVVCDIGLSPKQRLRSAPSAKYKEGATLADEPVGGKSKEGLLGGKLMQSDNANELRKIGIVQGLSNEKVNEIIDQVFASESPKGQAGKRAKKDELPGQEQYVRALRAHLAFQRFRIVAAVANLRILEAEPKHERLLSQSEKDKVIEFLMSADGDDGVTWSDVAEELGIERECLSGTAKRGADGERPSSFPPTNSTNISIVRSKVKPLIEWWRKASDDEQAALVTALSNADELTDDQPSAETVRQFLSSLDEQSQEKIDKISLPKGRAAYSVNSLERLTRRMLKDSVDLFEARKREFGVDNNWTPTPDSIGEPVGNPAVDRVLKIVNRWLLAVTRKWGPPKVVNIEHVRVGFTSAAQTRKYEEENKTNRERNLAILEELRDKFGTSGKIRREDITRFAALRRQNCQCAYCGEAITFFDCEMDHIVPRKGPGSTNTRNNLVAICERCNKSKSNMPFSLWAQNCDIPGVSVEAVIDRVRTWIKDPELSPKQYNNFKKDVIERLRKTVDDDAIDNRSIESVAWMATELADRIGSHFRTAGANTKVRVYRGWLTSEARKASGFEGKINLIGGRGKTRLDRRHHAMDAATIALMRQSVAQTLVERASIRESDRLRRVVSSSWKDYRGADRDKQFSYGSWLNSMNALAELFNRAIDADGIPVTQNLRLRLGNGEAHDATIRSLEKKRVGASWTIGEIDRASTPQLWLALTRQEDFDQNDGLPANASRELRVKNHWFHAEENVTLFPTKSAAIAVRGGYAEIGNTIHHARLYKLPGKKLTYGMIRVFAIDLLCAWHTDLFSSPLLPESISLRTAETKVRRAVEDGTAMYIGWLVDGDEIVLDPETKAFKSNKIGEYLCEFPGTKRWKVDGFPDKEKLRLRPLQLAGEGLPEDVSAGTEEILGPKGNGWRVAINALFKSSQLVVVRRTALGMVRKLSRRHLPLTTRLRG

SEQ ID NO: 5918 - protein, 605 aa, synthetic construct
  REGION 1..605: note = Synthetic
MIFGNNDFMDSRKYRVGIDVGTNSVGFAAVEEDDSGSPTRFLNTMVVIHDSGVDPERKDRAITRLASAGTARRTRRLYRTRRQRLRELDDFISNELGYPLVNLENFADPYESWKVRADLATTKLPNDELPEAMSIALRHMARHRGWRSPYQRVEALHLHAEISKEFAALKERVVEKTGDVFSDDATPAEVLVDLMGRQKVRGADGVLSGKLRQSDNANELRKIASVQGIDDETLNRIIDRVFFSKSPKGKASERVGMDALPGQGSKPRALKAMPSFQKFRVVSVICNLRIKDSGGDNRPLSMEEKEQLIDYLMSSTTDDHVTWTDVADLLHVKRSNLQGTAKEGPDGERPYTRPPVNSTWSKIKDSKIKSLVALWKTGDVDVQSAIVEALSNASVLEDSRPGADIVIAYLESLDDKELESLDKVGLPAGRASYSEDSLERLTERMLRDDCDLFEARKREFNVADDWKPPADPIYAPVGNPGVDRVLKIVNRLLMAAEREWGAPTQINIEHVRSGFSSELMQREFERENERRRAQNEEAVKAILTEKGGNSRVSKYDITRYYAVKRQHCQCLYCGTPITFSDCELDHIVPRKGVGSTNTRVNLAAA

SEQ ID NO: 5919 - protein, 760 aa, synthetic construct
  REGION 1..760: note = Synthetic
MNAMKHYHAGIDVGINSVGFAAIEVDSKGLPLNILNNMVVLHDSGVDPGTAKTGATRLANSGTARRTRKLIARRRKRLQKLDRYIEVQGWPLVDFSSLPDPYTPWKIRAKLTQDRLEGEEQGRGLSIALRHMARHRGWRNPYEGVESLHSPKEASKQFKDLKDRVTKVSGVIFDEDATPAEVVCDIGLSPKQRLRSAPSAKYKEGATLADEPVGGKSKEGLLGGKLMQSDNANELRKIGIVQGLSNEKVNEIIDQVFASESPKGQAGKRAKKDELPGQEQYVRALRAHLAFQRFRIVAAVANLRILEAEPKHERLLSQSEKDKVIEFLMSADGDDGVTWSDVAEELGIERECLSGTAKRGADGERPSSFPPTNSTNISIVRSKVKPLIEWWRKASDDEQAALVTALSNADELTDDQPSAETVRQFLSSLDEQSQEKIDKISLPKGRAAYSVNSLERLTRRMLKDSVDLFEARKREFGVDNNWTPTPDSIGEPVGNPAVDRVLKIVNRWLLAVTRKWGPPKVVNIEHVRVGFTSAAQTRKYEEENKTNRERNLAILEELRDKYKGLADEYAKQQDQLNAEGDKLAAEAMAAQAAAEEKLRQQQASQPQSQPQSKPSGGGSSTPARPSTPAASSGGYQWPVSGGTITSPFGWRVHPIFHTKKYHDGVDVSGLPTGTPIRSIANGYVTKASYYGGYGNCVMISIGNGYTTLYGHMSRFAVSNGQYVTKGQVVGYIGSTGWSTGPHLHFSLIKNGRYINPMSIF

SEQ ID NO: 5920 - protein, 1123 aa, synthetic construct
  REGION 1..1123: note = Synthetic
VDSNNLTLGLDLGVTSIGWALADVEGQQIVDAGVRIFEAPMDVAKFEAGEPGGSKAAIRRKSRMQRRQTSRRQARHRDLYLALQSAGMLPFAGKKAEDRHKKLTDFDKDLMSDKTRDDQLAWGWRERIRAEAPTIADPDQVICYYLRAKAATEKLELPELGRALYHLGQRRGFKSNRREGRSGLTTADAKKEETERSNKLNNIRTLQEELTATGLTLAQRLAFINPHQAAIRNRKRSDIAPIETGRRMYQDEFKKIWETQQAHYPDLLTANFYNRIERLMFKQRDVSAGKPGKCELERDPPLPRAPKSSLLAQHFRLVQTVNNLKAEGISGTEWREKQRELIAMLSTVIFKKETKKGTQTFFGLPFAEVKVRLGLHKRTKLNLDDDEDSTYLRGNRTNAIMADAFGVERWSAMEEQECRRIVRKWITESSPEKLFRIARTQWNLDDAKAEQLASLEAEEGYAALSHVAILKLLPHMEQGLTYSEAVKEVYPSQLSGGEAYEFLPPVETDELPRIPNPVVKRALTELRKVLNAIIRKYKIETGQETWRPARIRIELARDLKRNAEQREKIHKGNKERERERITAKKWIEERGQRPTDRLVERVALYKRTRGQCVYCVLPLGDMENVFSEDSGIEVEHILPRRCNDNSFSNKVLAHRACNLRKADRTPRQAWDPSPEWDEMLKFVNALKDKALHDRFIIQTEEELQSFTNRHLSDTRYISKLASEYVELLYGGRDAQLDWDDRVRRCVYASSGALTAEMRKRWGLNGILKPKPVNTEAARQETKSRDDHRHHAVDAIVIALTTESTIQRAAFEAQRHDRASGHLLPRYFPPPWPANGEIEERIRSFRGEVQQAAEKIKVSHRVDHALNGKLNEETFYAPPKPGSDVAHITKLVHKLTPSDLKNLDLLIEDKSVREAISAQLQKVGNDPKSLEGNLPYLEGKDGRKTPIRKVRLAKRGLTLETLRHGAVLNAENHHIVIFKRIDPVAGELWYTPGPVTRLKAMRDRAQEAKRIAPKKGPYEIVNKKDGEGSTYVMHLMKGDAVEMLDPVNDLRDVYIFSSMSDGDYVFLRHSAVVSSAKKMGLTLSQMRSEMQKSGDRVRTRLDRLRELECEKITLDPLGKVIYSA

SEQ ID NO: 5921 - protein, 1230 aa, synthetic construct
  REGION 1..1230: note = Synthetic
MKYKLGLDLGSTSLGWAAVELDDNDNIIGLLDLGVRIFPDGRDDQKKEISNAAKRSSAAQMRVQFDRKIERREKLLKILQGNGFLPKDEKELKYLLDPEKGNSGLTDPYYLRDKASREEVSLYELGRVFWHLSKHRGFSGKKDQDIDNHADRDAKNSKDTADATETEKEAKSVNARIDKLRGEILSADYKTLGQYLYARQQEGKKLSFKGLKKEDGSGDQSGFMDGFPSRQLYIEEFNYIWDMQKRFHSELTDELKTQLQDKVIYYQRPLKQKEPGKCKFTGRDRIAKCQPLYQEFRIWQDINNLKIGGGSLSEGQRDAVFNLLNDPAKFGDVADAADKVSFDLIYHVVSGRPDDAEFNPDRPRFNLEEGGRKGLLCNKTNLVMSKLLGAKWNPNADNYKVIEKLTAYYESRSETERFIRQDMGITDDSLMKKLLKLKLPKGYGELSGEAIGKILPLIRQGKRYDEAAAEIFGSHSALRPYLVGGYNPPAQLPPYQILFPESLTNGKIGNVTVHIGLNQIRLIVNELIKKYNGHPSEINIEMARDLKMGQKAYAEYRRKQSQNEDMNMRARLAIKEAKGDADYEPTATDMEKYRVWFNLNPFDAKKRYDYYNDSEMPTIPLVAALTSEYEIDHIIPRALGGDDTWCNKILTKAVSNRAKGDRTPAQYLSERQLARAKFWAEELDKINEARRSKKTKYDASAKKAKKKDKEKEFKFFSLAWRFEPGAEEKCQNRGFKSRDLNDTRYMSKLARDYLSYICSGFTRGAEKGHRTPKVLASNGALTDLFKSVWGVNETLPMDYMYWNIQKWQRDLMAEKIKEKLMAGPDSDKYNMASKGKDESKAAKKLLNDDVESELAKLSDNDFYKISSRKKDRSNHYHHALDAFVIACMNNSMANDINSMANEIELENRRYNLAHDDEAEKETLNQTRKRLIKNNGKFKIPFDGFDMGKLKAKMKNIIISEKQSPDKLKQALESENKPTETFPNGRSLEQISFSGVTKDTAFGLADTFLNNKRELQLKLKHFDGKKNKIEVSSFDSMVPVFNKKHLEYRNLKARYISAYAEYKKNPKNEDNIKTLCESIAKDKVFKWLASEGNYAAEIYETGKNGREKWNVEVMSNWWALQRRGRFFWCDSEPSSKFIMRLRIGDIVRATFKKGDKSILPNMKEWVESQIGDNEDADILFRVKKASGYNVYLTPIHVAQQDGDTKAWQASATTLKAANVRKVTISPLGELK

SEQ ID NO: 5922 - protein, 1097 aa, synthetic construct
  REGION 1..1097: note = Synthetic
VACESFVCVAKNCKPGSITLLEACALPRILSSAQLEKKRAGFAMANLTLGLDLGPTSLGWALLDEEGGRIVAAGVRVFPEGVDRDSNGAEVSKMQQRRLARAMRRQIARRARRKRRLRRALVDAGLLPEVALLPRTDPQRSAWEDSAFHAADPYELRARALTTRLEPYELGRVFLHLAQRRGFKSNRKADRAQRKERSQILEEISTLARDLNGRTLGQYLAKLRGTDPKCYHKERLRGRYTQRDMYEHEFDRIWAAQAPHHPTLLTDERRKELKDVIFFQRNLRPPSPALVGRCELEPRLPRCPRADRRAQKFRLYQEVNNLRLIDSTAGVERALTPDERQRALDLLRRKKDCEFKELAKLLFPEHPDNIRFNLQRGDREKLKGLPIDAELAKKKFIGKAWHSLPEEVKDRIVASIVHPATPPKKGPDRKEDQNPTPSNGKEDHDPPQKVDPEVEHLKHVLEKAGLDPDLAPRLLDELPLESGYASYSVHAIKRLLPHLEAGLPLTSRDPQTPCALRAAGYLMPWEHVAQRRPMLPEPPQVTNPLVRQALHEVRKVVNAVLRELVYRAGHTLARIHIELAREVRGTARERAQRAREMREREELRNQAAERVREQGVRPTRDAIDRYLLWEEQGRVCIYSGRPISLAQLFGGEVDVDHILPYSRSLDNSLMNRVLAFRAENAAKGDRTPHEWLAATDPQKWEQVQQRARHLPYPKYRRFLQRDVSLDDFFARQFVDTAYIATQVHQYVRCLGADVVCSKGQHTAELRWQWGLDTILAELPDSPANDAAADLPLGEKNRADHRHHAIDAIVIALNGRKRLQQLAALRRAGGTAATGEILPEPWPNFRAAVRAAVESINVSHRPRRRVSGRLHEETLYGPTQTPGEFVVRKPLTELSLSEVERIRDPAIRRLVTARLQEFGLDPGRAKGGKISPAVWARPLCMPSGVPIRRVRVIKKDQTITPIRGGTAWVKPGNVHHVEIFEFHQGSRTFRRGRFVSLLEATQRLRARQPIVQRTWPEHPDARFVMSLCTGDMVLARWDGSERLVLVSTLVSTQERIHIVDARDARPSSKRCDVGKTPNSLQAIKVTVDPIGRIRRAGD

SEQ ID NO: 5923 - protein, 992 aa, synthetic construct
  REGION 1..992: note = Synthetic
MKAHSTLGIDLGSNSIGWALLDEKDGRVIATGVRVFPEGVDRDQQGGELSKNETRRTKRGVRRQIARRSGRKRKLRDVLIQSGLFPCETDSPQSVLQSNPYELRKRGLDEQLKPEEFGRGLIHLNQRRGFRSNRKSDQAKKNEKSKTLQAISELESRIAESGCRTLGEYLYSITLQGNGPAFEKIRAKHTRREMYEKEFELLWNAQQKYNPQLYNNELRERIHDLIFFQRSMYWLKSTIGKCELEKGQLRCPRADRLAQRFRLWQEINNLRYIDPRTNEEQGLTDEERRELFDQLSNKREGTFVQIRKWLHLYENCSFNYERGERQKLKGLETEYLLSKKEHFGKNWFLFLSDKKDEIIAALLDEKIDDEKIRRKAVTDWGVDEETVERLLDINFPKGYMNYSRKAIEKLLPFMEQGLPLMAKDEEQSALREAGYLRPDQREKPICHFLPKPPDLPNPIVRQALHEAQKLINAIIREYGKPDAIHIELPRDVKRSFRERKEINKDQKKREKKREEAKTEIERYGVRATHETIQRYLLWEEQKRECIYSGNPISIAQLLGGETDVDHILPYSRSLDNSMMNKVVCFRPVNAEKGNKTPREWLEATDPERYDEILQRAKRLPWGKQRKFLQKTVELEDFISRQLNDTAYVSREVTKYVRNLNVDVICSKGQITADLRQLWGLNTVLRDDGRGLKNREDHRHHAVDAIVIALTSRSRLQQLARSRTYHWERPEFPEPWEDFRAEVERKINAIYVSHRVQRKIRGAFHEETIYGPTSTPGEFVYRKPLEQLTPNMINDIRDETIRKLVREHIEKHGVDLANTGSIPASVWKEPLVMPSSGVPIRKVRLIKRDNTIQPIRDQTACVKPGSIHHLCLFEIPSSDGSIKRDAVFVSMIEAAKRAKNHEPIIQRNHPRNPEAKFLFSLSTNEMVLITDKEKEELIRFETAASTSQQMKFRHHTFAGKSSDRRAIITKYPNTLVGKKVSIDLLGRLRWAND

SEQ ID NO: 5924 - protein, 1011 aa, synthetic construct
  REGION 1..1011: note = Synthetic
MPTRLGLDLGPNSVGWALIDTDSACVAATGVRVFPEGVDRDTKGGELSKNEARRVARGMRRQITRRAKRKRRLRKLLVDAGLLPPTAALPRSDPQRQEWETHAFKENDPYAIRRAALDGKLELHEIGRVILHLCQRRGFLSNRKADKADKARKKEAPRMLVEISELEAQIAAASCRTLGEHLAGLADKNPLARLRGRHTRRDMYQREFDAVWQTQQSHHPGVLTEDLRERIHHIIFYQRPIRIPKSLVGCCELEPKRRRCPVADRRAQRFRMLQDVNNLLLIDEHGEERPLTPEERSCLLDHLSTAASRKFVDIRKHLGFSDQVLFNLERGERKSLYGMPTDKALSHKDCFGKGWLGMEEEQKNRIVRCLLEEDDDAIKHKAVSEWGLTREQADNILDADLPAGYMSFSREAIAKLLPHLEQGLPLMTGDDRPCAITLAGYLRPDQRPVERLDHLPQPPDLPNPIVRQALHEVRKVVNAVIRQYGRPDQIHIELAREVRGSAKQRAEYIFNTRKREARREQAAEEIRQAGFVPTRNAVNRFLLWKEQGEVCAYTGRPIGQKQLMEGEVDVDHILPKPRSLDDSMMNKVVCFRAANAEKGDRTPYEWLAGSDPQRYEELCRRARKLPYGKYRKFLLKELKLDDFVHRQLNDTAYISRAVREYLRPLVADPHADILCTKGQLTAELRHGWGLDTILSELPDSPAWREGADLGHGQKNRSDHRHHAIDAVVIALTDRSRLQQLARQRVCPPPRERFRDEIVQLLKGVRVSHRLRRKVAGQLHEETLYGKTPKPGEFAYRKPLDRLTTAEVERIRDRVVREKVIQRLGEFGVRVGGKKKGQSDGESKIPPEAWSKPLWMNEEKKIPIKTVRLTKPDKTIQPIRGGTALVKPGSTHHLCIFQLPNGKREAVFVTMLEAARRAANGLPIIQRTHPQCPDATFVMSLSKGELVLANWKGQERILQMQTSVQTEKKVEFTDPSDARPSTQKAKYRCQASAIEGKKITIGPLGEVRWAND

SEQ ID NO: 5925 - protein, 1019 aa, synthetic construct
  REGION 1..1019: note = Synthetic
MAKLTLGLDLGPTSLGWALISESDQSLVSAGVRVFPEGVARDPSGAEVPKMAERRVARSMRRQLARRARRKRRLRSLLVSAGLLPPCANQPRFAPSRVEWERESFREADPYSLRERARSSRLELVQLGRVLLHLAQRRGFKSNRKTDKARRKEQSELLAEIGALEAELGERTLGEYLASLRPSDARLHHTVRLRGKHTRREMYEREFEAIWGAQRAYHADVLTDELYNAVRREIFFQRNLLPPSPSLVGRCELEPRLPRCPRADRRAQRFRIFQEVNNLRVLEPSTRSERPLTAVERAKVIELLRTKKERTFDELRKKLFEQYEGVRFNLERGDRDKLKGLTTDAVLAHKELCGKSWHKLGEDIKDRIVAAIIDDNEERLWFLLAEAGLDVDRAEALLDANLDEGYASYSLSAIKRLLPHLEAGLPLTSREPSIPCALRAAGYLMPWEHPVERRPFLDDPPSVTNPLVRQALFEVKRVVNAILRELVYRPGHTLQAITIELAREVRGTPEQRRQYQKEINERRRERDKAADQIRELGYRPTRDAIDRYRLWQEQEERCLYSGRPIGVRQLLEGEADIDHILPYSRSLDDSFMNKVVAFRAENSAKGDRTVCEWLGATDPTKYEQILQRAARLPVPKVRRLQAESVQLDDFFARQLVDTTYITSRVHEYVRCLAPDVICVKGQHTAELRRHWGLNTILSELADGPAWREASDLPPGEKDRSDHRHHAIDAIVIALTTRSRLQQLASIRRAGGTQRTGEVLSEPWADFRASVRECVRHINVSHRVRRRVRGPLHEDTVYGPTDTPGTFVYRKPVELLTAAMVHDIRDPAVKSAIVQHLASAGVELSPGVKIPAEVWRTPPRLPSGVPIKRVRLLKRDESIRSIRAGTAYVKPGRTHHVCIFEVSRSGANAERDAVFVTLLEAYARLRSRQAVISRRHPDLHDARFLMSLSPGEIVLLRHGDRLEAYRFETGASTTKQMWFRHISFAGRSSDKRGRVSKNPNTLDAEKITIDPIGRVRRSRD

SEQ ID NO: 5926 - protein, 1010 aa, synthetic construct
  REGION 1..1010: note = Synthetic
MAIRLGLDLGPNSIGWALTDTDSSSVVAAGVRVFPEGVDRDTKGGELSKNETRRLARGMRRQTNRRAKRKRRLRKLLVKVGLLPPCAAMPAHHPERIAWENQACQSADPYALRRAALDRKLDPHEIGRALLHLCQRRGFLSSRKADKARSKKEASEMLQAISHLEAEISSAGSRTLGEYLANVGTASPLARVRGRHTRREMYQRELEAIWEAQRRHHPDLLTDDLKAKVRHIIFYQRPIRIPKSLVGTCELEPKRRRCPRADRRAQRFRILQDVNNLLLIDEHGEERPLTQEERSRLLEYLSNAARRSFKDIRKHLGFTEAVVFNLERGGRKYLLGMPTDKAMSHKDCFDKAWFSMDEERKNQIVRCLLDEEDPVILQKAVSEWGLSPQQARNVLNAELPAGYANLSREAIAKLLPHMERGLPLMTGDDRPCALTEAGYLRPDQRPVERLERVAQPPDLPNPLVRQALHEVHKVVNAIIREYGCPEQIHIELAREVKGSAEQRKVRTKAMREQEQRRDQAAEEIRKAGGMPSRDAINRYLLWREQEGICIYTGRAISTAQLLAGEVDIDHILPKPRSLDDSMMNKVVCFRQANAEKGNRTPYEWLAQTDPQRYEQVCQRARKLPYGKYRKFLQKEVKLDDFIHRQLNDTAYISRKVREYLQCLVPDPHRDILCTKGQLTAELRHGWGLDTILRELPDSPAWKEDHGDIRPGQKDRSDHRHHAIDAIVIALTDRSRLQQLAREQVCPPPLEHFRQEVKNLISEMHVSHRVQRKVAGPLHEETIYGKTDKPGEFVYRKPLEALTPSEAQDIRDPVVREKVLERLRALGVRSGRKKRGAGANESTIPAEAWREPLWMNEEKRILILKVRLIKKEGSILDIRQGAAWVKPGSTHHVCLFEMPDGKRDAVFVTMLEAARRAANGEPVIRRQHPHQPNARSVMSLSKGELVLANCEDGQRILQYNTGASTTKQLRFTDPKDARPSRDKATFSFSPNKLEARKITIDPLGRVRWAND

SEQ ID NO: 5927 - protein, 1112 aa, synthetic construct
  SITE 434: note = misc_feature - Xaa can be any naturally occurring amino acid
  REGION 1..1112: note = Synthetic
MKIAIQNLQFAFDVGHNSIGWSVLEVGGEGPDIQGCGTVIFEKDGCLAVKRRTYRRQRRNIRATRQRIARMKRLLFQLGVLSEYQLDSVTSSSPWFLAAGVLTTGRNLTWPELWDVLRWYAHNRGYDGNRGWADNSVHMEDREDTEKVENARGLYDKYGTRTMAETLCAELSIDLASGKLSSIKRFKGLNAAFPREDVMDEIRRILAAHRGVLPAVDDALIRTLIGNGPADADAWKTIPVEGMRIPLRYRGSLLLGQLVPRFDNRIISRCPITYQRVLVEKLDEGLEQSEAEREASKLSKVPSKNCIEFLRYRWAMILANVVVGGIDGKMRTLSITERGEVDREMRLKGKLTPTPFKFCVLSVTGAVKSNLEEMFTHPDAGESLVLDEATYQTQQGTVALIWSSLDGAMQKRIQGRMREGKQISIAEIVQGNEXLEALRQSLHSISGRKVSTKKEVNSLENLLAEIVSIKPIIGRAPYSRTVMKEVVADVMERGIHPTAEGGVLYRDEAIRLAQITRRLDDQTNNHLVRHRLLILERLHNDLIEEYAEGDIERIGRITIEVNSELREMSGKTAKEAAQEEGLKLADFKSVTKYLEEKLVGTGITINAGLIRKARIAHDQGWKCPYTGREFDVFDLVHRKVDKDHIIPRSMRPSDSLDSLAITFSEVNRMKGQRTAAAFIEEFGGKEVEGKPELSIMSLGPYQEAVKMLDERRGHEADKRRKKNRKRLLLLKEYVEKEFTPGDLTRTSQLVRLGAQLLSRPYLALESQPTITSLPGSVTGAVRKSWRVLGCLTQANSQVTNETTKTEVRSITHLHHALDATVLALATYFLPRDGGIWELIIKRKLTSAEQEHLLAKGRQFARDSEGRVSLIDLPTYLKNQLSARLAERRVVQHISADMSGLATEETVYRVLDPRDQHPSAQKLRKWCALSGVEIPDPKDSQVLLISRKRRGESESGKLPKNILHETKTWRWTWQHEKRSKLIGLEQKDGENGKLQSLKAVKIIGENFGLALDPEPEVIQLSNVWKRLREVRQQHGRPIRVLRNGDLITLTSPDVDEKRRGLWRVMSVKNNSSGLALDLARPDETQSTWINTLVQSHLKNGLVTISTSLSGLTR

SEQ ID NO: 5928 - protein, 1112 aa, synthetic construct
  REGION 1..1112: note = Synthetic
MNNTTQNLDLAFDVGHDSIGWSVLSHEGDAPDIKGCGAVIFQKDGCLAVKRRGYRRQRRHIRSTRQRIARMKSLLRALGVLDDRALDEVSSSSPWFLAAGVLVGSRTLTWPELWDVLRWYAHNRGYDGNRGWAINDSLEEEDDTIKVENAKGLYGKHGTRTMAETLCAELKIDPKGEKASSRMRFKGLDAAFPREDVTAEIRRILEAHKDVLPKIDDLLIRSLIGKGPDDYEAWKTIPVEGMRIPLRYRGSLLMGQLIPRFENRIISRCPVLYQRILQKRLDEGWVREEAEADAEKGSKVPAKSVVEFLRFRWAMLLANILISEPGGKARPLNMAERSAMDQKMREAGSMTATEFKKALIEVVGPLKSNAEAMLTHPDADKALVLDAAMREIRKGAFGIIWEHLDEQTRKRTLGRLRHGKPVDLVDLVAGNQKAKEALEQHVSKASKSKGKGAKVAKAPITLESLLSETISVNPPQGRAPFSREVMREAVADVMERGIHPTAEGGVLYRGEEIRKAQVERRLDDQTNNHLVRHRLLILERLHNDIIESYADGDPGRIGRITIEVNSELRAMSGRTAKEIAQEEGKKLADFKDVTKELEKRLEGTGITITAGLIRKARIAKDQGWRCPYTGRDFDVMDLVSRKVDKDHVIPRSLRPSDSLDSLVITFSEVNRMKGQRTALAFIEEFGGKPVDGRPELSIMSSSSYQESVKKLDERKGHDDDKRRKKNRKRLLLMRDYVEKEFTPGDLTRTSQLVRLGAQLLERPYMEQEKRPVITSLPGSVTGAVRKSWRLLGCLQQANSLVTDGMTKTDVRSVTHLHHALDASVLALASHFLPGDGGIWELLVKRKLSPFEQEHLLKKGRQFARDSEGRVSLIDLPSYLKNQLGERLAEKRVVQHIPADMSGLAAEETVYRVFDPKDTHPSARRIAKWCAARGIEIPDPRDEEVLLVCRKRRAEQESGEVLHETPTWRWIYKIEKRSKLLGLEPAHGSNGKLKAQKAVKIIRENFGLALDPEPEVLQLSSVWKRLAELRKQCGQKIRVLRNGDLITFTSPDTPEKRRGIWRITSVQNAEKGIKIDLFRPDQLVRSKESWREVPIGNLHKYQVKIIKPKLTGI

SEQ ID NO: 5929 - protein, 1162 aa, synthetic construct
  REGION 1..1162: note = Synthetic
MKIGWGIDVGVSSLGFAVIELDTENQPQALLDGVALVYPTPTGAAERTRYKSMRTQNQRRSKRIRAVRSKLACLFKLASNFDTELPDLKDGQNEDGEQRDNNSRVRLRAHGLSEPLTAGDLARAILHIAKNRGRRLTRGLKDTTQPDAGQQKKDAKERQSIAYTANETSQDLEKLGIELELDGGAHPSQLLMHRAGKTGTTRLKKDRDGMLVFTRDMVRKEMCALLKAQKPHHKTVLKNTVCEELEEIIFWEETPKEPVIGKCRYGIRNAEGDIEPRLPRGSDLFQRKRIYEEVNNLRLISPRTAGDTPLNLAQRDRLASLLLDGFDLNASRVRGELGLGADALADKTSLDISDRGRKTPGKLLGHPLAAAMRKADALAQWKSFDEQCREEVARLVRAEDDEDVLRAELGKLGLSQEAARKLSDARVPATYSAAGETATRKLLAKLQADVISNYEAEQSAELDSLDPPSPRLDRLPYYGEILKGWSIGGNGDPNGSGEARFGRIPNPVVHVGLNQLRKTANAYLSLYGKPTRICVELSRDMNKSAEAREQDEKNADKNRKRNEKYIETLQAHTRKLARRDLVRMKLHEMQSGECLYTGQPISKGQLFDGSVEVDHILPRAVTRDDGIANLALAFKEANQFKAKRSPFEAFSSGYKDQEYPHILRRAQKRGKRVYWRFAENAMDRYKDQDAFRARFLNDNRYVAKMAARYLSCICADINGVICLNGWITADLRRQWGLASVIRDMMIADNRLDAADVKRPEEGETLDELKARRKRIDKIRWDHRHHLLDAIVAACTTRSDVLRLQTLARHAGNKNPIEILAEIRDADSDFKNAGICWQKGFRENVETFLKDRTHTGATDKPPVTAVVTKADHDPGGRLHEETNYGVICRVPGKHDQYVTRDHVAIMDLTADKIKQLGVPDTALKAVEEVMRTGEPIWWGGNDPLSALRDNLARDLGKLKAKLLELMEGTPPEQLEKATTEKGKDNARTRWAIKQYVDDTGRRRFTRIQITSLRILKGPVRHDKKPQRACPEGGNDRLVYFVNNKGDRDLEVVSTLDANTRGFKERWQREGGRALFTLRKDDLVEMAVNPDNPVSPRCIFRTVSFSYTGSPDLEFLPVEESRAPKEVPQVRARISSVRAFCDRAPVMVLCDPTGRVRWRSPSIN

SEQ ID NO: 5930 - protein, 1120 aa, synthetic construct
  REGION 1..1120: note = Synthetic
MGNVLGLDIGTNSIGWAIVNTEKKLIHSNIHIFPQGVTEKTGEPRNIQRRAARGARRNNHRYKQRREKLQNLLSKTKMLPKYVEKFPYHVYELRAKALDKQISLEELGRVFLHLNQRRGFQSNRKEQANADKDKEKELGKVKEGIKELESLLQAHHSRTIGELYWKLLQDRKHDFTAAQAIRNRFPTEKRYTSRELLKDEFEQIWEKQKQFYPQILTEKLKNEIGKETIFYQRKLKTQKGKTEKCPFEPKSSCIPKAAIEFQEFRIWQKLSTIKVTIPDKNRIADLLTLEEKQKIAYELDRLTNKEMRLTFKQIKALFKKEWGTEANLNYKEEDDIKGNTTAIKLRRVLGEKYDEIYQAYNEAFEYEEKRKTNFFKIWHALLYADNDKWLKKYAVEKLGFSEVQAEKYAAQNLEDGNGSLSYKAIRPILAYLKTGEDYTNACLLAGYDHALLPDKHRKLLPKIPKLQNNELRNPTVQRALTETIKLVNRLLQEYEIESICIETARELKKTKKKRDEREKELKAKTDRRRELAKFLAENSMMLFGKQREFDLNSKPDMEDVRKYELWLELAVADKDLNEIGIKKGFADFARKIGKDDMDKYRLWIEAQRISVYTGKVIPFQRLFSKDYEIEHILPYSRSFDDSFANKSIAEAWFNAEKGNLTPYEYFQKKTKEEWLAFKHRIKMLPKPKQERLLWEKEIEGFRNSQLTDTAYIAREMAKRLQSVCKDVQTTQGAITSMLRRYWGLNALLNPEGENEKDRGDHRHHALDAIVIACTNRAKVQLINWANAKDIDWKKERRKIDLPWSSFRYDVQQQLHGMLVSYRQDNGILIKRKAITKTKNGKKKTSVQIGIRGELHEATYYGKHILPKGAPPAKDKKTKTAYFVRKKLSSLNENQVEQIVDRVIRETVQKAIAEKGFKQALAEPIYMPDTNNKGWQMPIKKVRIAINKDDEGMIPLYKKEGDEDYKRNLYVPSGSNYIMGIYQDPNTGEKEVYITSFYEAVQRKIKKLPVLDSMRGSKKLVLTARQGDMFVVYENHPDEIEKHINWDRIDLEARRFLFDKLYIVRKMTKTNGKIFLSQHHLAKVNVDSDPLPLKIYPLGKNFNGIPVEIDILGNIRRKKSV

SEQ ID NO: 5931 - protein, 1183 aa, synthetic construct
  REGION 1..1183: note = Synthetic
MKYRLGIDLGTSSIGIAAFSLKENNEIDDLIYMDSYIFGEPVNPKAMVTLNTDRRSARLIRRQIERKAKRLKKLTYIVKSIGVSKENLDAIKDSDVIALRAKAISEKLTLPELIKVFSHIVKNRGYKGDLKRAEGDVGSKIKETKSMLGDKTLGQLLYEKREAAENNTPWRKLNQDGTFITRDIIEDEFEKIWQKQINHHEELKGNYQITYKEMFTNHAGKDEVLLKDAFFSAMFYQRPIKWKPETVGFCSLEEDEYRSAVAQPVFQKYRLAANIANLRVKTLGSKEECSLTEDEIKKIYDFVCENFKLYNDRAKISYKLIYEKLGFRDNEKFTIDRAKGDAAKDAGLKGITTLQAFYNCDKEDFKFINAFNSLSEKVQELAMEFLANITKYADIQENEDGYIDLKFPELTKNVKNKTEEDNQKAIMFIKMLRKEEIFYNNKFDLEQGRASYSIKALNRIIPELLKSENEQNIINKLYPPKSESQENPVLRDYEKVATNNPVIDKVLREFKRTMDFIVKKFDGNPAEMTIELTRELKNSLAKRSYIEKQNQIAQDDRTKAINELKSHNIYLSGENIEKYLLRQEQDNHCPYCGQTLSIGDIVNNTQIDHIIPQAIGGPNIFSNKILAHTKCNHDKGNKIPYEYKFQKDIEDYIAFLQEKKKSKKAGKDEKIDFRKDSSLINLVKSLWQKYTKESKGYYDKRKRKWTATQKGKRLLDKINFILTKPDEIKDIIGEFSNLHLNSTAWINKIIMDWSKDICPKVTPSFGALTAYLRSKWNFSEILPLVRISEGKKLFDENDKEIDSKKWQELWIKHDLSLSNTKTLMENFEDYINDLEESDKPINDTDKQEQFKKICQDLRQENKFNKRCDHRHHAVDAAIIGLSTLSLIQQASQHNAKYGGLYEVKNDKGEVEIPHFEIKKEDALLYKIIKEKALKYLTNFVVWHKPDHFPSGAFFKDFAYDAVKILKGDENERFVKKYFLSDILGKETNLDKLIKKLNVFVEGNTLKQEIIKQLQERTRKGLSLKDAFLGENENDGIFYRGHKVKKLRGIYQESYYKEERDKKITLVNKKGQKIGNKYYMNDGFACMDFDAENRKRINIIPIATYYRDYFNKPIPNNIIRIFIGDILFDKKNNNFYKVQSFKFRDGLHCILHSEVNDDGRDVNSLKDMLLIKTRSDIAKIKNGK

SEQ ID NO: 5932 - protein, 1074 aa, synthetic construct
  REGION 1..1074: note = Synthetic
MLFGCINCGRKSVVSKRLRYRLALDLGTNSIGFCLLDLNGDGRPCGVRRMGVRIFPDGRDPKSQQSLAADRRLARSMRRRRDRYLRRRKALMNALVAAALMPETRQARKALEALDPYELRAAAVAGPLPAHQLGRALFHLNQRRGFKSNRKAAGDENEAGKVKSGISALKAELAASGAGTLGQWLAARHASRQPVRARLTGTGAKAAYSFYPDRALVHEEFQAIRAAQAPHHPCVTAEQWDRIESVIFHQRPLKPVKPGKCTLYPAEERAPWALPIAQRFRILHELHNLRIVRPGQGEEGLSPVDFDRFYDRLCRKGDLTFKTLAKELKLPPDARINLEDDKRDRLKGDATADALSAEKGKRRRIGAAWHGFPADRQRGIVGRLIDAEDEGELAGWLVEELGLPWEVAILTAERPGLPDGYCRLSEKALEQVVPLMHEEHLPYDEAVRALGLHHSDHRPDDLLDELPYYGVPLERFIAFGTGEADDPPELRIGRFPNPTVHVALNELRRVVNRIIRRWGKPEEIVVELARDLKQSRADRDKEQREQALNQKKNRTRVEQLRELGIEPTGEALLRLRLWEELPRIGSAHVCVYTGQPISMTQLLQGDVDVDHILPFSRTLANGADNKIVCHRRANRIKRNRTPWEAFGVVPADGYDWSAIAERAESLPQNKRWRFLPNAMERFEKDRGFIDRQLVETRHLSRVAREYLGCIVPLEKVRAAPGRLTAMLRGRWGLNAILSDANLKNRSDHRHHAVDAAVLGVIDQRLVQRVADAAKRAEERELEKLFDGLPDPFDGLPGPSFREQVQDRVQGIIVSHKPEHGWQGRMHNDTAYGPVERLPDGTHRVVTRKPLGSLVEKDFGNIRDRALAAALERHVAEQAAQGRGLGEALSCFTWTGGEVRRVRMLDKLGSPVAVRDEGGRTFKFYKGDSNAWYEILRDGRGRWTGRVVSTYEAYRLHAEWLAERTDRGRDDAAFPDWAAGRLCAGIGTPLFRLFKGDMLAFGTAPNREILRVVKFTDGQITFAGHREAGNLKARDADKEDPFKYRYCSPEALRKAQARPVGVDPAGFVHDRGPLE

SEQ ID NO: 5933 - protein, 1062 aa, synthetic construct
  REGION 1..1062: note = Synthetic
MSERLRYRLSLDLGTNSIGFCLLDLNGDGRPCAVRRMGVRIFPDGRDPKSQESLAADRRLARSMRRRRDRYLRRRSALMTALIAGGLMPAEEDARKALEHTDPYTLRAHAVAEPLPAPELGRALFHLNQRRGFKSNRKAAGDEAEAGKVKTGVSALKAQLQESGAETLGAWLAARHAKRQPVRARLSGSGAKAFYGFYPDRALVHEEFQAIRAAQAPHHPDLSPAQWDRIEAIIFYQRPLRPVRPGKCTLFPAEERAPWALPIAQQFRILTELANLRFNRPGEIPWGLTRDQSASLFERLCRKGDLTFKALAKDLKLPSDVAINLEDGKRDRLKGDAVADALSAEKGKRRRIGAAWHDLPPDRQRDIVGRLLDTEDEGELAAWLVSELGLSWEVATLTAERPGLPEGYCRLSEKALEEVVPLMRDRHLNYSEAVEALGLHHSDFRPDRLLDALPYYGEPLERFIAFGTGELDDPPELRLGRFPNPTVHIGLNELRKLVNKIIERWGKPEEIVVELARDLKQSRDERDRTQRDQAQNQRKNEERVRQLQELGVEVKAESLLRMRLWEELPQHGLARVCVYTGEVISLTRLLRGDVDIDHILPFSKTLSDGADNKIVCARAANRFKRNRSPWEAFGAVPVDGYDWDAIAERAALLPRNKRWRFLPDAMERFDGEKGFLARQLVETRHLSRIARQYLGSIVPLEKVRVAPGRLTAMLRARWGLNKILSDSNLKNRGDHRHHAIDAAVLGVIDQRLVQLVAKAAERAEVNELERLFDGLPDPFDGLGGASFGDQVRDKVRGIVVSHKAEHGWQARMHNDTAYGPVGVQPDGTHLVVTRKPLAGLTAKDLPNIRDRKLAAALEAHVAEQAAQGRSFAEAMSRFEWTNGTVRRVRMLDKLGSPVPVRDPAGTMFKLYKGDSNAWYEILRDGRGRWTGRIVSTHEAYQLHRAWVAETGAARAEDGRPFLDWAARRVAGDAGTPLFRLFKGDLLALGIAPDRQIMRVVKFSEGRIVLAPHHEAGNLKERDADPGDPFKYRTFSPDALRKGQARPAGVDLLGYVHDKGPME

SEQ ID NO: 5934 - protein, 1062 aa, synthetic construct
  REGION 1..1062: note = Synthetic
LSKRLRYRLALDLGTNSIGFCLLDLNGEGRPCGIRRMGVRIFPDGRDPKSKASLAADRRLARSMRRRRDRYLRRRTVLMNALAAAGLMPPDPADRKALEHDDPYTLRARAVAEPLPPHQLGRALFHLNQRRGFKSNRKAAGDENEAGKVKTGISALKEELAASGAGTLGQWLAARHARREPVRARLTGAGAKASYSFYPDRSLVHEEFQVIRAVQAPHQPGVTPAQWDRIESIIFHQRPLKPVKPGKCTLYPTEERAPWALPIAQQFRILTELANLRFERPGEPQWELTADESAALFARLCRKGDLTFKAMRKDLKLPPDTRINLEDEKRDRLKGDAVADALSADKGKRRRIGPPWHDLPPARQRAIVGRLLDTEDEEELAVWLVENVGLGWEVAILTAERPGLPDGHCSLSEKALEEVVPLMRDQHLRYDEAVSALGLHHSDFRPDSLLDELPYYGEPLERFIAFGTGEPSDPPELRLGRFPNPTVHIGLNELRKLVNRIIQRWGKPEEIVVELARDLKRSRDEREKLQRDQAQNQRRNEERANRLRELGVEVKAESRLRLRLWEELPQHGLARVCVYTGEVISLTRLLQGDVDIDHILPFSKTLSDGPDNKIVCVRGANRFKRNRTPWEAFGVVPVDGYDWAAIGERAEQLPRNKRWRFQPDAMERFNGEKGFLDRQLTETRHLSRIARQYLGSILPLERVRVAPVRLTALLRARWGLNKILSDSNLKNRSDHRHHAVDAAVLGVVDQRLVQQVAKAAERAEVNELERLFDGLPDPFDGLGVDSFGDQVRDKARGIVVSHKAEHGWQGRMHNDTAYGPVAVQADGAHVVVTRKPLASLTAKDLPNIRDPKLAAALEAHVEAQAAQGRGFAEALSAFEWTNGTVRRVRMLDKLGSPIPVRDPAGAVFKLYKGDSNAWYEILRDGRGRWTGRIVSTHEAYQLHRQWVAETGSARTEDGRPFQEWAARRVVGNSDTPLFRLFKGDLLALGVAPDRQILRVVKFSEGQIVLASHHEAGNLKARDADKGDPFKYRYSSPEALRKAQARPAGVDLLGYVHDKGPVE

SEQ ID NO: 5935 - protein, 1057 aa, synthetic construct
  REGION 1..1057: note = Synthetic
MSNRVPYRLALDLGTNSIGWCLLDLNGNGDPCGVRRMGVRIFPDGRDPKSKESLAADRRLARSMRRRRDRYLRRRSALMNALVAAGLMPADRATRKALESEDPCELRARALFEPLTAGQVGRALFHLNQRRGFKSNRKAAGEENEAGKIKAGISALKAEIEASGETTLGAWLAARHRKRETVRARLDGAGAKASYEFYPERGLVHDEFQAIRTAQALHHPAVTAEQWDRVESVIFRQRPLRPVRPGKCTLFPDQERAPWALPVAQEFRILTEIGNLKLYRPGEEPRELSADQHAQLFAKLCRSADLTFEKIRKELKLDPGLKVNLEGEKRDRLKGDAVTSALSAKKRFGPKWNALTPDDRRDIVGRLIEAEDEAELAGWLESVHGLPSENAAHTAASPGLPDGYCRLSEKALVKLVPLMREQRLRYDEAVLALNLHHSDFRPEGLLDELPYYGEPLERFIAFGSGEPSDPPEQHLGRFPNPTVHIGLNELRKLVNRIVERWGKPADIVVELARDLKRSRDERDTIQREQAQNQRKNEDRFAKIKELGIDPRPDSMLRLRLWEELPKVGVGHVCVYTGEPIGIRRLLEGDVDIDHILPFSRTLSDGADNKIVCVRRANRFKRDRSPWEAFGVTAVDGYDWAAIAQRAEELPKNKRWRFLPDAMDRFEGERGFLDRQLVETRHLSRVARQYLASIVDLNKVRVAPGKLTAMLRARWGLNKILSDGNLKNRSDHRHHAIDAAVLGMIDQRLVQLVAQAAARAEANELERLFDGLPDPFDGLAATSFGDQVREKIRGITVSHRAEHGWQGRMHNDTAYGPVEAVNGVHTVVTRKPLSGLTAKDFPNIRDRVLAKALEDHVAAEAAAGRSFGDALGSFKWGGQPVRRVRMLDVLGNPIPIQDPSGTVFKVYKGDSNAWYEILRDPRGRWTGKIVSTFEAYRLHREWLAETGGDSGRGSGVFLDWAAKRVVGEAGTPLFRLFKGDLLALGEAPDRRIVRVVKFSEGQVALALHLEAGNLKARDADKGDPFKYQYCSPDSLRKQAARPAGVDLLGYVHDKGPLE

SEQ ID NO: 5936 - protein, 1070 aa, synthetic construct
  REGION 1..1070: note = Synthetic
MSKRLRYRLSLDLGTNSIGFCLLDLNGEGQPCRVRRMGVRIFPDGRDPKSQESLAADRRLARSMRRRRDRYLRRRTVLMNTLIACGLMPPDKAARKALEVTDPKARQETDPYELRARAVQQPVSAHQLGRALFHLNQRRGFKSNRKAGGDETEAGKVKTGISALKEELKKADAQTLGCWLAERHRNRQPVRARLTGSGAKASYGFYPDRALVQEEFQAIRAAQAPHHPDLTAAQWDRIESIIFHQRPLRPVRPGKCTLFPEEERAPWALPIAQQFRILTELANLRFERKGAAPWGLSAEEHSRLFDRLCHKGDMTFKALAKDLGLPPDTKINLEDDKRDRLKGDAVADVLAAEKGKRRRIGAAWHDFSPQRQREIVGRLLDTEDEGELAAWLVSDLGLDWELATLIAERPGLPDGHCRLSEKALELVVPEMRDRHLDYSEAVEAVGLHHSDFRPDRLLDFLPYYGEPLERFIAFGTGEANDPPERRLGRFPNPTVHIGLNELRRLVNAIIARWGKPEEIVVELARDLKQSRDERERTQKDQALNQKRNEARAAELRALGIPVKGEALLRLRLWEELPKHGDDRLCVYTGKLMGKAQLFNGEVDIDHILPFSKTLSDGADNKIVCFRSANRFKRNRTPWEAFGVAPVDPYDWDGILARAELLPKNKRWRFLPDAMERFNGDKGFLARQLNETRHLSKIARIYLGSVIPLEKVRVAPGRLTALLRARWGLNAILSDANLKNRCDHRHHAIDAAVLGVIDQRLVQRVAEAAERAENKELERLFDGLPDPFDGVSTESFGDQVRNLARGIIVSHKAEHGWQTRMHNDTAYGPVGTLANGLHQVVTRKPLSNLTAKDLDNIRDDRLKAALKAHVESEAAQGRSFEQALSGFEWTGGVVRRVRMLDTLGSPIPIRDSAGSVFKLYKGDSNAWYEILRDGRGRWTGRIVSTYEAYQLHRAWLAETGASRAEDGRPFLEWAGRRVAGDLGTPLFRLFKGDTLALGVAPDRQIMRVVKFSEGQITLAAHHEAGALKARDADKNDPFKYRYASPDALRKAQARPAGVDPLGYVHDNGPME

SEQ ID NO: 5937 - protein, 1394 aa, synthetic construct
  REGION 1..1394: note = Synthetic
MKKILGLDIGTNSIGWALIEKNEEENKGRIIDLGCRIIPMGEDKSNFEQGAQITRNAKRRMYRMSRRRNKRFKQRRNKLIYVLHKLDMLPDFIHIEDGIPPPEKIQTLKIKPIPKGTKQLNALEIIELRKKSLYDKIDIKDFGRILYLYNQLRGYAGGNPEEENITENEETEISIKNDELLIEKVIIKAIKEIDKIKPRKKSQDKEISKYEITVENIYGKEYTGTTIIQNLKEGNEIELEIKIKRDKKTGDIKTINFVEHKKSNWKIELEQLENEFKSKGNPHIAELFYEKLKENPWYRIRNHVILRDRYKREFDAIWDNQSKYYDFLNNTDKSILQEIAEYLFPGKSKSQSEYREIILKEGLKYLIKEMIIYYQRPLKPQIAIIGNCRFEKNLKVIPQSHPLYQEYRIWQEINNLSINTITTVNGKKYYYDRPLSTEEKELLYNKLNNQKEINHSSVFKLLNLRKEKDYLNGMHVKSKLKGNETLLSLKKLLGDDLFIKLKLEDTANLTLLWRILYNWLKDDDLIIDTKNYEKNPEKYNMYNPNNDNEYDLNSDRIKKIKEYLESILDNENKNIINDEILIKIGKIRFTRRYGSLSAKAISNILNLMRAGKYFDINKIRPDVKEKIEKIKNAEEDENIDNFLREYYSKNQNCFDTGGLMASYSMILYYGQHTAEISDGLKDYHDIKTYEQRKIEDPENAEKYTLRNPIVEQILNETLQLVKSIWKHHKTKPDEIRIELVRELKNNAEERKKIYKSVLDNEKRNNEIRKKLEEQNIPQTLINIEKYKLWEEQNKISPYTLKTIEFSKLFSDYYQVDHIIPHSRFFDDSLANKVICESVINSLKSNRTAWEFINSSDSKLPVEDYINHVTKNFYGRKRKNLLLAKIPDNFIERQKKDTQYITVKVKEELGKIVGTNNVKTTTGVITNYLSQQWGLKVKLKELTKYRYQLMEKLTGEKLVEYITDEYGNRYLNIKNWSKRIDNRSHAIDALIVACTEQSHIQRLNNLNKEFQKYLRENSNLNTTEDIMQALYNLDEKEREETIRQMPSFRNFPLPWKNFPEEAEEKIKSIVISHKPKQKLLIQVHPKTGKEYLRIRGALHEETLYGKEKTYRIPISKLKDKNDIQKFIDESIVSETIRETLLNHLEKFDNNAKKAFSNEGIQELNEKRKNKIRAVRVFYTTKEKSDDSLIPLFKGSGYDIKTYIKPGDNYCFAIADNNGRRKYGIISLIKAVELITKFYKQGEKNINNIIKHYFENLCEKTKGCRLLFTLSHNDLVYLPELNSDIPPLNKKDKDYNIYWGKINKNRIFRVIKFSGDLCFFTTHTISGQLKYKNQSNETFKEFGSYDGCCPYIYTMDNKLFHQNNKLKSNEENRIFIQEFCIKIRIDRLGNIEPDIL

SEQ ID NO: 5938 - protein, 1545 aa, synthetic construct
  REGION 1..1545: note = Synthetic
MKKILGLDLGTNSIGWALVEKPEEKKEIGNILGMGSRIISLGKDKTNFEQGLSLTRNAERRTKRGTRKLNKRYKQRRNKLIYVLNELGILPDFIQWEGDFPNPDKIQQLSLLPIPKSFKQLNAFELYELRKRALSGRIEMKEFGRLLYLFNQLRGYAGGESEKEDKKNLEDDNESKDESLKKYESFVDRVKIISLKKVGKRKSRRKKDNNKEIPEYEATIQKSDGQELIGKTILENLKENDETELALTIRRNKNGEVTSTEFSLPFKSSWRKQMEDLEKDLKEKGEPQLGEYFYEKLKEDKWFKVRSRVILRSRYKREFDAIWDEQAKHYDWLNNTSRSTVEKIADFIFPGTSKNQQKYHKEAIEKGLKHIIKEQIIYYQRPLKPQFKLIANCRYEKELKVIPQSHPLYQEFKIWQQINNLSINTVAEVNGKKFYKDRELTLEEKKTLCEILQEQKEINHSSIRTKLKLKDKVDYLNGLHIKAKLKGNETKIIIKKILGEELYQKLKLEELGKLTALWRILYNWIKKEYDEKSIDNNEYEKNPSFYHEYDPNSDNEYDMNSERINAIKNFISRNNSSKIDCSTNEELIKTIAKIRFKRSYGALSEKAIKNILPLMRVWDSDTTNGISEEVIVKIENLKTGEVDDKIDKALREYCNRSNVLRDGGMISSYATMLVYGSHTAEKISVDYSLNNYHEIKTLEHRKALDPNNAEKYTLRNPVVEQLTNETLQIVKSIWKHYKVKPDEIRIELARELKNNAEERNKIYKAVLNSEKENNRIRERLIELKHSLPLENTIVLNENPSFSNIERYKLWSLQTSEYSPDKKEIEKYKLWEEQKHISPYTMNPIPLSRLFTKDYEVDHIIPRSRFFDDSLTNKVICEASINEDKGNRTAWEYITSGSSLQNILKEEDYVKHINEIFFGRKRKNLLLTNIPKDFIERQKKDTQYISIKVKEELGKIVGTEKVLTTTGAVTDYLRQHWGLNDKLKEVTKERFAAMGKICGEEWISYEFDADRNKKVLKVKNWGKRYDHRHHAVDALVVACTEQSHIQRLNNLNKELHIWLKEHKNLIPESSDDSGEDLLDKFISLQKEKRQKVLEEMKESFVHFDLPWRDFPKQAEEKLSSIVVSHKPRKKLIIQKNPKDGKDMLRIRGGFHEETLYGKGETYRLPLLKLKGKTNLEKFITEKIVQKHIADELEKHLKKFGSKAFTPEGVIEFNKFRKGNNEHPINAVRVKYSKDESGGDEGKLQPLERKNYPPNSIYVKTGDNYCFAVVEQNDKRKFSVLTFFDAVKLVKEEIKKDNKNLDKIINKYFNEICEETKGGKFLFTLSQNDLVYLPNGEDEIIPLQEDDENFSDFWNNKLDRSRVFRTVKMDAKQNLCYFVPHTLAEELVYTPVTIVDLLNNQDESHKNKRKYYEFGSYKDCSPYYFDNAYLENMLSNKRKKEIKAIKEKEIDNIFAKYFSVTSANDSNSNNLLLESLAEFVINNPDIDLLKYIRSKDKAIAQLVKKLSDEEILTIKSRNKSMLSKPIRIQDTCIKLIVDNLGNIKPLT

SEQ ID NO: 5939 - protein, 1071 aa, synthetic construct
  REGION 1..1071: note = Synthetic
MDRIWGFDIGTTSVGFAVVEFDEEKSEGRIIHEGVRIFPEGREERKLEPRNQARRAARLLRRQVRRRRLRRKFLREAFAEAGLLPRFNTPEWDISMCPRRPAGGRLLRPGPYELRARGLRERLEPAELGRALYHLCHRRGFLSARRVEERKDLSKAREKEEGKIKGEIKGLEQKLEGRPLGEFLYLASLEKTDRDRLMSEWKVENTYLRNLDKPERIRGRHIGREMVTEEFDRLWETQARFHPDVLTNELKEELQSILLYQRPMFWRLQTVGRCWLEPGEPVCPKGSWLGQQFLMLQHVNNLRVRFMGRPPRPLDPEERKVLLQKLQRQQDMTFAGVSSALKKLWKERGLPGKPEMNLESGGETRLLGNAVEARLAMVFGDAWDSHPMRERLRIELYPRLFAIYNRQVGKKRIELHRKDAFKDEVTPARARFVEEAQRDFSITREQAEQLSEFEPPSGWLRFSEKAIRKLLPFLENGLGLNEKGGALDLAYPGWRSASSHTLDRLPSNPKVMPVLRNPSVNRALNELRKVANNLLRTYGKPTLIRIELLRELKKTKKERLEISSRYSRNRRSREEAKSDLKEKGIPASPEAIEKWLLWKQSDEYCPYTGAKISFDALFRRGDFQVEHIFPLSRSLDNNLLNKTLCATDVNKAKGNQTPYEYFRSRPEEWEAIKDRLERWVEKGTFPEEKMKNFLREDYPPGQEFLEDRQRADASYIAVEARKFLARLGVPVEVVNGQVTAQLRSRWGLDAILNPGNPEVKNRSDHRHHAVDALAVALTSLAFVKRLSDYYARGKRGEKPRLPQPWENFFLDAKEKTEAVIVSHRVQRKVSGPLHALTYYGDTGKEETNGGITYRKFVFRKRLKDISKSEIEDIVDPEIRRIVREHAEPYGGDLEKAIAEKGLPVLPDNKTGEKRDIRKVRLWVKQQKRLMVPVWPKAKAGIEPMTFADPAGNHHMAVFRLADGDVHFETVTLFEAARRLRAGEPVVRRTSENGGEFVMSLAPGDALELPAENGAKAYRIVTSVWASGQIVLEDHTEAAGKVWSRPNPASLLRMGARKVRIDPIGRVRPAND

SEQ ID NO: 5940 - protein, 1087 aa, synthetic construct
  REGION 1..1087: note = Synthetic
MRYVLGLDLGIASIGWAIYNMDNSNIEKCGVRLFEPGEVKGARNNASASLSASRRLARGMRRRIRRRAYRMQKIKEHLINSGLVSKDELANMFNSTSKTKSGTSHYDVYELRYLALDSFLSNQQLARVLIHLAKHRGFKSNRKKDKSVDGTVNKSLVENRKLLEENGYRTVGEMLHKNQTFAANKRNRFGEYRVMLQRSDIGEEAKIILEAQYQLGNQLINQQFIEKYITMFNWQRDFAKAEDIQKMVGKCQFETEEARAPKACFSSEKFIALSKLNNLIVSNQITQEKRKLTPAEIQKIIAFILAKKVKFSPKIYFSNLRTILSLEKDEYFNFIQYKPNIKFNEQEQKEQIKELSFPATHELKWGICEHAGEVTWLNLFSNTTLLDTIAVELTYNKTDEAIQTALEKCFAKQKNNFDTDSQQAIISAILKDGVSFDKNISLSLKALHKIIPHLENGQRYDEACKSVWGHHSQRNQQPNPKLPSIQALGLDNELTNPVVIRAISQVRKVINAVIDNYGSPYQINIELARDIGKSVDQRNEISKRQKNNQANNERLIAEFEEDFGRKPMKDEFTKFKLWKQQGNKCIYSGEYINPENILHGTHATEIDHIIPHSRSFDDSMGNKVLCLTQENQRKGNQTPYEYIGQSGHNEQAWHKFEERCKLMNKTGYQLGFDFSKLDRLLLKKVDKEGFIERNLNDTRYIARFCKNYLENHLQFSYPEDNNKLRVRVLTGQATAFIRSHWGLSKSREENDLHHAQDACVIAAVTTKLVQNVTKYMHEKEFSAAPQIRFVDEDGVIHDRFPMPNINFRQQIIERVNKIFVSRMPKHKISGQVHLDTIRSRKYVDNPVGEYNNGKPFSTISKQLADSGIKLDKDGEIPTLCPAYKQHNPNIYRLLKGQLEKHGNDAKKAFAEPLYAPRKDGTPSEAQIKTIKIIQPQNTGVKVNQGIADNGGMVRIDIFNKEGKNYIVPVYLSEVIKAELPNRAIIANKGEADWEMIDSNFKFIFSLYPNDLVKITTKKETFFGYYTGTDRATGAITILLHDGSKEIRGIGIKINTLLEKFQVDVLGNITKVEKEKRLDFSQLQSQKR

SEQ ID NO: 5941 - protein, 1080 aa, synthetic construct
  REGION 1..1080: note = Synthetic
MKYVLGLDLGIASIGWAIYNYDTSHLERCGVRLFDAAEHPKTKESLSTPRRLARGQRRRIRRRSYRMQKLKDFLIKSTLITQNELNNLFNSEEKSAPQTSRYDIYELRYQALDHKLNNQQLTQVLIHLAKHRGFKSNRKNDKSVDGKVNNQLKANHQLLTEEGYRTVGEMLYKHSSFAINRRNRFGEYRVMLQRSDIETEAQIILGKQQQLGNQIINVEFIEQYIKMFNWQKSFDWKGNIIDMVGSCQFEPNEKRAPRACFSSEKFIALSKLNNIKYTEDSIEKPLTAINIQEIFNFALARKTKTFNITFTDIRRILNISADARFNFVKYKSTDDFLEIEKKEKIKELEFKAFHELKNSISSYVGEITWNNLTNNIPLLDEISIALTYNKTDETIEKALEKCFSDIKNNFDNNEQHSIISAIIGDGISFDKNISLSLKALYQIIPHLENGQRYDQACELAGYHHSLQSSSRSLKLPSIQALGLDQELTNTVVTRAISQVRKVINALVDTYGSPYQINIELARDIGKSAQQRNEINKFQKDNQATNDKLVTQFADYFSRTPAKDELTKYKLWKQQGGKCIYSGDTINLADIRHGENLTQIDHVIPFSLSFDDSLSNKVLCLTRENQCKGNQTPYEYVSANGTNDKAWHEFEERCENSLKHGRQAGFSYKKYQLLLTKNFNQEGFIDRNLNDTRYISRFCKNYLENYLQFSDLADKNRQRVRVLTGQATAFIRAHWGLAKSREENDLHHAQDACVIATVTTGMQQKITSFMKARDFGKNHDATYTDPDTGEIFDAFPMPNINFRTEILLKVKDVFVSRMPKRSITGQVHLDTIRSSKYVDNPVAEYNNGKPFSTIAKQLVESGMKLDKNGEIPTLCPTYKQHNPNIYKLLVDRLEQFDNDAKKAFAKPIFAPRKDGAPSDIQIKTVKIIQAQNTGVKVNQGIADNGGMVRIDIFTKEGKNYIVPVYLSDVIRNELPNRAIVAAKPEKEWDLIDDSFNFYFSLYANDLVKIISKKATYFGYYTGTDRATGGVTILLHDGAREFRSIGVKVNTTLEKYQVDVIGNISKVNHETRLDFSQLKTQK

SEQ ID NO: 5942 - protein, 1084 aa, synthetic construct
  REGION 1..1084: note = Synthetic
MRYVLGLDLGIASIGWAIYDIDKSTIEKCGVHLFDAAENPKTKESLATPRRLARGQRRRIRRRAYRMAKIKESLIQSGILTQDELAKLFNSSEKTSSKTSRYDVYELRYQALDHQLSNAQLAQILIHLAKHRGFKSNRKNDKSVDGKINNQLKENHQLLIDKSYRSIGEMLYRDDSFASNRRNRFGEYRVMLQRSDIEAEAKLILEKQQQLGNSLISNEFIENYLKMFNWQRDFAKAEEIQKMVGVCQFEKAEKRAPKACFSSEKFIALSKLNNIYYALDSIEHRLSQSEIKHIYDLAIARKTKPFKTFADIRKSLNLPDEARFNFVKYNSNDDFLECEKKEKIKELEFKAYHELKTSISNHIGDVTWSNLNSNAALMDEIAISLTYNKTDETIHKALAESFTKHPHNFQIEEQTLIISALLDDGISFDKNISLSLIALNKIIPFLELGQRYDEACASAGYNHSAQQSQRSIKLPTIQALGLDQELTNPVVIRAISQVRKVINAIIAIYGSPYQINTELARDIGKTAQQRNEISKFQKENKTNNEKMVAQFTEYFKRAPAKDELTKYKLWKQQNGHCIYSGESINLDEIRHGVNLAQIDHIIPFSRSFDDSLSNKVLCLTAENQRKGNQTPYEYIAANGNNEQKWHNFVERCENLLKHGKQAGFSYKKYQLLLTKKFDQDKFIERNLNDTRYISSFCKNYLEHNLHFAELGDKNKRRVRVLTGQATAFIRSHWGLAKSREENDLHHAQDACVIAAVTTSIQQKITAFMQAKSYGKNQDATYTDPESGEVFDRFPMPNINFRTEILLKVNQVFVSRMPKRSVTGQVHLDTIRSKKYVDNPVAEYNNGKPFSTINKSLYPKTKNDYYLKLDKNGDIVDLCPTYKQHNPNIYKLLKERLEKYDNDAKKAFAEPLFAPRKDGTPSENQIKTVKVIQAQNTGVEVNQGIADNGGMIRIDIFTKGGKNYIVPVYLSDVIKDKLPDRAILQSKPEKEWTIIDETYTFCFGLYPNDLIKIITKKETYFGYYRGTDRATGALIILIHDGSKEIRGIGVKVHTALEKYQVDVLGNISKIDAEARLDFSQMKPQK

SEQ ID NO: 5943 - protein, 1080 aa, synthetic construct
  REGION 1..1080: note = Synthetic
MQLNKYIIGLDLGIASIGWAVYDDESKQMVDIGVRIFDAAEHPKTKESLALPRRIARGMRVRLRRRSYRMQLLRKLLVESNFITQEALDNLFNASIKTKNKESRYDVYYLRYKALTQELSNTELTQVLIHLAKHRGFKSNRKNDKSIDGVINNSLKHNQQLLKDNNYKTIGEMLYLNDEFKNKRNKFGAYNIMLLRSSLEEEAKLILETQANLGKTLITEDFIEKYLEIFNQQKSYDYRNNIEQMVGKCTFEPTEARASKACFSTEKFIALSKLNNIQVNRVKLDAEQISCALNHFMNKKLKKPKATFKELRTVLELDDKDRFNFVKYTSIDNFKEDEEKTNIKELFFSATNELRNNISNKVSEITWQNLSNNPKLLDAIGTTLTNYKEDNTIRENLLKNFENNSHNFTSEEINQIIEDAIIEEGISFKSNINLSLKVLYKIIPELEKAYRYDEAIKNVGYHHSQKITDKFDKLPSIQELGLDQELTNPVVIRAISQTRKVINAIIAKYGKPFQINIELARDIGKSAQERNIITKNQKKNEEFNQQLKDDFYEKFHRHPIKDELIKFKLWKQQESRCMYSDEYINLSDIQHSSNNTQIDHIIPYSRSCDDSLSNKVLCLTRENQNKSNQTPFEYIGDSGHNPDAWHKFIERCKSLNKNKYSLGFNYTKLNNLLLTKIDTEKFIERNLNDTRYIARFCLNYLENYLSFADKNHKKPVRVLTGQVTAYMRSHWGFKKDRAASDKHHAQDAAIVSVITNSMVQKITSYSQAKAYGKTNNYDFTYTNLETGEIFDRFPVPYDGFRDRVQDLVRNLFVSRMPTHKNTGSVHADTIRSTKYLDTHGVSTIKKRLVDSGIKIENDEIKKICHSYKQHNPNIYNLIKTRLEEHDNDCKKAFKDPLYAPRKDGSISDVEIKTVKIIETQNTGVFVNNGIADNGDMLRIDIFTKAGKNYIVPIYVKDILLPTLPNKAIIGATKEQDWEVMDDSYAFKYSLYKNDLIKIIKYDKSGAIKEEYFGYYSGCHRGGATISIIEPDRSAEHKGIGIKLNTVIEKYHVDVLGMVSPKPLKPETRVDYKKKNKINNA

SEQ ID NO: 5944 - protein, 1105 aa, synthetic construct
  REGION 1..1105: note = Synthetic
MTRTVAGIDVGANSVGVALWELDDDGTPVALLNAQTFLHDGGVHRGLEKAATSRLEAAGIARRTRRRYRRRKLRLEELDSVLASNGFQVATQPPKDPRAPWLYRAALAGGFIADPDRRALMIAESVRHIARHRGWRNPYQRVEALRGYTAPSEPFEKMADLLGVSPNNSDGEIMTVGQIVAEAIAEKSGLPAGPKLRGPSGAMVARLLQSDLANELHTIFEVQQVDPDTAWAIEQAVFAAESPRGSAEGRVGKDPLPGQRAHPRSSKSSPAFQEFRIRATIANLRISEAGTEHPLDKDQRRIVADWLLAWSDSESPTWGMVAELLGIPRRSLMGTANAGPDGEPATRPPTDRTNHLMSRCSVGAVREWWRDANEADRTAFTELIAGSRQTEASSEEQAEVDELFASLTPEELIKLEALDLPRGRAAYSVNSLRRLNARLSSSELDLHAALQAEFGVDNDWRPPVDPIGATIGNPAVDRVTRIVGRWLEQVGRRWGAPERVVIEHVRDAFVSVARAREMEREAESRRRKREAARQRFAAETGTPTDQVRDEQVRRFLIVERQDATCVYCGAGITYASSQLDHIRPRRGKSSRSTQDNLVAVCVSCNLSKSNTPFAVWAERSTNPNISVKDAVKRVKAWRHLSDLPNPAALRSLKTRVIRNIQTANYDDTDERPMESVAWMARELAARIQAHFKDETKVNVYRGSITAQARRAAGIDKAFTMIGGQGKQRLDRRHHVVDAAVVALMKPYAAQVLGERLAMRDAARYTPTADAAGWKTHEGSTPALVSEFRRWKHRMEAAVSLLQRALDEDTIIVRRPLRLTPNVGRLHEDQVASFYPKKTKKNEASAPVIRLGDELPASLIDRASTPALWHALTRHEDYDPQRGLPESSARRIRVQGRLVEAMDPLEFFPTPAAALTVRGGWVKLGDALHHARVYRFQHRGKTVYGMIRVFAIDLRGARGGDVFGFDLDPGSISMRTAETKCRNAVVNGEAEYLGWLVPGDEIQVKVPIARGSIGEFLEAFPGITRWEVTGLESPTTLKVRPLLLSKEATPADLSENATTVIQKAWRPKINVLMQMPGLKVVRRDTLGRERQESAAHLPVSWSPQAE

SEQ ID NO: 5945 - protein, 1059 aa, synthetic construct
  REGION 1..1059: note = Synthetic
MNKILGIDMGIASLGYAVVNIDDENFVNGDILASGVRIFDIAESPDGSSLAAPRRAARSVRRILRRKVMRIKAIKQLFLDFNLLSPQELDLLSKQDFKTLYQATLEGQPIPSVWEIRARALDNPCSLVDICRALLHIAKRRGFRSMRKSEKLTGEAGKLLKGVEEMQKKLQESHFRTIGELLFHLPATEPKRNKDGSYSHSVARTLLEEEVHLILQAQRAKGVNALSQEFETQFCKIAFLQNPLQPSDPGFCTLEPTEPRAPKNAYTAELFAALCKINHIYLEEDGQSHALSAAQRALALEKCFSTQKTNYKQLRELFNLPNDIKFNISYTAPAKKKSKKKEEAQSPEQAVQAPQEYDAEKNTTLYNMTGFHALKKALKSSPLWAEYQTNPNGILDKIAEVLSRYKSDGEIRQHLTALGLPAEAVEKLQNVNFSGFMNLSLVAMNKIIPFLKEGFRYDVACKKAGYNFQAPQQNKGLSKLPPLTQEDNHTITSPVAKRSLAQARKVINALNKKYGPFDAVHIEVAREIGKSFEQRKEIEAEQKAHAAERAQLKEVGIDGIIPQTETDLKKLRLWKEQDGRCMYSFQYIEPEKILEEGYCQVDHIIPYSLSFDNSLNNQVLCLTSENQHKKNQIPYEYFHSGKAQITWEKFEGYVVNSLQNMRMAKKHRLLKQELTEDDLQGFKERNLSDTKLISRFMKNYLLANLRLTGKYKQGVFCVNGKHTSTLRGFWRLQKIREDGDKHHALDAIVIACCTNRLMQYISTKYRQNRELELQRKEVAVPWPFPHFKHAVENSLLSIFVSRPPRKKVTGALHKNTFFSAKHIKKGIKTLRTDIQKLTLDSLKKQRELEVKHFGVERNKPLYDLIETALNNRPDDKTPIQVQMPTKNGGFVPVRHIKLISESTSGIPVLGGTALAENDSMPRVDVFLEDGQYYVVPVYTMDFAKGVLPLVAQPSGRLMKKENFVFSLYKDDYVNLVNKQDDKWEGYFKQYRAKSGQISIESHDRSKQYFVNKKESSTKDIMPSTLKLIEKYQIDIFGGKHLVKKEKYIGIIRKNKGFGG

SEQ ID NO: 5946 - protein, 1059 aa, synthetic construct
  REGION 1..1059: note = Synthetic
MNKILGLDLGIASLGYCVINIDDENFAAGDILATGVRIFDVAENPKDGNSLAAPRREARSLRRILRRKVMRIQAIKQLFLDFHLLTPQELNCLSQQDFKRLYRADQLVNGHIPSVWEIRARGLDERRPMQDICRALLHIAKRRGFRSMRKNEKPSGEAGKLLKGVEEMSKTLQASHFRTIGEMLYHLPTTEPKRNKDGSYNHSIARVLLEKEVHLLLQTQRDKGAALLSKEFENKFCELAFSQHPLQPSDAGYCTLEPNEKRAPKQAYTAELFAALCKINHIYLEENSHSYPLSASQRALALEKCLSTQKTNYKQLRELFNLPDHIKFNISYTAPAKKKSKQTETKSPEQIAQEAKEYDAEKNTTLYNMTGFHALKKALNSMPLWTEYKNNPNGILDKIAEILSRYKSDGEINQHLTVLGLEAEAVEKLQNVNFSGFMNLSLAAMNKIIPFLKEGLLYHDACHKAGYNFQATPQNKGLSKLPPLTEEDGHTITSPVAKRSLAQARKVINALNKKYGPFDAVHIEVAREIGKSFEKRKEIEANQKAHAEERTRLKEVGIDGIIPKTETDLKKLRLWKEQEGFSMYSHTYIDPKKILEEGFCEVDHIIPYSKSFDNSLNNQVLCLASENQEKKNCIPYEYFQNRKTQITWEEFEGYVNCLKNMRMAKKHRLLKQELTKEDLQGFKERNLNDTKLISRFMKNYLSANLKLTGKYKQGVFCINGQHTNTLRGFWRLTKIREAGDKHHALDAIVIACCTNQLMNYISTKYCQGREMELKRKEVAVPWPWPHFKRTVENALLGIFVSRPPRKKVTGPLHKDTFYSAKHIAKGIKTLRTDIQKLTIEAIKKQRELEVKYFGVERNKPLYDLIEKALRARPNDKTPIEVQLPTKNGGGVPVRHIKLITESTTGVPVLGGTARAENGPMPRVDVFLENGKYYLVPIYTMNFAKGQLPLIAQPSDRLMKKENFVFSLYKDDYVNVVNEQGECWEGYFKQYTAQTGQIFIESHDRSAQYTVNKQPASQKKINCNTFKLFEKYQIDILGGKHLVKKEKYLGNLRKNKGFGG

SEQ ID NO: 5947 - protein, 1232 aa, synthetic construct
  REGION 1..1232: note = Synthetic
MTKTRILGLDTGTNSLGWAIVDRDEVSGQYELVDRGDLIFTEGVKIEKGIESSKASERTQHRALRKQYFRRRLRKIEVLRVLTFYHLCPPVSEEELHLWHVKKIYPVENQEFMIWQRTNDNEGKNPYYYRHICLHTKLNLTLMKDRYILGRALYHLSQRRGFLSNRLDQSQDEDDKGTVKTGISSLSRDMNDAGCTYLGDYFYKLYSENGNRVRIRNHYTARNEHYLAEFEAICQVQKLEPELVEALRRAIFFQRPLKSQRKGVGKCTFEPRKPRCADSHPDYEEFRKLCFVNNIKIQTPDDDTMRPLNKEERQRINSLFYRVSKANFYFEEIAKLLGGKNNYCYFKDEVQKDFKFNYRMSQSVSGCPTTAQLHNIFDEDWKTGIAETYQHSAKKDGSLKTVDEMADDIWNVLYSFSSKDCLYNFAVNKLQLEEDKAKKFSKIKLSRGFASISLNAIHKILPFLRMGMIYSHAVLFANIPTIVGMDVWSDESKRQHIMTELSDLVLNYDPKNREVEGTIEMCIKDFLLNNYDLPAGAVCRLYHPSMIDTYPDAKENKDGVLQLGSPATNAIRNPMAMRSLHELRHVVNLLLRKGKIDQNTEVHVEYARELNDANKRKAIADRQREMDKLHKKYHDDIITLYKEETGKDINPTQADILKFQLWEEQEHVCLYTGHQIGISKFLGPDPEFDIEHTVPRSVGGDSTQMNMTLCDRRFNRDVKKAMLPSQLPNYQEILPRIEKWKKKYEKLTKDIDHCITHSGMSKEAKDSIIQKRHRLTLERDYWRNKYLRFTMTEVPEGFSRRQGAGIGLVSKYAGLFLKSLFHDPADRRRSHVYVVKGTTTAEFRKMWGLQSEYEKKSRDNHVHHCVDAITIACIGKNEYNKMASFYHDEEAFERGECDKPHFDKPWPTFTQDVLGLEKSLMVVHSTQDNMPKHAKKYVRTPRGKFIAKGDCARGSLHLDTYYGAIKHKDDTEPRYVLRRELSSFDSVSDLDIIVDDAVREKIREAVKGKSGKAFKEALANVYMNKEKGIRIKKVRCYVPSVKRPIDIRHQRDISRFDYKRQFHVANDGNYMMAIYEGVVKGKQKRDFELVKNIEAASYFKVSQDKESFSSIVPEKSSNGFPLKAALKIGTHVLLYENTASEIDFSDPVDLTRRLYKVVGLSSKTVSGYNYGDITLRFHQEARQAKEITSTRGLFKNTDQYRGEIHLLHTQLNALVEGYDFDMNILGEITSKQ

SEQ ID NO: 5948 - protein, 1231 aa, synthetic construct
  REGION 1..1231: note = Synthetic
MNTRILGLDTGTNSLAWAVVDRDANGNYKLVRRGDVIFSEGVKIEKGVESSKAAERTGHKSLRVQYARRRLRKIDTLKVLVSLDLCPYLSDEQLSQWKAKKTYPLTDDFMLWQRSGSAEENNPYYCRYRCLTQKLDLTDQSQRFLLGRAFYHLAQRRGFLSNRLDTSADSEEAGKVKSGIAQLSVEMEKAGCHYLGEYFYQLYRQHGNTVRLRSRYTDREEHYKKEFLAICEKQGLDAQWVEKLQSALYFQRPLKSQRKGVGKCTFEPKKPRCAESHPDYEAFRMLCILNNIKIKTPKDVSLRPLNAEEREKVWPLFFRKSKPNFDFEDIAKALAGKNNYAWYKDAGEKPFRFNYRMHQGVSGCPVTAQLIDLFGPDWKAGIAETYMAVEKKNGTKTIDEMADDVWNVLYSFSSKDKLKAFATEKLQLDEASATKFANAKLPHGFAALSLKAIRNILPFLRQGFIYAHAVLLAKIPDIVTKAVWDDAHKREQILSGLLEIIENYNPKDRGVEGTIDFCIKSHLQDVVDLRPGAADALYHPSMIEAYPDAKLNKMGVFQLGSPRTNAIRNPMAMRSLHILRSVVNQLLRDGTIDRDTEVHVEYARELNDANKRKAIADNQKDIERKRADYRKRIIELYKDECHKEIEPTETDILKYQLWEEQNHKCLYTDREIGICDFLGDNPKFDIEHTIPRSVGGDSTQMNLTLCDAMFNRQVKGARLPSQLTNYADILKRIAPWKSKCEDLRKQLDKIRTYGGMEKKIKDKLIQKRHRLKMELSYWQGKYERFTMTEVPEGFSRRQGAGIGLISKYAGLFLKSLFHNAVNPNKSNVYMVKGVITAEFRRMWELQGEYEKKSRLNHCHHCIDAITIACIGKAEYEKMAQYYHDEELFQWRGTTIKPHFKKPWATFTEDVLAIEQSLLVKHLTKNNMPKQAKKHVRTAKGKYVAQGDAARGSLHRDTYYGVIEKDGILYHVLRKPIDKFEKESELEKIVDQAVKEKIKAAVAGKNFKTAITEPIFMNKEKGIRINKVRRYVKAQERLKIRQQRDLSTKEYKQFFCVENESNYLLAIYEGELKGKKERDFCVINNLDAAANLKRSNKGKAAPLVPERSAERNLPLLAVLQRGTQVLFYEDSPEEILFDNPQDLVRRLYKVVGINTKRDVKKGKTYLYGNIELRFHQNAQKKDDVKMESGGYKNNEAPHQGIVLSHNQFKALVEGVDFKFNILGEIKKKEHHA

SEQ ID NO: 5949 - protein, 1231 aa, synthetic construct
  REGION 1..1231: note = Synthetic
MNTRILGLDTGTNSLAWAVVDRNANGNYTLVKRGDVIFSEGVKIEKGVESSKAAERTGHKSLRVQYARRRLRKIDTLKVLVSLDLCPYLSDEQLSQWKAKKTYPLTDDFMLWQRSGSAEENNPYYCRYRCLTQKLDLTDQSQRFLLGRAFYHLAQRRGFLSNRLDTSADSEESGKVKSGIAQLSVEMEKAGCTFLGEYFYQLYKQHGNTVRLRSRYTDREEHYKKEFLAICEKQELDAQWVEKLQKALYFQRPLKSQRKGVGKCTFEPKKPRCAESHPDYEAFRMLCILNNIKIKTPNDTSLRPLNAQEREKIWPLFFRKSKPNFDFEDIAKALAGKNNYAWYKDAGEKPYRFNYRMHQGVSGCPVTAQLIDIFGSDWKAGIAETYMAVEKKNGTKTIDEMADDVWNVLYSFSSKDKLKAFATEKLQLDEARATKFANAKLPHGFAALSLKAIRNILPFLRQGFIYAHAVLLAKIPDIVTNAVWDDAHKREQILSGLLETIENYNPKDRGVEGTIDFCIKSHLQDVVDLRPGAADALYHPSMIEAYPDAKLNKMGVFQLGSPRTNAIRNPMAMRSLHILRSVVNQLLRDGTIDRDTEVHVEYARELNDANKRKAIADYQREQEKKRKQYRDDIITLYKSECHKEIEPTDTDILKFQLWEEQNHLCLYTGTQIGICDFLGDNPKFDIEHTIPRSVGGDSTQMNLTLCDATFNRQVKGARLPSQLPNHHEILKRIAPWESKCEDLRKKIDKIRTFSGMAKEKKDSQIQKRHRQKMELDYWQGKYERFTMTEVPEGFSRRQGAGIGLVSKYAGLFLKSLFHSADSPNKSNVYVVKGVTTAEFRRMWGLQGEYEKKSRLNHCHHCIDAITIACIGKAEYDKIAQYYHDEEVSRWHGSAGKPHFKKPWPNFTEDVLALEQSLLIKHLTKDNMPKQAKRRVRTAKGKHLAQGDAARGSLHRDTYYGAIEQEGEIRYVLRKPISKFEKESELENIVDQAVKEKIKVAVAGKNFKAAIAEPIFMNKEKGIRINKVRCYVKAKERLKIRQQRDLSTKEYKQFFCVENENNYLLAIYEGEVKGKKERDFCVVNNLDAAAYLKRSNKGKAAPLVPERSAERNLPLLAVLQRGTQVLFYEDSPEEILFDNPQDLVRRLYKVVGINTKRDVKKGKTYLYGNIELRFHQNAQKKDDVKMESGGYKNNEAPHQGIVLSHNQFKALVEDIDFEFNILGEIKKKEHHA

SEQ ID NO: 5950 - protein, 1225 aa, synthetic construct
  REGION 1..1225: note = Synthetic
MSKRILGIDVGTNSLGWAVVDRTNCDNYTLVKRGDVIFQEGVNIEKGNIEKSRASERTGHRSTRKHYFRRRMLKIKVLEILVEHQLCPYLSHEELHQWMTRKVYPTNEDFRLWLRTNDANDQNPYHDRHVCLHERLDLRLQENRYRLGRALYHLAQRRGFLSNRLEQKSNTDETGAVKSDISQLNEEMEKAGCQYLGDYFYRLYQECGNQVTLRARYTDRIQHYQKEFEAICQRQQLGDELVDKLRRAIYFQRPLKSQRAGVGKCTFEPDKPRCALSHPRYEEFRMLSFLNNVKVKGPSDDSLRPLSPSEKEKIKPLFLRKSKANFDFEDIAKAIAGKGKYACIRDKEGAQKPYQFNYALSQGVSGCPVTAKLTAVFGESWERNLVNAYRSRNDTRKSDEEIVNEVWNVLYSFSSKEKLRAWGMEKLGLDEACAGEFADITLPAAFAALSLKAVNKILPFLRQGFIYSHAVMLANIPYIIGMDRWNDPRQRQFIMDNLQELLDNFTASDKALQQTLDFCIKDFLLNNYELAPGKADRLYHPSMIETYPDAKADGQGIYQLGSPATNAIRNPMAMRSLHILRRVVNQLLKEKTIDSETEVHIEYARELNDANRRWAINQWQREQETRRKDYAEKIRKVYADEFGKVIEPTQEELLKYQLWEEQQHLCLYTGEQIGLTDFIGPNPRYDIEHTIPQSMGGDSTRMNLTLCERTYNRTVKGNRMPSQLAEHESILTRIKPWKDKYEELTVKINKLRTHPGMDKASKDNIIRKRHLLELERDYWFQKYQRFTMTEVPEGFSLRQGTGIGLIGKYAGLFLKSLFHHVKERNRKQVYVIKGPITAEFRRLWGLQNLYEQKSRDNHAHHCIDAIVIACINPTEYARMASYYRQEEDFRLNKGNKPVFPKPWATFTQDLQALEAELLVVHETRNNLTKKTRKRVRTKGGNVLSESDSARGSLHNDTYYGAIQKDGVIRYVVRKALSSLSEKDVKDIVDKTVREKVQAAIQEKGLKEALAGTIYMNEEKGITIKKVRCFTKIASPLAIRRHRDASAKEYKRPYYVTNESNYVMGIYEGCIKKKTKREFILVNNLEAVRQLKTARKQGVVSSILPPVSAKSQFPLKYRLYTGTLVLLYENSPEEIDFTNQADICKRLYKVTGLSSMTVTGNQYGTIQLRYHQEARQAKDLKAQNGAYKEGEEHRPVIFLYHTQFKALVEGTDFRMNILGEIEPLRK

SEQ ID NO: 5951 - protein, 1225 aa, synthetic construct
  REGION 1..1225: note = Synthetic
MKTKILGLDTGTNSLAWAVVERDENGKYSLLKYGDTIFTEGVKIEKGIESSKAAERTGHKALRVHYYRRRLRKIETLKALVQLNLCPYLSGEQLAEWKRKKTYPLMSDFMLWQRSGSALEDNPYFCRHICLTQKLDLADQGQRFLLGRAMYHLAQRRGFLSNRLDTSADSEDSGKVKSGIAQLSVEMEKAGCHYLGEYFYQLYKQHGNTVRLRSRYTDREEHYQKEFFAICEKQELDAQWVETLQRALYFQRPLKSQRKGVGMCTFEPKKHRCAESHPDYEAFRMLCFINNVKIRTPKDVSLRPLNAEERETIWPLFFRKSKPNFDFEDIAKTLAGKNNYAWFDESCEKPYRFNYRMHQGVSGCPVTAQLIDIFGSDWKAGIAETYTAVGKKNGTKTIDEMADDAWNVLHSFSSKDKLKAFATEKLQLDEACATKFANAKLPHGFAALSLKAIRNILPFLRQGFIYAHAVLLAKIPDIVSNAVWDDAHKREQILSGLLEIIENYNPKDCGVEGTIDFCIKSHLQDVIDLRPGAADALYHPSMIETYPDAKPNAEGKLQLGSPRTNSIRNPMAMRSLHVLRSVVNQLLRDGIIDRNTEVHVEYARELNDANKRKAIADYQKDIERKRADYRKRIIELYKDECHKEIEPTDTDILKFQLWEEQNHKCLYTDSEIGICDFLGDNPKFDIEHTIPRSVGGDSTQMNLTLCDAKFNRQEKGAKLPVQLSNHDDILVRISPWNDKCDELRKQIDRIRTFSGMEKGMKDRLIQKRHRLKMELDYWQGKYNRFTMTEVPEGFSRRQGAGIGLISKYAGLFLKSLFHNEQNPNKSNVYVVKGITTAEFRRMWGLQGEYEKKSRVNHCHHCIDAITIACIGKGEYDRMAQYYHIEELYNWHGSTSKPHFDKPWPKFAEDVLDIEHSLLVKHLTNDNMPKQAKKHVRTAKGKYLAQGDTARGSLHKDTYYGAIEQEGEIRYVLRKSLSDFDSESELENIVDQAVKEKIKVAVAGKNFKAAIAEPIFMNKEKGIRINKVRCYADSVKNPLHIRQQRDLSDKEYKQQFHVVNDSNYMLAIYEGEVKGKVKRDFVLVNNITAASFFKRSNRRKNAETLVPKTSPKGNLPLLVILKIGMQVLLYEKSSEEIKFDKPHDLVKRLYKVVGLSIDGSCIMIDLRYNQEARQAKDVKPKKGAYMENEQFRPCIRLRHTQFKALVEGIDFEFNILGEIKKKDNHA

SEQ ID NO: 5952 - protein, 1224 aa, synthetic construct
  REGION 1..1224: note = Synthetic
MAKKRVLGLDTGSNSLGWAIVDREESGEQTLVDKGTLIFQEGVKIEKGIESSKAADRTAHRALRRQYFRRRLRKIEVLKVLVKHNLCPALTEDDLKLWHTRKIYPRKDEFMQWQRTDENKGINPYHSRHICLTEKLDLNKQADRYTLGRALYHLAQRRGFMSNRLDANEEKESGAVKQGISELSQEMEKAGCKYLGEYFYMLYTQQGNKVRIRTRYIDREEHYKKEFHAICDKQGLSQEIRHELERALYFQRPLKSQRQSVGKCTFEKNKPRCSDSHPLYEEFRMLSFLNNVRIEDPYDMEPRPLNEVELYKIKPLFYRVSKANFDFEEIAKKIAGKGNYQYAKEAGKKPYKFNFRMTQGVPGCPTTAQLRTVFGDNWMEGIAETFDMNQCKDGRQKTAEEMACDIWNVLYFFDSKDKLKEFGINHLQLDEEHAEKFAKIRLSHNFSSLSLKAIRNVLPFLRMGMLYSHAVFMGNIPKLVGADIWNNPEKRERILDQVNKMATTPLDEVRDQRSTLEFCIKDFLHEEFGVCEKALEKLYHPSMIETYPDAKPNHDGVVLLGSPRTNAVRNPMAMRSLHEIRKVVNTLIKEGKIGPDTEVHVEYARSLNNANMRAAINEHQRTLDKKHKEYAEELKKLYREQANRDIEPTETDILKFQLWEEQNHVCLYTGKNIGITDFVGAGTPFDIEHTIPRSVGGDSTQENMTLCDSHYNRFVKKAQLPSKLPDYEQILVRIEPWKKKVEELTKQIDKISTRGVWDKTTKDNLIRKKNRLKIERDYWRGKYQRFTMEEVPEGFALRQGAGIGLISKYAALYLKSYFHDVVHPERRQVFSIKGPITAEFRKMWGIQEEYEKKSRDSHTHHCIDAIVIACIGKNELNQMSRYHHEMYDYTEGKGEKPIFPKPWSTFTQDLKQISEELLVVHDTPDNMPKKACRMIDTPHGKKQAKGDCARGSLHQDTYYGAIEQDGDVKYVVRRTLDSTFKLSDVDKIVDEVVREKVKAAFVNKVLQLPVFMNEEKGIEIKKVRCYTPSVKTPLHIRHHRDVSTKEYKQTFNVVNANNYCLAIYEGLVKGKPKRDYEIVNNLDAAAYYKKSADARMYPLVPEKSKRDFDLKYTLYIGTHVLLYEKTKEELAELSTNLLKNRLYTITGISNGCTTAGGIITYRFGIITLRHHAEARQASELIVKKGEYHQDEELRPIIALTHTQFKALIEGVDFEITPIGEIKLK

SEQ ID NO: 5953 - protein, 1224 aa, synthetic construct
  REGION 1..1224: note = Synthetic
MQRVLGIDTGTNSLGWAVVDRNANEQGDYALIDKGVVIFEEGVNKGKESSKAAERTGHHALRTGYFRRRLRKIETLKVLIAHELCPALSEEDLHRWRTKKIYPLTKDFMAWQSTNEHEGRNPYACRHRCLHEQLNLEDTADRFVLGRALYHLSQRRGFLSNRLDSTPEKESGAVKEGIKDLSAEMQKAGMEYLGDYFYHLYATKGNTVRLRARYTHREEHYYKEFQAICRKQQLPQSLCKALERALYFQRPLRSQRQTVGKCPFEPNKSRCALSHPAYEEFRMLQFVNNIKVVDIDAATDPLGEQKKLPMRPLNPEERALAISRFTLKSHASKSTIDFEDIAKAIAGRGQYQHISDPGERAYRFNYRMKQGFAPSRTTIALRQLFGEDYRAGIAECYTQNTHRDNTPKTLDEMVTDVWNILYSVEEDKHVVRWAKRYLQLSDKEAEQFSEIRLISGFASLSLSAIQKMLPFLREGYLYSHAAFLANVSTIVGSQTWTAHQDEILHDIRCIFSDESIRGNDGVSQAIKDYLKDNWTDEPGATDRLYHPSQLEVYPDAKRNAQGILQLGSPRTSSIRNPMAMRSLHEVRKLINFLLREGLITPQTEVHIEYARELNDSNKRAAIRDWQKDQEKLRAKAVKEVSAVLKGGTPTEMDILKYQLWEEQGRYCLYTGDQIAPSDFLCANPLYDIEHTIPRSVGGDSTKENLTLCNRRFNREVKQAKLPTELANYEDIKERLEPWREKVEKLRKALDKARTFQGMTKKAKDDTIQKRHKLKMELDYWEGKLRRFEMTEVPEGFSLRQGIGIGLISKYAGLFLKSLFKSEHLDRNGKKVPNVRVIKSPLTAEFRRLWELQEDYEKKSRDNHVHHCIDAITIACIGAAEARDMAEFYRAEEAMRWGRSGKPHFRKPWATFTEDVKAIAQDLLVVHHTADNLNKAARRRVKGSDGKLHLSISDSARASLHNDTYYGAIQQGDIVRYVQRRPLSGMKETDIKNIIDDAVREKVETAIQKWGSLAKAIEQGIFMNEEKGIRIQKVRCYAPSKYSNLAHIRTHRDESRHDYKRTFHVAPDGNYMLAIYEGKVGSRIKRSSQILSYLEATKLFKKGATRSTLFPATYEGLNLKYTLTKGQMVLLLNEGEEHLDFSNKKLLAQRLFEVVGIAYEVAAKRGFITLKHHQEAKPSGELQFQKGSFSSESWRSTYIQAHTQFRALIEGRDFLISNDGKISPR

SEQ ID NO: 5954 - protein, 1224 aa, synthetic construct
  REGION 1..1224: note = Synthetic
MKQRVLGLDTGTNSLGWAVVDRDENNYELIRRGDLIFTEGVKIEKGNESSKAAECTAFRAQRRFYFRRRLRKIEVLKVLVVNNLCPFVSDEELHLWHTKKQYPKRDELMLWQRTNDNEQKNPYYYRHICLHRTLDLENIEDRYMLGRALYHLTQRRGFLSNRLDTSSDSNEDGTVKSGIGDLNKEMEAAGCEFLGDYFYRLYHEEGNRVKIRNHYTDREAHYLREFNAICEKQHLKSEVVEALRRAIFFQRPLKSQRKGVGKCTFEPKKPRCAMSHPDYEEFRRLSFVNNIQIKTPYDLERRPLNKEERARILPLFYRKGKSNFDFEDIAKALSGKNNYCYEKEDLPKEFKFNYRMAQGVSKCKVTAQLRDIFGDDWKQGIAEIYLLTRKKEGVKTLDEMADDVWNVLYSFSSKDKLKEFAMQKLQLDEATAEKFSKIEMPHDFAALSLKAIRNILPFLRQGMIYSHAVLLANIPAIVSKEVWADEEKQRFIIDNLYDLIINYNPKDREVTGTIEWCIKDFLKNNFDLAPGIADKLYHPSMIETYEDAKRNRFGVLQLGSPMTNAVRNPMAMRSLHMVRKVVNQLLRDKTIDEHTEVHVEYARELNDANRRKAIADYQKDQEKKRVKYRADLIGLYKEETGKDITPTDDEVLKFQLWEEQDCHCLYTGQQIGIADFMGSNPQFDIEHTIPRSVGGDSTQMNLTLCENRFNRDVKRAQIPTQLANHEDIMVRIAPWKEHIDDLSKQIDRMRTNAGIPKDVKDRIIQKRHRLQLERNYWYGKYERFTMTEVPEGFSRRQGMGIGLVSKYAGLFLKSLFHDPQDRNKSHVYVVKGTTTAEFRKMWGLQNEYDKKSRVNHSHHCIDAITIACIGKGEYNEMAHYYHDEEASKRGAGQKPQFKKPWPTFTEDVLAIEQELLVVHSTPDNMAKHAKKYVRTAKGKHLAKGDCARGVLHQDTYYGAIERNGEVKYVVRRLLSSFEKIEDLDKIVDETVKQTIKEAVAGKEFKKAINEPIYMNKEKEVRIKKVRCFAPNVTRPMDIRNHRDMSRKDYKQKFHVMNDSNYMMAIYEGIVKNKVKREFAIIKNMDAAQFFKSSQDRIKYSTIVPEKSVKSGLPLKELLKIGMQVLLYENTPEEINFNNLNDLKKRLYKVVGLSSMLVSSSEFGVLKLRHHEEARPTKDIKFKNGKYMNDEQYRSGITLLHTQFFALVEGVDFDMNILGEIKLKS

SEQ ID NO: 5955 - protein, 1223 aa, synthetic construct
  REGION 1..1223: note = Synthetic
MITRILGLDTGTNSLAWAVVDRNANGSYTLVKRGDVIFSEGVKIEKGVESSKAAERTGHKSLRVQYARRRLRKIDTLKALVSLDLCPYLSDEQLSQWKAKKTYPLTDDFMLWQRSGSTEENNPYYCRYRCLTQKLDLTDQSQRFLLGRAFYHLAQRRGFLSNRLDTTADSAESGKVKSGIAQLSVEMEKAGCHYLGEYFYQLYRQHGNTVRLRSRYTDREEHYIKEFLAICERQELDAQWVEKLQRALYFQRPLKSQRKGVGKCTFEPKKPRCAESHPDYEAFRMLCILNNIKIKTPKDVSLRPLNAEEREKVWPLFFRKSKPNFDFEDIAKALAGKNNYTWYKDAGEKPYRFNYRMHQGVSGCPVTAQLIDLFGPDWKAGIAETYMAVEKKNGTKTINEMADDVWNVLYSFSSKDKLKAFATEKLQLDEARATKFANAKLPHGFAALSLKAIRNILPFLRQGFIYAHAVLLAKIPDIVTAAVWDDADKRQQILSGLLEVIENYNPNDRGIEGTIDFCIKSHLQDVVDLRPGAADALYHPSMIEAYPDAKLSKMGVFQLGSPRTNAIRNPMAMRSLHILRSVVNQLLRDRTIDRDTEVHVEYARELNDANKRKAIADYQKDIERKRADYRKRIIELYKEECHKEIEPTDTDILKFQLWEEQNHKCLYTESEIGICDFLGDNPKFDIEHTIPRSVGGDSTQMNLTLCDAMYNRQVKGARLPSQLPNHHEILKRIAPWKSKCEDLRKQLDKIRTYGGMEKGMKDRLIQKRHRLKMELSYWQGKYSRFTMTEVPEGFSRRQGAGIGLVSKYAGLFLKSLFHSADNPNKSNVYMVKGVTTAEFRRMWGLQGEYEKKSRLNHCHHCIDAITIACIGKAEYEKMAQYYHDEELFQWRGTTSKPHFNKPWPTFTEDILAIEQSLLVKHLTKDNMPKQAKKHVRTAKGKYLAQGDTARGSLHKDTYYGAIEQDGEIRNVLRKPLNRFENEAELERIVDQAVKEKIKEAIAGKNFKTAIAEPIFMNKEKGIRINKVRCYVKPSARIKVRQQRDLSSKEYKQYFYVENDINYMVAIYEGELNGKKEREFCVVNNLTAASYFKKSSHEEAGSLIPERSPKNDLPLLYALKRGVQVLLYENSPKEIRFDEPQDLVNRLYEIVGIGLDGNALMIDLRFHQEARRSSDLDRKKGAYKENETLRPCIRLRHTQFKALVEGVDFEFNILGEIKKKDRHA

SEQ ID NO: 5956 - protein, 1221 aa, synthetic construct
  REGION 1..1221: note = Synthetic
MTKQIDKKMNKKRILGLDTGTNSLGWAVVDREESGHYTLVDKGVIIFQEGVKIEKGVESSKASERTQHRALRKQYFRRRLRKIEVLKVLMKYNLCPALTEEDLKLWKQRKIYPKKDDFMLWQRTNDNEDINPYHCRHICLNKELNFDLEQDRYTLGRAFYHMAQRRGFLSNRLDESEEEENGTVKSCIADLSKEMELNGCQYLGEYFYKLYKERANNIRIRTRYTDREQHYKKEFFAICEKQHLTETMVEDLKRALYFQRPLKSQRQNVGKCTFEKGKPRVSDSHPAFEEFRMLSFLNNVKVQGPNDAELRPLNEEELAKIDSLFYRKTKPNFDFEDIAKKIAGKGKYGWKGDNQTALPYKFNYRMSQGVPGCPTIAQLKEIFGEDWKDGIVETYLQNTKKDGTHKSVDEMVNDIWNVLFFFDSKDKVKEFGIKHLQLDEEKAEKFSKIRLSRGYASLSLKAVRCILPFLEMGMIYTDAVFFAKVPDIVGRSIWQERQNEIKEDLSYAIQMAMKEKRRIDEAVKDYLQDNFDLKPGAAEMLYHPSMIETYPDAKPNKDGVVLLGSPRTNAVKNPMAMRSLHEVRKVVNTLIREGKIGPDTEVHIEYARGLNNANMRAAINDWQREQDKKHKQYADEIRHLYKEATGKDIEPTETDILKFQLWEEQDHTCLYTGDKIGIADFIGAGPKFDIEHTIPQSVGGDSTQMNLTLCNNQFNRFVKKAKIPTELAEHEEIMTRIEPWKERIDDLTKQIDRISTRGIWDKATKDKQIRKKNKLKIERDYWQGKYKRFTMTEVPEGFALRQGAGIGLISKYAALYLKSYFHDTLHPERRQVYSIKGTVTAEFRKMWGIQEEYEKKSRDSHTHHCIDAIVIACIGKNEFNMMGKYHRDMFDFSEGNGPKPQFEKPWPTFTQDLKQISEELLVVHDTPDNMPKKASRMIEVNGRKVVARGDCARGSLHQDTYYGAIERDGDIKYVVRKSLSSMKESDVENIVDDVVKAKVKQAIAEKGFKDAMAGDIYMNEAKGILIKKVRCYTPSVTQPLDIRRHRDASRKDYKQPYHVMNDENYMMAIYQGIVKGKRKTSFVLVNALDAVKFFKESTDRNDYPSIVPEEKSGLKLKCFVKKGTHLLMLEEGEESISLANANELSSRLFTITKMDKNGLLTCKNSKEARAAGELKSFLNSSLFRLLEGYRPILRMSPANFNFLVEGYDFTITPLGEIKLKH

SEQ ID NO: 5957 - protein, 1219 aa, synthetic construct
  REGION 1..1219: note = Synthetic
MKKRILGLDTGTNSLGWAVVDRDEESGEYALVDHGVIIFQEGVKIEKGIESSRAAERTAHRALRRQYFRRRLRKIEVLRVLVAHNLCPHLSDEELHEWHVHKRYPRNDDFMLWQRTSDNEDKNPYYYRHLCLHRQLDLHDIGDRYILGRALYHLAQRRGFLSNRLEQTDEKETGKVKDAITGLSDEMRAAGCEYLGDYFFRLYSEQGNRVRLRSRYTDREEHYKREFHAICRKQGLDEQLTKELERALYFQRPLKSQRQGVGKCTFEPRCPRCADSHPDFEEFRRLCFLNSVRVQGPYDFSPRPLDADEIRYIGHFFYRKSKSNFDFEDIAKAIAGKNNYQHMRDKGNKPYKFNFRMTQGVADCPTTAQLKKVFGDDWRQGIAETYTLNTRKDGTLKTAREMADDIWNVLYSFADKEHLVAFAKDKLQLDDEKAEKFSKIRLTHNFASLSLKAIRKILPFLREGMIYSHAVAMANIPSIVGEYAWEEKKDFILENVKTYLEDKDLATKDFCIKGFLQDNFSLDPGAAERLYHPSMIETYQDARRNEAGVYQLGSPRTSSVRNPMAMRSLHELRKVVNALLKAGTIDENTEVHIEYARELNDSNKRQSIMRYNKELENRHKQYEEEIKKLYKEETGKDIVPTEAEVQKFQFWEEQEHICLYTGKRIGIADFIGANPKFDIEHTVPRSVGGESTMENLTLCESRFNREEKKAQLPSALANHDEILVRLEPWKEKYEELSAQIDRLHTNGGMDKAQKDRILQKKHLLRLKRDYWRGKYERFTMTEEPEGFSRRQGAGIGLVSKYAGLYLKSLFHKKGDRNKSNVYVVKGSSTAEFRQMWGLQSQYEKKSRDNHIHHCIDAITIACIGKAEYDKCARYYREEEAYDAGRAKRPQFPKPWPTFTEDVLGIEQSLLVAHDTPDNMKKHARKTVRTPRGKFLATGDSARGSLHLDTYYGAIEREGKVRYVVRKPLSSFTSEKDLDQIVDETVKQVVKDAVAGKKFAEAIKEPIYMNKEKGIRINKVRVFVPSVTNPLHIRKQRDVSRKDYKQQFLVANDLNYMLAIYEGEVKGKPKREFEIVNNLEAADYYKQSMDRGDWPDIVPERSTKNGFPLYCKLKTGTHVLLYEKTAAEIDFANYKDLDKRLYKVSGMSSMTISGSKYAVINLRYHQEARASKDVKAKNGAYKNGEEHRAAIIMLHTQLKALVEGKDFRISELGKITPINI

SEQ ID NO: 5958 - protein, 1218 aa, synthetic construct
  REGION 1..1218: note = Synthetic
MNKRILGLDTGTNSLGWAVVDWDEHAQNYELIKYGDVIFQEGVKIEKGIESSKAAERSGYKAIRKQYFRRRLRKIQVLKVLVKYHLCPYLSDDDLRQWHLQKQYPKSDELMLWQRTSDEEGKNPYYDRHRCLHEKLDLTVEADRYTLGRALYHLTQRRGFLSSRLDTSADNKENGVVKSGISQLSTEMEEAGCEYLGDYFYKLYDEQGNKVRIRQRYTDRNKHYQHEFDAICEKQELSSELIEDLQRAIFFQLPLKSQRHGVGRCTFERGKPRCADSHPDYEEFRMLCFVNNIQVKGPHDLELRPLTYEEREKIEPLFFRKSKPNFDFEDIAKALAGKKNYAWIHDKEERAYKFNYRMTQGVPGCPTIAQLKSIFGDDWKTGIAETYTLIQKKNGSKSLQEMVDDVWNVLYSFSSVEKLKEFAHHKLQLDEESAEKFAKIKLSHSFAALSLKAIRKFLPFLRKGMYYTHASFFANIPTIVGKEIWNNEQNRKYIMENVGELVFNYQPKHREVQGTIEMLIKDFLANNFELPAGATDKLYHPSMIETYPNAQRNEFGILQLGSPRTNAIRNPMAMRSLHILRRVVNQLLKESIIDENTEVHVEYARELNDANKRRAIADWQKEQDKQHKKYGDEIRKLYKEETGKEIEPTQTDVLKFQLWEEQNRHCLYTGEQIGITDFIGSNPKFDIEHTIPQSVGGDSTQMNLTLCDNRFNREIKKAKLPTELANHEEILARIEPWKNKYEQLVKERDKQRTFAGMDKAVKDIRIQKRHKLQMEIDYWRGKYERFTMTEVPEGFSRRQGTGIGLVSRYAGLYLKSLFHQADSRNKSNVYVVKGVATAEFRKMWGLQSEYEKKCRDNHSHHCMDAITIACIGKREYDLTAEYYRMEETFKQGRGSKPKFSKPWATFTEDVLNIYKNLLVVHDTPNNMPKHTKKYVQTSKGKVLAQGDTARGSLHLDTYYGAIERDGEIRYVVRRPLSSFTKPEELENIVDETVKRTIKEAIADKKFKQAIAEPIYMNEDKGILIKKVRCFAKSVKQPINIRQHRDLSKKEYKQQYHVVNENNYMLAIYEGLVKNKVVREFEIVSYIEAAKYYKRSQDRNIFSSIVPTHSAKYGLPLKTKLLMGQLVLMFEENPDEIQVDNTKDLVKRLYKVVGIEKDGRIKFKYHQEARKEGLTIFSTPYKNNDDYAPIFRQSINNINILVDGIDFTIDILGKVTLKE

SEQ ID NO: 5959 - protein, 1217 aa, synthetic construct
  REGION 1..1217: note = Synthetic
MKKRILGLDTGTNSLGWAVVDRDEESGEYALVDRGVMIFQEGVKIEKGIESSRASERTAHRALRRQYFRRRLRKIEVLKVLVAHNLCPHLSDEELHEWHVHKKYPKNDDFMLWQRTSDNEDKNPYYYRHICLHRQLNLDDIGERFILGRALYHLAQRRGFRSNRLEQTDEKETGKVKEAITGLSDETREAGCEYLGDYFFKLYSEQGNRVRLRSRYTDREEHYKKEFHAICWKQGLDETLTAELERALYFQRPLKSQRQGVGKCTFEPRCPRCADSHPDFEEFRMLSFINAVRIQGPFDTALRPLDDTERAHILPLFYRKSKQNFNFEDIAKALAGKGNYQHIKDAGYKPYKFNFRMTQGVAGCPTTAQLKEVFGDDWHRGIAETYTLNTRKDGTLKTPREMADDIWNVLYSFADKEHLVAFAKDRLQLDDDKAEQFSKIRLTHSFASLSLKAIRKILPFLREGMVYSHAVAMANIPSIVGEYAWEQKKNFILENVKAYLDDKDLATKDFCIKGFLQDNFSLEPGAAEKLYHPSMIETYQDARRNEAGVYQLGSPRTSSVRNPMAMRSLHELRKVVNALLKAGTIDENTEVHIEYARELNDSNKRQAIMRYNKDLENRRKRYADEIKKLYKDETGKDIEPTQAEVLKFQLWEEQDHICLYTGNQIGIADFIGPNPRFDIEHTVPQSAGGDSTMENLTLCESRFNREVKKAQLPSVLANYEDILSRLEPWKEKYEELSKQIDKKHTNGSMDKAQKDRIIQKRHLLQLQRDYWRGKYEQFTMTEVPEGFARRQGAGIGLVSKYAGLYLKSLFHKKGDRNKSNVYVVKGASTAEFRRMWGLQGEYEKKSRDNHIHHCIDAITIACIGKAEYDKSAHYYREKEAYDEGRANRPHFPKPWPTFTEDVLGIEQSLLVAHDTPDNMKKHARKMVRTPHGKFLATGDSARCSLHLDTYYGAIEREGKVRYVVRKPLSSFASEKDLDQIVDETVKQIVREAVAGKEFKTAIADPIYMNKEKGIRINKVRVFVPSVTNPLHIRRQRDLSRKDYKQEFHVANDLNYMLAIYEGEVKGKPKRDFEIVNNLEAADYYRQSMDRRDWPAIIPEKSTKNGFPLYCKLKIGTHVLLYEKTAAEVDFANYKDLDRRLYRVSGMSSMTISGNKYGVINLRYHQEARASKEIKSKNGAYKNGEEHRPAITMLHTQLKALVEGKDFRISELGKITPI

SEQ ID NO: 5960 - protein, 1217 aa, synthetic construct
  REGION 1..1217: note = Synthetic
MRKRILGLDTGTNSLGWAVVDKNSDGTYTLVDKGSLIFQEGVKDEKGNGNEVSRAAERTSYRALRRQYFRRRLRKIELLKVLVKHGLCPTLSEEDLNLWHTKKIYPKRDAFMEWQRTNENSESNPYYYRHVCLTEELDLSDEQERFILGRALYHLAQRRGFLSNRLDQSEGESEDGDVKSGISNLTKEMAAKGCEYLGDFFYKLYREKGNTERIRTRYTDRNAHYKKEFYAICKKQNLEAELVGELERALYFQRPLKSQRFGVGKCTFEPKKQRCADSHPAYERFRMWAFINNVKVKCSADPDLRPLNEEERKIAEQVFYVKGGRKSKTTFDFEDIAKAIAGKGKYQYINDAGDKEYKFNYRMSQGVAGCQTIAALRSVFGDDYLHSIAETYTKADNKSLDDIENDIWNVLYFFSSEEKLKEFAVKNLQLDDDLAAKFSKIRLSRGFASLSLKAIRRILPFLEQGYRYDSAVLLANVPYVMGDRWNVVKDEVMAKMNEVIYNYNPKDVNLNRTLECCIKDILEDDFNVEASDVCRLYHPSMIDVYPDAKEIDGVLQLGSPKTDSVRNPMAMRSLHEMRKVINTLLRNKIIDQNTEVHVEYARELNDANKRKALFAWNKSQNKLHDKYRDDIIRLFKEATGKTIEPTKRDILKFKLWEEQNHICIYTGEEIGIADFLCKNPKFDIEHTVPQSAGGDSTEINLTLCNSRFNREVKRTKLPTQLAEHEEIINRISEWKDKIDELSKKIDRLHTNGSMTKEKKDAIIQKRHLLKIEKDYWKGKYSRFTMTEVPEGFSLRQGAGIGLISKYAALFLKSLFHKPNDRNRSNVRTIKGQITAEFRRLWGIQDEYEAKSRDNHVHHCIDAVTIACIGAEEYSRMASFYHDEETYNWDKSGSKPTFPKPWATFAEDMKKLKDEVVVVHSTTDNMPKQGKRRIKTSVGMAYAQGDSARAALHKDTNYGAIERDGKIKYVVRKQLADLKESDIENIVDEVVKEKVRQAVKEKGLNQAVVDGIYMNEKKRILIKKVRCIVPTVTNPLSIRHHRDESKKEYKQQYHVALDSNYCMAIYEGRVNGKIQRKYEVVNMLDAARFYRKSSKKVGHSSMVQEEKNGLKYRCKVMSGTHVLLLQNDDEVIDVTDKKVVAARLYYVAIISADGRLLLRNHQEARRAGDLKSETNANEFSLTSGYRSQIRWSLSNFRALVENYDFTIDKLGNIRLIKK

SEQ ID NO: 5961 - protein, 1215 aa, synthetic construct
  REGION 1..1215: note = Synthetic
MTKQIDKKMNKKRILGLDTGTNSLGWAVVDQEENGQYTLVDKGVVIFQEGVKIEQNGTDSSKAADRTKHRALRRQYFRRRLRKIEVLKVLMKYGLCPALTEEDLKLWKQHKIYPKKDEFMLWQRTNDNEDANPYHCRYSCLRESLDLQKQQDRYTLGRALYHMAQRRGFLSNRLDESEEKESGAVKSSIADLNKEMEANGCQYLGEFFYKLYKERANTIRIRTRYTDREQHYKKEFFAICEKQHLPEAMVADLTRALYFQRPLKSQRQNVGKCTFEKGKPRVSDSHPMYEEFRMLSFLNNVKVQGPNDDEMRPLNAEELQKIDSLFYRKTKPNFDFEDIAKKIAGKGKYQWKDDKQADLPYKFNYRMSQGVPGCPTIAQLKEIFGEDWKNGIAETYLQNTKKDGTKKSLDEMVNDIWNVLFFFDSKDKVKEFGIKHLQLDEEKAEKFSKIRLSRGYASLSLKAIRNILPFLEMGMIYTDAVFFAKVPAIVGQSLWRERQSEIREDLSYAIRMAMKEKRRIDEAVKDYLQDNFDLKPGAAEMLYHPSMIETYPDAKPNKDGVVLLGSPRTNAVKNPMAMRSLHEVRKVVNTLIKEGKIGPDTEVHIEYARALNNANMRAAINEWQREHDRKHKQYADEIRRLYKEATGKDIEPTETDILKFQLWEEQDHICLYTGDKIGIADFVGAGPKFDIEHTIPQSVGGDSTQMNLTLCNNQFNRFVKKAKIPTELAEYEEIMARIEPWKERIDDLTKQIDRISTRGIWDKATKDKQIRKKNKLKIERDYWQGKYKRFTMTEVPEGFALRQGAGIGLISKYAALYLKSYFHDTLHPERRQVYSIKGTVTAEFRKMWGIQEEYEKKSRDSHTHHCIDAIVIACIGKNEFNMMGKYHRDMFDFSEGNGPKPQFEKPWPTFTQDLKQISEELLVVHDTPDNMPKKASRMIEVNGRKVVARGDCARGSLHQDTYYGAIERDGDIKYVVRKSLSAMKESDVENIVDDVVKAKVKQAIAEKGFKDAMAGDIYMNEARGILIKKVRCYTPSVTQPLDIRRHRDVSRKDYKQPYHVANDENYMMAIYEGGKMQMITALDAAKFYKRSADRNDYPTIAPEEYKGKKLKYLVRKGTQILMLEKDEESISTANPKELFKRLFTIMVLEKDGRLMLKHSSEARPATEVKKLLTYNPFMLKDDTRSILRVSLSKLNFLVEGYDFTITPLGEIKLKH

SEQ ID NO: 5962 - protein, 1213 aa, synthetic construct
  REGION 1..1213: note = Synthetic
MNKKRILGLDTGTNSLGWAVVDQEEGGQYTLIDKGVVIFQEGVKIEKGVESSKAAERTQHRALRRQYFRRRLRKIKVLEILVKYNLCPALTEEDLKLWKLRKIYPKKDEFMQWQRTNDNEDVNPYHCRYICLNEVLDLDMQQDRYTLGRAFYHMAQRRGFLSNRLDATEEDESGAVKSSIANLSKEIEEGGCKYLGEYFYKLYKEKGNTVRIRTRYTDREQHYKKEFFAICDKQHLPEEMIAELARALFFQRPLKSQRQNVGNCTFEKGKPRCSDSHPLYEEFRMLSFLNNVQIQGPWDEVYRPLNEEERQKIDSLFYRKSKPNFDFEEIAKKIAGKGKYQWKGDTQTDLPYKFNFRMSQGVPGCPTIAQLKEVFGDDWKKGIVETYMLGTKKDGTQKGIDEMVNDVWNVLFSFDSKDKVKEFGIKHLQLDEEQAEKFSNIRLSRNYASLSQKAIRNILLFLRMGMIYSDAVFFAKVPAIIGQNLWEARQSEIMEDLSYTIQMAIKEKRHIDEAVKDYLQDNFDLKPGAAELLYHPSMIETYPDAKPNKDGVVLLGSPRTNAVKNPMAMRSLHEVRKVINNLIKEGKIGPDTEVHIEYARALNNANMRAAINERQREQDKKHKQYAEEIRQRYKEKTGKDIQPTETDILKYQLWEEQGHICLYTGKKIDIIDFIGASPTYDIEHTIPRSAGGDSTQMNMTLCSSRYNREVKKTKLPTELAEHEFIMTRIEPWKQRIEELRKQIDRDKKGNESDKAARDKRIRRKNLHMEELKYWEGKYDRFTMTEVPEGFARRQGAGIGLISKYAALYLKSYFHDTLHPDRRQVFSIKGTVTSEFRKMWGIQDEYEKKSRDSHTHHCIDAIVIACIGKNEFNMMGKYHHDMYDYNEGNGPKPQFDKPWPTFTQDLKQITEELLVVHDTPDNMPKKASRVIEVNGKKVVAKGDCARGSLHQDTYYGAIERDGEIKYVVRKSLSTLKESDVENIVDDVVKEKVKQAIAEKGFKDAMAGDIYMNEAKGILIKKVRCYTPTVTQPLDIRRHRDLSRKDYKQQYHVMNDENYMMAIYQGIVRSKRKTSFVLVNALDAVSFYKESTDRNDCPAIVPKENKGLPLKWCVKKGTHLLMLEEGEENIFFSNAEELSNRLFTITKMDKNGLLTCRNSKEARLAGDLKCFLNSITFKLQDGYRPILRMSPTNFHFLVEGYDFTITPLGEIKLKL

SEQ ID NO: 5963 - protein, 1212 aa, synthetic construct
  REGION 1..1212: note = Synthetic
MKKRILGIDTGTNSLGWAVVDKNEDGTYSLINKGSLIFQEGVKIEKGIESSKAADRTSHRALRKHYFRRRLRKIEVLKVLVEFNWCPYLTPEALHQWHVKKIYPMDEAFISWQRTNDNFEENPYYYRHICLHRKLNLCERSERYILGRAIYHLAQRRGFLSNRLEQGNEEETGKVKEAISSLSKSMSDVGCDYLGDYFYKIYKEKGNTERIRTRYTDREEHYKKEFYAICEQQQLSEEIITKLEKALYFQRPLKSQRQGVGKCTFEPKKHRVADSHPAFELFRMLSFVNNIKVKGPYDVELRPLSKEEFNKMKHLFFMKSRTTKPQFDFEDIAKAIAGKGKYQHIKDAGDKEYKFNYRMTQSVTGCPTIASLISIFGEDYEAAIAEQYTLSDGKTVKQMVNDVWNVLYSFNDKDKVKLWGKEKLQMSDEDAEKFSKIKLTHSFASLSLAAVNKILPWLEQGLIYPHAVLMAKVPDIVGEEVWKTRGESITKELYTLITNFNPKDVAMQGTLDFCIKDILKDMCDLAPGTAEKLYHPSMIETYPDAKKNSQGVYQLGSPKTNAVRNPMAMRSLHQIRKVINTLLRDGTIDSQTEVHIEYARELNDANKRKAIAQWNKNRETLRKKYAEEIRKLYKEECGKEIEPTEDDIVKFQLWEEQNHLCIYTGESISITDFIGPNPSYDIEHTVPRSAGGDSTLENMTLCSSRFNREIKKAKLPTQLSNHDDILERLEEWREKIDKLRRDVDHVKTHSGMEKAVKDRRIQKRHLLKLELDYWVGKYKRFQMEEVPEGFARRQGAGIGLVGKYAGLYLKSLFHKADDRNKSNVRVIKGVTTAEYRKMWGIQEEYEKKSRDNHVHHCIDAITIACIEPGEYNATARYYQQLEEYERTKAAKPSFPKPWTSFTEDIKAIAQNMLVVHSTPDNMPKHARKYVQTSNGKKLALGDSARGSLHNDTYYGAINRDGHIKYVIRKELSSLKESDVENIVDDVVKEKVKQAIAEKGFKTAMEEDIFMNKEKGIKIKKVRCFTPSVTNPLHIRSHRDLSRKEYKRQFHVTLDGNYCMAIYEGDVNGKIRRTYEIVNMIDAAAYFKESADLTKHYPIAPESKNGLKFRCTIRTGTQIILLQSDDEKINLENKEDLVRRFYYVAVMQKDGRIVLRYNQDARDATTLKKERKSGTYKVGEQYRSEIMLSLSDFHALVEGVDFKINILGEVAML

SEQ ID NO: 5964 - protein, 1210 aa, synthetic construct
  REGION 1..1210: note = Synthetic
MKKRILGIDTGTNSLGWAVVDKNDDGEYSLIHKGSLIFQEGVKVEKGIESSKAADRTAHRSLRKQYFRRRLRKIKVLEVLVEFGWCPYLSSEALHLWHVKKTYPMDEAFMSWQRTNDNFEENPYYYRHLCLHRYLDLNEQSNRYILGRAMYHLAQRRGFLSNRLDQGNEDETGKVKEGISSLSKSMEEAGCEYLGDFFYKIYKEKGNTERIRTRYTDREEHYKKEFYAICKQQRLSEEQISKLEKALYFQRPLKSQRQGVGKCTFEPKKSRVADSHPSFELFRMLSFVNNIKVKGPHDVELRPLTTEEFEMAKPAFFRKSKPQFDFEDIAKAIAGKGKYQYIKEIGEKPYKFNYRMSQSVTGCPTIANLMSLFGDDYEEGIAERYTLSEGKTPKQMLNDVWNVLYSFSDKDKVKQWGKEKLQLSDEEAEKFSKIRLTHAFASLSLAAINKILPWLEQGLIYPHAVLMAKVPDIVGEEVWKSRSEAITKELLSLISNFNPKDIGMTGTLDFCIKDILKDMCDLAPGAVEKLYHPSMIEAYPDAKKNSQGIYQLGSPRTNAIRNPMAMRSLHQLRKVINTLLQEGTIDNQTEVHIEYARELNDANKRKAIAQWNKDRENKRKKYAEDIRSLYKQESGKAIEPTEDDIVKFQLWEEQNHICLYTGESIGITDFIGPNPSYDIEHTVPRSVGGDSTLENMTLCSSKFNRDVKKAKLPTELPNHDDILGRLEGWREKIEKLRKDADHVKTYSSMDKATKDRLIQKRHLIRLELDYWVGKYKRFQMEEVPEGFARRQGAGIGLVGKYAGLYLKSLFHKADDRSKSNVRVVKGATTAEYRKMWGIQDEYVKKSRDNHVHHCIDAITIACIEPSEYNATARYYQQLEEYERNNAPKPSFPKPWPTFTEDIKAIAQEMLVVHSTPDNMPKRARKYVQTSNGRKLAMGDSARGSLHNDTYYGAIERDGEIKYVVRKTLSSLKETDIENIVDDAVKERVKNAVAEKGFKEAMAGDIFMNEMKGIKIKKVRCFTPAVTNPLHIRTHRDESRKEYKRQYHVTLDGNYCMAIYEGEVKGKLKRTYEIVNMMDAAAYYKKSAGMTSLYPIAPENKNGLRFRCVVRTGTQIILLQSDNEEINLTDKEDLAKRFYFVAVMRSDGRLVLRYNQDARDATTLKKERKSGAYKTGEQYRSEIMLSLSDFHALIEGVDFKINVLGEIVMFK

SEQ ID NO: 5965 - protein, 1210 aa, synthetic construct
  REGION 1..1210: note = Synthetic
MEKRILGIDTGTNSLGWAVVDKLEDGTYSLVSKGSLIFQEGVKVEKGIESSKAADRTTHRALRKQYFRRRLRKIEVLKVLIEFGWCPYLSPEALHQWHVKKVYPMDEAFISWQRTNDNFDENPYYYRHRCLHEQLDLSDTADRYVLGRAMYHLAQRRGFLSNRLEQGDDDETGKVKEGITSLTKSMADAGCEYLGDYFYKIYKEKGNTERIRTRYTDREEHYKKEFYAICRQQNLSEVEVSKLEKALYFQRPLKSQRQGVGKCTFEPKKARVADSHPAFELFRMLSFVNNIKVKGPRDVELRPLTTEEYEKAKPMFFRKSKPQFDFEDIAKAIAGKGKYQHIKEIGDKPYKFNYRMTQGVTGCPTIASLMSVFGDDYETAIAERYTLSDGKSPKQMVNDVWNVLYSFSDKDKLKLWGMEKLQLSEEEAEKFSKIKLTHAFASLSLAAVNKILPWLEQGLIYPHAVLMAKVPDIVGEGVWKSRGESITQELLSLISNFNPKDVTMTGTLDFCIKDILKDICDLAPGAAERLYHPSMIDTYPDARKNAQGFYQLGSPRTNAIRNPMAMRSLHQLRKVINALLREGTIDSQTEVHIEYARELNDANKRKAIAQWNKDRETKRKKYAEDIRTLYRQECGKDIAPTDDDIVKFQLWEEQNHICLYTGESIGITEFIGPNPSYDIEHTVPRSAGGDSTLENMTLCSSKFNREVKKAKLPTQLADYEAIMDRLEGWREKIGKLRKDVDHVKTHSGMDKALKDRLIQKRHQLKLELDYWVGKYRRFQMEEVPEGFARRQGAGIGLVGKYAGLYLKSLFHKPDDRNKSNVRVVKGATTAEYRKMWGIQDEYEKKSRDNHVHHCIDAITIACIEPGEYNATARYYQQLEEYERAEAAKPSFPKPWATFTEDIKAIAQEILVVHSTPDNMPKHARKYVQTANGRKLAKGDSARGSLHNDTYYGAIERDGEIRYVVRKALGSLKENDVDNIVDDAVSERVKQVVAAKGFKEAMAGDIFMNEAKGIKIKKVRCYTPTVTNPLHIRAHRDESQKEYKRQFHVTLDGNYCMAIYEGEVKGKMKRTYEVVNMIDAANYFKESAGLTTQYPIAPENKNGLKLKCTVRTGTQIILLQSDNEEINLNDKEDLARRFYYVAVMMGDGRIVLRYSQEARDAKTINKECRAGAYKKGEMYRASIRMSLSDFHALVEGVDFKINVLGEIVLLK

SEQ ID NO: 5966 - protein, 1210 aa, synthetic construct
  REGION 1..1210: note = Synthetic
MKKRILGIDTGTNSLGWAVVDKNDDGSYTLINKGSLIFQEGVKVEKGIESSKAADRTSHRALRKQYFRRRLRKIEVLKVLIELDWCPYLSPEALHQWHVMKKYPMDDAFISWQRTNDNFEENPYYYRHLCLHEKLDLKEKADRYVLGRAMYHLAQRRGFLSNRLEQGDDDETGKVKEAISSLSKRMSDAGCEFLGDYFYKIYKEKGNTERIRTHYTDREGHYKKEFYAICKRQDLTENQINVLERALYFQRPLKSQRQGVGKCTFEPKKPRVADSHPAFELFRMLSFVNNIKIKGPYDVELRPLSAEEYEKAKPMFFRKSKPQFDFEDIAKAIAGKGKYQHIKEDGDKEYKFNYRMSQSVTGCPTIASLMSVFGDDYATAIAERYTLSNGKSVKQMVNDVWNVLYSFSDKDKVKQWGKDKLQLSDDESDKFSKIRLTHSFASLSLAAVNKILPWLEGGLIYPHAVLMAKVPDIVGEDVWKSRGEAITNELLSLIANFNPKDVTLTGTLDFCIKDLLKDLCDIMPGAIEKLYHPSMIETYPDAKKNSQGVYQLGSPRTNAVRNPMAMRSLHQLRKVINTLLCEGTIDNQTEVHIEYARELNDANKRKAIAQWNKTRETLHKKYADDIRALYKKDCGKDIEPTEIDIVKFQLWEEQKHICIYTGNSIGITEFIGPNPSYDIEHTIPRSVGGDSTLENMTLCSSKFNREVKIAKLPTQLSNHKAIMERLEEWRKKIDKLRKDLDRVKTHSGMDKDVKDRQIQKRHLLKIELDYWLGKYKRFQMEEVPEGFARRQGVGIGLVGKYAGLYLRSLFHKTDDRTKSNVRVVKGATTAEYRKMWGIQDEYEKKSRDNHVHHCIDAITIACIEPGEYNETARYYQQLEEYERTKAAKPSFPKPWTTFTEDIKAIAQEMLVVHSTPDNMPKYARKYVRTSNGKKLAKGDSARGSLHNDSYYGAIERDGEIKYVIRKSLSSIKENDIENIVDVTVKEIIKQAIAEKGFKEAMAGDIFMNKEKGIKIKKVRCFTPSVTNPLHIRKQRDVSRKEYKRQFHVTLDGNYCMAIYEGEVKGKMKRTYEIINMIDAAAYFKKSAGLTKLYPIAPESKNGLKFRCTVRTGTQIILLQSDNEEINLANKEDIARRFYFVAIMQKDGRIVLRYNQDARDATTLKKERKSGAYKVGEQYRSEIMLSLSDFHALVEGVDFKINVLGDIIMLK

SEQ ID NO: 5967 - protein, 1210 aa, synthetic construct
  REGION 1..1210: note = Synthetic
MKKRILGIDTGTNSLGWAVVDKMENGNFSLINKGSLIFQEGVKVEKGIESSKAADRTSHRALRKQYFRRRLRKIEVLKVLVDFDWCPYLSDEALHLWHVKKEYPMDEAFISWQRTNDNFDENPYYYRHICLHEQLNLDKKADRYVLGRAMYHLAQRRGFLSNRLEQSNDEEAGKVKEGISSLSKSMSDAGCDYLGDYFYKIYKEKGNTERIRTRYTDREEHYKKEFYAICKQQNLSEKQISTLEKALYFQRPLKSQRQGVGKCTFEPKKARVADSHPAFELFRMLSFVNNIKVKGPYDIELRPLTTEEFEKAKPMFLRKSKPQFDFEDIAKAVAGKGKYQHVKEAGDKPYKFNYRMTQSVTGCPTIANLISVFGEDYDTAIAERYILSDGKSPEQMVNDVWNVLYSFQDKEKVKQWGMEKLQLSDEESEKFSKIKLTHNFASLSLAAIKKILPWLEQGLIYPHAVLMAKVPDIVGEDVWKSRGESITRELLSFISNFNPKDVTMTGTLDFCIKDILKDICDLEPGATEKLYHPSMIDTYPDAKKNSQGIYQLGSPRTNAIRNPMAMRSLHQLRKVVNALLLNGTIDSQTEVHIEYARELNDANKRKAISQWNKERENLRKKYAEDIRTLYKQECGKDIVPTDDDIVKFQLWKEQNHICLYTGNSIGITDFVGPNPKYDIEHTIPRSVGGDSTLENMTLCSNKFNRDVKKAKLPTQLSNHDEIMLRLEEWRNKIDRLRKDVDRVKTYSSMEKAVKDRLIQKRHLLKLELDYWVGKYKRFQMEDVPDGFARRQGAGIGLVGKYAGLYLKSLFHKADDRTKSNVRVVKGATTAEYRKMWGIQDEYEKKSRDNHVHHCIDAITIACIETGEYNATASYYQQLEEYERTKKNKPSFPKPWPTFTEDIKAIAQEMLVVHSTPDNMPKHARKYVQTANGRKLAKGDSARGSLHNDTYYGAIERDGVIKYVVRKELGSLKESDVDNIVDEAVKEKVKQAIAEKGFKEAMAGVIFMNEEKGIRIKKVRCFTPSVTNPLHIRAHRDKSRKEYKCQFHVTLDGNYCMAIYEGEVKGKMKRTYEIVNMIDAAAYFKESAGLTKLYPIAPESKNGLKFRCTVRTGTQILLLQSDDEEIDFANKDDMARRFYFVAVMRSDGRIVLRYNQDARDATTLKKERKSGAYKVNEKYRSEIMLSLSDFHALVEGVDFKINVLGEIVLLK

SEQ ID NO: 5968 - protein, 1209 aa, synthetic construct
  REGION 1..1209: note = Synthetic
MKKRILGIDTGTNSLGWAVVDKNEDGSYSLIRKGSLIFQEGVKIEKGIESSKAADRTSHRALRKQYFRRRLRKIEVLKVLVELGWCPYLSPEALHQWHVKKTYPMDEAFISWQRTNDNFEENPYYYRHLCLHEKLDFSKEAGRYILGRAMYHLAQRRGFLSNRLDQGNDDETGKVKEAISSLSKSMADAGCEYLGDYFYKIYKEKGNTERIRTHYTDREEHYKKEFYAICHQQNLSDEQIETLEKALYFQRPLKSQRQSVGKCTFEPKKPRVSDSHPAFEMFRMLHFVNNIKIKGPHDVELRPLSQEEYEKAKPMFFRKTKPQFDFEDIAKAIAGKGKYQYIKDAGDKAYKFNYRMTHGVTGCPTIASLMSVFGDDYVSAIAERYTLSADKTPSQMVNDVWNVLYSFSDKEKVRQWGKEKLQLDDEEAEKFSKIKLTHSFASLSLSAVNKILPWLEQGLIYSHAVLMAKVPDIVGENVWKNRGESITKELLSLIASFNPKDTTMQGTLDFCIKDILKDMCELVPGAAEKLYHPSMIETYPDAKKNDQGVYQLGSPRTNAVRNPMAMRSLHQLRKVINTLLREGTIDSQTEVHIEYARELNDANKRKAIAQWNKDRENQRKKYAEDIRKLYKQECKKDINPTDDDIIKFQLWEEQNHICLYTGDSIGICEFIGPNPSYDIEHTIPRSVGGDSTLENMTLCSSKFNRKVKKAKLPTQLSNYEEIMSRLDEWRKKIDKLRKDADHVKTHSGMDKAIKDRQIQKRHLLKLELDYWVGKYKRFQMEEVPEGFARRQGAGIGLVGKYAGLYLKSLFHKADDRSKSNVRVVKGATTAEYRKMWGIQDEYEKKSRDNHVHHCIDAITIACIEPGEYNATARYYQQLEEYERTNVNKPSFPKPWSTFTEDIKAIAQEMLVVHSTPDNMPKHARKYVQTSNGKKLALGDSARGSLHNDTYYGAIERDGQIKYVIRKELSSIKETDIENIVDDVVKEKVKQAIAEKGFKKAMEEDIFMNEKKGIKIKKVRCYTPSVTNPLHIRTHRDKSQKEYKRQFHVTLDGNYCMAIYEGEIKGKMKRTYEVVNMIDAASYFKKSADLTKCYPIAPENKNGLNFRCIVRTGTQIILLQSDDEQINLTNREDVARRFYFVAVMRSDGRIVLRYNQDARDATTLKKERKSGAYKVGESYRSEIMLSLSDFHALVEGVDFKINVLGEIEML

SEQ ID NO: 5969 - protein, 1210 aa, synthetic construct
  REGION 1..1210: note = Synthetic
MKKRILGIDTGTNSLGWAVVDKNDNGTYSLIRKGSLIFQEGVKVEKGVESSKAADRTAHRALRKQYFRRRLRKIEVLKVLVEFDWCPYLSPEELHLWHTKKAYPMDEAFISWQRTNDNFEENPYYYRHLCLHKQLDLSNKADRYMLGRAMYHLAQRRGFVSNRLEQGDDDETGKVRDAISSLTKSMSEAGCDYLGDYFYKIYKEKGNTERIRTHYTDREEHYKKEFYAICKQQNLSEEQISVLEKALYFQRPLKSQRHSVGKCTFEPKKPRVADSHPAFELFRMLSFVNNIKIKGPYDVELRPLSVEEFEKARPMFYRKSKTQFDFEDIAKAIAGKGKYQYIKEESAKEYKFNYRMTQSVTGCPTIANLMSVFGDDYSTAIAERYTLSDGKTPEQMVNDVWNVLYSFSDKNKVKQWGKEKLQLSDEEAEKFSKIKLTHSFASLSLSAVNKILPWLEQGLIYSHAVLMAKVPDLVGKEVWEKRGELITKELLSFIANFNPKDDTMQGTLDFCIKDILKDLCDLESGATEKLYHPSMIEAYPDAKKNAQGVYQLGSPKTNAVRNPMAMRSLHQLRKVINTLLRDGTIDSQTEVHIEYARELNDANKRKAIAQWNKNRETQRKKYVDDIRTLYKQECGKEIEPTDDDIVKFQLWEEQNHICFYTGESIGITEFVGPNPSYDIEHTVPRSVGGDSTLENMTLCSSKFNREVKKAKLPTQLTNHDDIMQRLEEWREKIEKLRKDVDHVKTHSGMDKAVKDRLIQKRHLLKLELEYWIGKYKRFQMEEVPEGFARRQGTGIGLVGKYAGLYLKSLFHKADDRTKSNVRVGKGATTAEYRKMWGIQDEYEKKSRDNHVHHCIDAITIACIEPGEYNATARYYQQLEEYERTKANKPTFPKPWPTFTEDIKAIAQEMLVVHSTPDNMPKRARKYVQTSKGKKLAMGDSARGSLHNDTYYGAIERDGEIKYVVRKELSSLKESDVENIVDEAVKEKIKQAIADKGFKEAMVGDIFMNEEKGIKIKKVRCFTPTVTNPLHIRTQRDLSKKEYKRQFHVTLDGNYCMAIYEGEVKGKMKRTYEIVNMIDAAAYFKKSADLTKLYPIAPESKNGLKFRCTVQTGTQIILLQSDDEEINLADKKDLSRRFYYVAVMRSDGRIVLRYNQDARDATTLKKERKSGAYKVGEQYRSEIMLSLSDFHALVEGVDFKINVLGEIVMLK

SEQ ID NO: 5970 - protein, 1213 aa, synthetic construct
  REGION 1..1213: note = Synthetic
MNEKRILGLDTGTNSLGWAVVDQDESGQYTLIDKGVVIFQEGVKIEKGVESSKASERTEHRALRRQYFRRRLRKIKVLETLLKFNLCPALTKEDLSLWKLRKIYPKKDEFMVWQRTNDNEDVNPYHCRYICLNEVLNLDRQQDRYTLGRAFYHMAQRRGFLSNRLDATEEEENGAVKSDIANLNKEIEESGCKYLGEYFYKLYKEKGNTVRIRTRYTDREQHYKKEFFAICEKQHLPEEMIAELTRALFFQRPLKSQRQNVGNCTFEKGKPRCSDSHPMYEEFRMLSFLNNIQIQGPWDEVYRPLNEEERQRVDSLFYRKSKPNFDFEEIAKKIAGKGKYQWKGDTQTDLPYKFNYRMSQGVPGCPTIAQMKEVFGENWKESIAETYMLGTKKDGTQKGIGEMVNDVWNVLFSFDSKDKVREFGANHLQLDEEHAEKFSKIRLSRNYASLSLKAIRNILPFLRMGMIYSDAVFFAKVPAIIGRNQWEARQSEIMEDLAYTIQMAIKEKRHIDEAVKDYLQDNFDLKPGAAEMLYHPSMIETYPDAKPNKDGVVLLGSPRTNAVKNPMAMRSLHEVRKVINNLIKEGKIGPDTEVHIEYARALNNANMRAAINELQREQDKKHKQYAEEIRQLYKDETGKDIEPTETDILKYQLWEEQGHICLYTGDKIGIADFIGDGPTYDIEHTIPRSAGGDSTQMNMTLCSSHYNRFTKKTKLPTELAEHESIMPRIEPWKEHIEDLTKQIDRISTRGIWDKATKDARIRKRNRLRMERDYWQGKYERFTMTEVPEGFARRQGAGIGLISKYAALYLKSYFHDTNNPNRRQVFSIKGTVTSEFRKMWGIQDEYEKKSRDSHTHHCIDAIVIACIGKNEFNMMGRYYHAKEENERGEGQRPEFEKPWPTFTQDLKQITEELLVVHHTPDNMPKKASKVIEVNGKKVVARGDCARGSLHQDTYYGAIEKDGEIKYVVRKSLSSLKESDVENIVDDVVKEKVKQAIAEKGFKDAMAGDIYMNEAKGILIKKVRCYAPTVTQPLDIRHHRDVSTKEYKQQFHVMNDENYMMAIYQGIVKGKRKTSFVLVNALDAVSFYKESTDRNDYLSIVPEENKGVPLKWCVKKGTHLLMLEEGEESVSFSNAEELSNRLFTITKMDKVGRLTCRNSKEARTAGDLKSIVNANPFRLQDGYRPILCMSPINFHFLVEGYDFTITPLGEIKLIH

SEQ ID NO: 5971 - protein, 1210 aa, synthetic construct
  REGION 1..1210: note = Synthetic
MKKRILGIDTGTNSLGWAVVDKQEDGKYSLVRKGSLIFQEGVKVEKGIESSKAADRTAHRALRKQYFRRRLRKIEVLKVLIEFGWCPYLSPEALHQWHVKKEYPMDEAFISWQRTNDNYDDNPYYYRHRCLHEQLDLNERADRYVLGRAMYHLAQRRGFLSNRLEQGDDNETGKVKEAISSLSKSMADAGCEYLGDFFYKLYKEKGNTERIRTRYTDREEHYKKEFYAICERQNLSEEQISKLEKALYFQRPLKSQRQGVGKCTFEPKKARVADSHPAFELFRMLSFVNNIKIKGPHDVELRPLSQEEFEKAKPMFLRKSKPQFDFEDIAKAIAGKGNYQHIKDIGDKAYKFNYRMTQSVTGCPTIACFISVFGDDYENAIAERYTLSDGKTSEQMVYDVWNVLYSFDNKEKLKQWGKERLQMDDDEAEKFSKIKLTHSFASLSLAAVKKILPWLEQGLIYPHAVLMANVPDIVGEEVWKSRGEAITNELLSLITNFNPKDVTMTGTLDFCIKDILKDMCSLNPGAAEKLYHPSMIDTYPDAKKNSQGVYQLGSPRTNAVRNPMAMRSLHQLRKVINTLLREGIIDSDTEVHIEYARELNDANKRKAIAQWNKERETRRKKYTEDIRTLYKQECGKDIVPTNDDIIKFQLWEEQDHICLYTGDSIGITEFVGPNPSYDIEHTVPRSVGGDSTLENMTLCSSKFNRDVKKAKLPTQLSNHAAIMERLEEWRKKIEKLRKDVDHVKTHSGMDKAVKDRLIQKRHLLKLELEYWVGKYKRFQMEEVPEGFARRQGAGIGLVGKYAGLYLKSLFHKADDRNKSNVRVIKGATTAEYRKMWGIQDEYEKKSRDNHVHHCIDAITIACIEPGEYNATARYYQQLEEYERTKATKPSFPKPWPTFTEDIKAIAQEMLVVHSTPDNMPKHARKYVQTSNGRKLAMGDSARGSLHNDTYYGAIERDGEIKYVVRKLLGSLKESDVENIVDDAVKEKVKQAIAEKGFKKAMEEDIFMNREKGIKIKKVRCFTPTVTNPLHIRSHRDESRKEYKRQFHVTLDGNYCMAIYEGEVKGKMKRTYEIVNMIDAAAYYKKSADLTKQYPIAPENKNGLKYRCSVRTGTQIILLQSDNEEINLADKEDLARRFYFVAVMRSDGRIVLRYNQDARDATTLKKERKSGAYKVGEEYRSEIMLSLSDFHALVEGVDFKINVLGEIVMLK

SEQ ID NO: 5972 - protein, 1008 aa, synthetic construct
  REGION 1..1008: note = Synthetic
MKKRILGLDTGTNSLGWAVVDCDEYSNYELVKYGDLIFQEGVKIEKGIESSKASERTGHRSLRKQYFRRRLRKIEVLKVLVKHGLCPYLSEEQLHNWHVRKVYPKTDDFMLWQRTNDNEDKNPYYYRHLSLHTKFNLDRQDERFMLGRALYHLAQRRGFLSNRLDSTPENDNGKVHTGISNLSHEMELAGCEYLGDYFYQIYSAPDNHERIRTRYTDREEHYKKEFQAICEMQQLSPEMVRELEKALYFQRQLKSQRQGVGKCTFEPRCPRCADSHPDFEEFRMLCLLNSIKIQTPYDLELRPLNEEEKEKIVSLFYRTSKSNFDFEDIAKALAGKGKYKYYKDEGDKPYKFNYRMTQGVAACATTGKLRKIFGENWKEAIAETYRLNNTRKGQKTVAQMVDDVWNVLSTFESEDKLKHWAQLNLQLDEDQSKRFAAINLSHGFASLSLKAIHKILPFLRQGYIYSHAVILANIPAIVGEEVWNDADKRSFILNHVLTYLQSEDQTTKDFCIKDFLLNNYNLKPGAADKLYHPSMIETYQDAKQQGDVYQLGSPRTNAIRNPMAMRSLHEVRKVVNQLLKEKIIDQNTEVHVEYARGLNDANMRKAIADYQRAQDKKHKTDADSIKDLYFRETGNNIEPTETDIKKFELWEEQSHKCLYTGAEIGIADFLGDNPKYDIEHTIPRSAGGDSMMENLTLCDSNFNRNVKKTQLPAQLANYEEILTRIEGWKKRYETLTSQMDKCRTFSGMAKDIKDSVIQKRHKLKMERDYWKGKYERFTMTEVPDGFSRRQGAGIGLVSKYAGLYLKSLFHDPHDRSKSRVFTVKGTTTAEFRRMWGLQNEYEKKSRDNHCHHCIDAITIACIGKQQYEAVAKFYRDEALYDDGRGKKPQFRKPWSTFTEDVLNLEKSMIIVHDTPNNMPKKARKYVRTANGKFLAKGDCARGSLHKETYYGAIERDGKIEYVVRKALASFEKETELDNIVDDTVREIVREAVRGKTFKEAIAQPIYMN

SEQ ID NO: 5973 - protein, 1222 aa, synthetic construct
  REGION 1..1222: note = Synthetic
MKKRILGLDSGTNSLGWAVVDRDENNQYSLIKYGDLIFEEGVKIEKGVESSKAAERTSHRALRKLYFRRRLRKIEVLKVLVKYNLCPQVSEEELHLWHTRKLYPQNKDLLQWQRTDEKAGKNPYIYRYRCLHEELDMSVSANRMTVGRAMYHLAQRRGFLSNRLDNEEDENQIGAVKCGISNLTEEIQSSGCKYLGEYFYKLYNEHGNTVRLRTRYTSREFHYKKEFYAICEKQKLDKKLIEELASALYFQRPLKSQRHTVGRCTFEPNKPRCADSHPAYEEFRMLSFINTIKVQGPYDTELRVLNTEERDSITKLFCRKSKPNFDFEDIAKELAGRNNYCYIGDVVDKAYKFNYRMSQGVSGCPTTTYLINVFGQDWQTGIAESYQAIDTKLGQKSVDAMIDDVWNVLYSFSSKDKLRDFGRKKLQLGDKEADTFANIKLTHKFASLSLKAIRKINIFLRMGLVYSHAVTLANIPTIVGTDIWQRKRNFILAELLPLIENFNPKETKLQETLDFCVKDFLQNNFELKNGAVDKLYHPSMIEAYPDAGLNSNGILQLGSPRTNAIRNPMAMRSLHEIRKVINQLLKDKIINQDTEIHVEYARELNDANKRKAISIWQKSQEKLHKKYVEEITNLYKEETGKAIVPTDTDILKFKLWEEQNHICLYTGQQIGIAEFLGATPKYDIEHTIPQSVGGDSTDMNLTLCDSRFNREIKKAQLPTQLGNHADILVRIAGWKNSYEKLSKDIDRIRTHSGMAKDIKDRLIQKRHLLKLERDYWRGKYERFTMNEIPEGFSRRQGVGIGLISKYAGLYLKSLFHDKNERNKGHVFVVKGTTTAEFRKMWGLQNEYEKKSRNNHVHHCIDAITIACIGKHEYAQMAQYYHDEAEYLYHHGIKPIFPKPWKTFTEDLLDLEHSLFVVHHSPNNMAKQARKRIITSTGQHWAQGDSAHGSLHNDTYYGAIERDGEIKYVVRRAVSSFEQMSDVDSIVDDVVKETVRKALEGKNFKEAVNAPIYMNKEKGVLIKKVRCYAKSIKKPIDIRTHRDSSSKEYKRKFHVSNDINYLIAIYEGTVKGKVKRDFEVVKNIEAANFFKRSQDRRDYPTIVPEKSIKHGFPLKTTLTNGTMVILYEENKEEIDFTKKEDICRRLYKLVGMSSMIVSGCEYGVLSLRHHQEARPSKDIKSKNGAFKNGEALRPAITMLHTQFNALVENIDFNIDVTGNIELI

SEQ ID NO: 5974 - protein, 1232 aa, synthetic construct
  REGION 1..1232: note = Synthetic
MTKTRILGLDTGTNSLGWAIVDRDELSGQYELIYRGDLIFTEGVKVEKGIESSKAADRTEHRSLRKQYFRRRLRKIEVLRVLSSYHLCPPVSEAELHQWHVKKIYPVENEEFMLWQRTNDNEGKNPYYYRHICLHTKLDLTLMKDRYILGRALYHLSQRRGFLSNRLDQGSDEDAKGAVKTGISSLSKDMSDAGCLYLGDYFYKLYSEEGNRVRIRNHYTARNEHYLVEFEAICKMQQLEPQLVEALRRAIFFQRPLKSQRKGVGKCTFEPRKPRCADSHPDYEEFRKRCFVNNIKIQTPDDDAMRPLNEEERQRIDSLFYRVSKANFDFEEIARLLGGKNNYCYYKDEVQKDFKFNYRMSQGVSGCPTIAQLRNVFGKDWKTGIAETYQHSVKKDGTLKTADEMADDIWNVLYSFSSKDCLYNFAINQLQLDANKAEKFSKIKLSHGFASISLNAIHKIQPFLCKGMIYSHAVLFANIPSIVGQDIWSDETQRQHIMKELEDLVLNYDPRNRGVEGTIEMCIKDFLQNNYDLPAGAVDRLYHPSMIEAYPDAKTNKDGVLQLGSPATNAIRNPMAMRSLHELRHVVNRLLREGKIDQNTEVHVEYARELNDANKRKAIGDWQRKQDKLHKKYRDDIIALYKEETGKDINPTPTDILKFQLWEEQEHICLYTGRQIGISKFLGPDPEFDIEHTVPRSVGGDSTQMNMTLCERRFNREVKKAMLPSQLSNYQEILSRIEKWKKKYEQLTKDIDHCITYSGMSKEVKDPIIQKRHRLTLERDYWRNKYERFTMTEVPEGFSRRQGAGIGLVSKYAGLFLKSLFHDPADRRRSHVYVVKGATTAEFRKMWGLQSEYEKKSRENHAHHCIDAITIACIGRNEYNKMASFYHDEEAFERGEGSKPHFDKPWPSFTQDVLELEKSLIVVHSTPDNMPKRAKKYVRMPRGKFIAKGDCARGSLHLSTYYGAIKHKDDAQPRYVLRRELASFESVKDIDTIVDDVVRDKVKEAVEGKTGKAFKEALADVYMNKEKGIRIKKVRCYVPSIKRPIDIRQQRDQSRFDYKRQFHVANDGNYMMAIYEGVVKGKPKREFELVKNIEAANYFKASQDKESFSSIIPEKSTKGFPLRATLKIGTHVLLYENSASEVDFTDPVDLARRLYKVVGLSSKVVNGYNYGDITLRFHQEARQAKDINSTRGLFKNADEYRGMINLYHTQLKALVEGYDFDINILGEITSKQ

SEQ ID NO: 5975 - protein, 1245 aa, synthetic construct
  REGION 1..1245: note = Synthetic
MYFFWKYQIKVVLLHKISIIMKKRILGLDTGTNSLGWAVVDKLDDNSYQLVRRGVLLFQEGVKIEKGIESSKASERTAHRSLRKQYFRRRLRKIRVLEVLVKNNLCPYLSPESLHEWHVHKKYPKVDEFMLWQRTNDNEGKNPYYYRHLCLTEKLDMDCIDDRYVLGRAMYHLAQRRGFLSNRLDSSQDDKESGAVKTGITELSKEMEAAGYEYLGEYFYHLYAEQGNTVRIRTRYTDREQHYLKEFDAICEKQEIGSELKKELEKALYFQRPLKSQRHGVGKCTFEPHKPRCAESHPAYEEFRMLSFLNNIKVKGPYDVDLRPLSSEEKEKIEPLFYRKALVKSSHFDFEDIAKTIAGRNKYSHIKDADDKPYKFNFRMTQGVAGCPFTAQMRGIFGDDWKSAIAESYTLMQKQDGIKTIDEAVNDIWNVLYSFSSEEKLKEFAIDKLQLDEEKAEKFSKVKMNSGFAAISLNAINKILPFLREGYIYSHAVSLANIPAIVSKAVWNNAEQRSFILQNLNRLIENFDPKDKTLQGTLDFCIKDFLMNNFELAAGAADKLYHPSMIETYQDAKPNKQGVYQLGSPRVSAIRNPMAMRSLHELRKVVNQLLKEGVIDNTTEVHVEYARELNDANKRKAIADYQRALDNNRKKYQEEILQFYQEQGSAQQPTDDDILKFQLWEEQDHVCLYTGDQIGMADFLGKNPLYDIEHTVPRSVGGDSTKENLTLCQRRFNRETKKGQLPSQLANHEEILVRLAGWKEKVEKLSKDIDKIHTFSGMAKDMKDRLIKRRHRLIMERDYWRGKYNRFTMTEVPEGFSRRQGAGIGLVSKYAGLYLKSLFHNPKDRNKSNVFVVKGATTAEFRKMWGLQSDYEKKSRDNHVHHCIDAITIACIGKYDSNLMSRYYHDVEAFEAGVGKKPQFPKPWPTFTEDVLNIQNELLVVGDMPDNMPKKARRRIRLENPARVVVAQGDSARGSLHNDTYYGAIERDGDIRYVVRRPLSSFEKASDLESIVDEAVKQTIKDAVAGRNFKEAIAEGIWMNKQKGIRINKVRCYADSVKNPLKIRQQRDVSKKEYKQQFNVMNDSNYLMAIYEGEEKGRKKFAVEVINMLDAAKYYKKSANRDVYSSIVPIDKNGFPLKVCLRVGLHVLLYGESVEEIDFGNKRDLKSRLYKIVGLNAPSESFPYGRIILRHHQEARQAKDIKSKNGVFKMGEDYRASIALLHTQFKGLVEGQDFDINVLGEIILK

SEQ ID NO: 5976 - protein, 1223 aa, synthetic construct
  REGION 1..1223: note = Synthetic
MKRILGIDTGTNSLGWAVVERNDNNTYRLIRKGSLIFQEGVKIEKGIESSKAADRTSHRALRKHYFRRRLRKIEVLRVLVKFGWCPKLTDEQLHLWHTKKQYPNSEAFMAWQRTNENLEQNPYYYRHVCLHDKLDLNNEAEAYILGRALYHLAQRRGFLSNRLDASEEDENGTVKTEINKLSQEIEDAGCQYLGDYFYKLYSENGNNVRIRNRYTDREAHYKKEFYAICKTQELSEQQIKALEKALYFQRPLKSQRQGVGKCTFEKGRQRCADSHPAYELFRMLTFLNNVKVKGPHDIEFRPLNNDEYEKALPMFYRKSKANFDFEDIAKAIAGKGNYQYFKDEGEKPYKFNYRMSQGVSGCPTTSRLREIFGEDYAQGIAEVYSKGAGKAPEQMVNDVWNVLYSFSDNNKLMQWGIENLQLNKEQAEKFSKIKLTHNFASLSLCAISKIIPWLEQGLSYSHAVSMAKIPDIVGKAIWEEHKDSITKELIDLITNFDPKDESMQGTLDYCIKDYLKNNFELKAGATDKLYHPSMIETYPDAKPNANGIYQLGSPRTNAVRNPMAMRSLHQLRKVINELLKEGTIDQNTEVHIEYARQLNDANKRWAIGDWNKSQEKKKKEASDEIKKLYKEATGKDIEPTQDDITKYLLWEEQKHLCIYTNESIGITDFIGSNPSFDIEHTIPRSMGGESVMSNLTLCASWYNRDVKKAKMPSQLNKKDYEAILERISHWKEDIERLRKEKDKLRTHSGMAKDVKDRLIRKRHLKDIELKYWQDKYNCFLLKEAPEGFARRQGAGIGLVGKYAGLYLKTIFHKKDDRTKTNVRTIKGSTTAEFRKMWGIQDEFEKKSRDNHIHHCIDAIVIACIDTGSYNEVARYYQQLEEYERTKDNKPSFPKPWSTFTEDILALKDEMLVVHSTQDNMPKHAKKRIRIAGKKLIAKGDAARGALHNDTYYGAIERDGEIKYVVRRALSSFEKESDLENIVDDAVKDIIKKAVAEKGFKKALSEDIFMNESKGIKIKKVRCYVSGSVSGKLIPIRKHRDNSKYEYKSPYYAENGDNYIMAIYEGMKGKKKHREYEIANMIYSSKYFNERNELPILPEKSVKGIPDLPIKYVLRKGLHVILYENSKEEIDIDNKTDLTPRLYIVTGLSTSSVTTGGKTYKYGMVSLRHAQEARPSNECNERKGVYKNGEEYRAKAVMNHNQFNALVEGEDFIITPLGDIKPIH

SEQ ID NO: 5977 - protein, 1227 aa, synthetic construct
  REGION 1..1227: note = Synthetic
MSKKRILGIDTGTNSLGWAVVDRNDDGSYSLIKKGVLLFQEGVKIEKGIESSKAAERTSHRALRRQYFRRRLRKIEVLRTLIKYNLCPALSEEDLKLWHTRKIYPKKDDFMLWQRTDEDKDKNPYHDRYICLTEKLDFTKEADRFTFGRAMYHLAQRRGFKSNRLDESEDKESGAVKEGIADLSSEMKAAGCEYLGEYFYKLYKDNAGKVRIRTRYIDREEHYIKEFKAICEKQKLSEEMQHDLYRALYFQRPLKSQRQSVGKCTQEKKKPRCPISHPLFEEFRKLGFINNVRILTPYDKDFRPLNEGERAKIDYLFYRKSKPDFDFDDIAKAIAGKNKYKSKGEPGDKPYVFTHRMSQNVSGCPTAAQLRGILGDDWMTALAETYSHNTKKDGTPKTLDEMVNDIWNVLFFFDSKEKLAEFAKEQLQMNDEDAKKFSEIKLKRDYGSLSIKAIRNILPFLRMGLIVPHATFMANIPNIVGAQVWNDETQREHILSEVQRILSTPRDEIKNMEGTFEYCIKQLLMQDYGVTDDAVEKLYHPSMIEAYPDARPNKDGVILLGSPMTNAVRNPMAMRSLHEVRKVVNNLILEGVVSPSTEVHIEYSRQLNDANKRKAINDMQRAREKKAQADAEEIRRLYKENTGKDIEPTPTDILKYQLWIEQNRTCLYTGESIGIHQFLGEGPLYDIEHTIPQSVGGESIRENLTLCNSHFNRYVKKAKIPSQLDCHLDILERIKPWKERYEYITSQIDKLKKGGRRADKSANDSRIQKIHRLKEERDYFKKKYEYFTMTDVPEGFARRQGAGIGLISKYAGLFLRSYFHDSQNPDKRQIYIVKGATTDEFRKMWGLQKEYEKKSRDNHVHHCIDAIVIACIGKAEYDRLARYYKAEEEYRWRENNEAPRFEKPWPTFTEDVKAIADELLIVHDTKDNVLKKARKYVRTTTGKHMAKGDSVRGSLHMETYYGAIERDGEIRYVVRRSLDGLDVKDVKNIVDDAVRAAVEEAISRVGSLKDAVKESIFLGGKTPIKKVRCFANDVKTPVDIRSQRDKGRKDYKHSYHVKNDGNYCIGIYEGMVKGKPKRDFEIVSLLDAADKMKKGGNATTLLSPEKNGMPLLYQLKVGQHVILLDKSEGRDVVLPNPTERLYTLVGMSTLRIKRQNGKIDSYGTMEFRHANEARKSSDLKSINGVYVKGEKRRPMITLLHNQFHALVEGKDFILSPLGEITYLNQNA

SEQ ID NO: 5978 - protein, 1209 aa, synthetic construct
  REGION 1..1209: note = Synthetic
MKRILGVDTGTNSLGWAVVDKVDDKTYSLVRKGSLIFQEGVKVEKGIESSKAAERTSHRALRKQYFRRRLRKIEVLKTLVEFDWCPYLSPEALHLWHVKKQYPMSETFIAWQRTNDNTEDNPYYYRHLCLHEKLDMSNQANRYMLGRAMYHLAQRRGFLSNRLEQGNDDETGKVKEAISSLSQSMQEAGCEYLGDYFYRIYKEKGNTERIRTRYTDREEHYKKEFYAICECQELTEEQISKLERALYFQRPLKSQRQGVGKCTFESKKPRVSDSHPAYEMFRMLSFVNNIKVKGPQDVELRPLSAEEYEKAKPMFFRKSKPQFDFEDIAKAIAGKGKYQHIRDAGDKGYKFNYRMSQSVTGCPTIASLMSVFGDDYMSAIAERYTLSEGKTPEQMVNDVWNVLYSFKDKENVKQWGREKLQLDDDEAEKFSKIRLTHSFASLSLAAVNKILPWLERGLIYSHAVLMAKVPDIVGRDVWENRSEEITKELLSLIYNFNPKDISMQGTLDFCIKDVLKDMCELKPGATEVLYHPSMIDTYPDAKKNEQGVYQLGSPRTNAVRNPMAMRSLHQLRKVINALLKDGTINSDTEVHIEYARELNDANRRKAIAQWNKDRETKRKKYAEDIRTLYKEETGREIEPTEDDILKFQLWEEQGRICLYTGNQIGIAEFVGANPSYDIEHTIPRSVGGDSTLENMTLCSSKFNRDVKKAKLPTQLFNHDEIMTRLDEWREKIEKLRKDVDHVKTHSGMDKAVKDRLIQKRHLLKLELDYWVGKYKRFQMEEVPEGFARRQGAGIGLVGKYAGLYLKSLFHKTDDRSKSNVRVVKGATTAEYRKMWGIQDEYEKKSRDNHVHHCIDAITIACIDPGEYNATAKYYQQLEEYERNNANKPTFPKPWPTFTEDIKSIQQEMLVVHSTPDNMPKRARKYVRTANGKKLAQGDSARGSLHNDTYYGAIERDGEIRYVVRKELRSIKENDVENIVDETVKEKVKQAIAEKGFKKAMEEDIFMNEAKGIKIKKVRCFTPSVTNPLHIRSHRDMSLREYKRQYHVTLDGNYCMAIYEDEVKGKMKRTYEIVNMIDAANYFKDSSGLTKNYPIAPETKNGLKYRCSVRTGTQIILLQSDDEEINLNDLEDIARRFYYVAVMCSDGRIVLRYSQDARDATSLKKERKSGAYKVGEQYRSEIMLSLSNFHALVEGVDFKIDALGEIKRLK

SEQ ID NO: 5979 - protein, 1218 aa, synthetic construct
  REGION 1..1218: note = Synthetic
MKQRILGLDTGTNSLGWAIVDRYDDNHYELVKQGVLIFQEGVKIEKGIESSKAAERTSHRALRRQYFRRRLRKIEVLRVLYRHDLCPAIGEEDLRLWRSRKIYPTKPEFMEWQRTSDDEDRNPYRCRYICLTERLDLDKRADRYVLGRAMYHLAQRRGFLSNRLDTSEDNAENSPVKRGIAELDNKMSQAGCRYLGEYFYHIYKEKGNTERIRVHHTDREKHYRAEFDAICRQQNLSEELRNELERALYFQRPLKSQRKSVGCCTFEKGKPRACTSHYAFEEYRMLSFINTIRILTPYDMEPRPLSETERNTIEPLFYRKSKENFTFEDIAKAIAGRGNYMTMGDRGDRAYRFNYRMTQGVSGCPTMAQLRSVFGDDWMRGIAETYVCNTRKDGTQKTVEEMADDVWNVLMFFDSKEKLKEFAINKLQLDEEKADKFANIRLKHDYASLSIKAIRNILPFLRRGMLYSHAAFLAKVPEILGQDRWQDTIVQQRILDEMDRLIDAAANEGKERGTVIETALKDFLNKEFSISVQALETMYHPSMIETYPDPRPNEDGVILLGSPRTNALRNPMAMRSMHQLRRLINSLILEGLIDHSTIVHIEYARELNNANQRAAIYDWQRQMDKKHKEYAGTIRKECNIEPTEMDILKYQLWKEQERICLYTGKQIGVNDFLGPNPTYDIEHTIPRSVGGDSTQENMTLCSLDYNRNVKKARIPSELPPQEYEAIIERIQGWKEKIEELSKKVDRLSHGSETTKEAKDKRIQKRNLVKIELAYWRGKYERFTMREVPEGFARRQGAGAGLISKYAGLYLQSYFKSVEHPERRQIYIIKGTATAEFRKMWGIQEAYEKKSRDNHTHHCIDAIVIACIGKREYDATAKYYHQQEEYRFGQDTKPNFPKPWPTFTEDVKRISDEIAVVHNTPDNMPKKASRCIDVTGKGKVVAKGDCARGSLHKDTYYGAIKRNEEIRYVVRRELSSFEKLSDIDNIVDYAVREKVRSAVEGRDFKKAIAQPIYMNKEKGILIKKVRCYAGKPTLDIRHHRDQSTKPYKQRYHVVNDENYCMAIYEGVVKGKAKRSFLLVNMLDAASHFKQSNDDRTEEIVPLSNASDWPLKYVLKIGTNVLFYETYPQEVHEADNKELVRRLYKVVGMSRKNVSGYKYGEIVLRHVAEAKPSKEIKYQNGVYRQGEEPRAGITMLHTQINALVEGYDFDITPIGEIKFR

SEQ ID NO: 5980 - protein, 1217 aa, synthetic construct
  REGION 1..1217: note = Synthetic
MKKRILGLDTGTNSLGWAVVDRDEYDNYTLVKHGSLIFQEGVKIEKKVESSKAAERTGYRSLRKHYFRRRLRKIEVLRVLIKHNLCPYLSEELLHAWHVHKTYPKTDDFMLWQRTSDNEDKNPYYYRHLCLHQKLDLERQDERYILGRAFYHLAQRRGFLSNRLDSTSEQETGKVKTGISDLTREMEVAGCEYLGDYFYQIYSDPNNHERIRTRYTDREQHYKKEFHAICEMQQLSQDLVTELDKALYFQRPLKSQRKGVGKCTFEPKCPRCAESHPDFEEFRMLSFINNIKIKTPRDLELRCLSLEEKAKIRSLFYRVSKPNFDFEDIAKALAGKGQYQYIKDVSDKPYKFNYRMTQGVPACPTTAQLIKIFGDDWKDAIAETYRLNNTRFGQKSVAQMVDDMLNVLSTFSSDSKLQLWAEKNLQLNEEQCKKFAGIKLSHGFASLSLKAIHKILPFLRQGYIYSHAVELANIPTIVGEEIWNNIDKQRFIVRNIQQMLQCQDQCTKDFCIKDFLLDNFNLNPGTVDKLYHPSMIETYKDAEQKEGIYQLGSPRTNAIRNPMAMRSLHEMRKVVNKLLKDKIIDSDTEVHIEYARGLNDANMRKAIADYQRGQDKKHQNYETSIKDLYLQETGKNIDPTETDIRKYELWEEQNHKCLYTGAEIGIADFLGDNPKYDIEHTIPRSIGGDSIMENLTLCDSRYNRDVKKAKMPSELANHEEILTRIEGWKKNYETLTYQIDKCRTHAGMSKEQKDPIIQKRHRLKIERNYWKDKYERFTMTEPPSDFSRRQGAGIGLISKYAGLYLKSLFHDPKNHNKSRVYTVKGTTTAEFRRMWGLQSEYEKKCRDNHCHHCIDAITIACIGKKQYEDMASFYHDEELYDDGRGKKPQFRKPWPTFTEDVLNLEKSLIIVHDTPNNMPKKARKYVRTANGKFIAKGDCARGSLHKETYYGAIERDGEIKYVVRKALTSFEKEADIDNIVDDIVREIVREAVRGKTFKEAIAQPIYMNKEKGILIKKVRCFAQGITRPLNIRQQRDTSLKEYKQTFHVANDTNYCMAIYEGLVKNKIKRDFELVKTLDAVTYFKDSNCKIEFPTLVPSKTNAELPLKSIIKIGTMVLLYENTPAEIDFSDKKDLARRLYKVVGLSSMVISGYTYGVTSLRHHQEARQTKDLKYKKGRYKNGEQYRPLIGLLHTQFDVLVEGFDFHINALGDIELLNR

SEQ ID NO: 5981 - protein, 754 aa, synthetic construct
  REGION 1..754: note = Synthetic
MKKRILGLDTGTNSLGWAVVDRYEYDNYTLVKHGGLIFQEGVKIEKKVESSKAAERTGYRSLRKHYFRRRLRKIEVLRVLVKHNLYPYLSDELLHAWHVHKTYPKTDDFMLWQRTSDNDDKNPYYYRHLCLHQKLDLERQDERYILGRAFYHFAQRRGFLSNRLDSTPEQETGKVQTGISDLTREMEAAGCEYLGDYFYQIYSDPNNHERIRIRYTDREQHYKKEFHAICEMQQLSQDLVTELDKALYFQRPLKSQRKGVGKCTFEPKCPRCAESHPDFEEFRMLSFINNIKIKTPRDLELRCLSLEEKEKIRSLFYRVSKPNFDFEDIAKALAGKGQCQYIKDVGDKPYKFNYRMTQGVPACPTTAQLIKIFGDDWKDAIAETYRLNNTRFGQKSVAQMVDDMLNVLSTFSSDSKLQLWAEKNLQLNEEQCKKFAGIKLSHGFTSLSLKAIHKILPFLRQGYIYSHAVELANIPTIVGEEIWNNIDKQRFIVRNIQDMLLYQDQCTKDFCIKDFLLDNFNLNPGTVDKLYHPSMIETYKDVEQKEGIYQLGSPRTNAIRNPMAMRSLHEMRKVINQLLREKIIDSNTEVHVEYARGLNDANMRKAIADYQCAQDQKHQKYQNSIKELYLQETGRNIDPTETDIRKYELWEEQSHKCLYTGAEIGIADFLGDNPKYDIEHTIPRSVGGDSIMENLTLCDSRYNRDVKKAKMPSELANHEEILTRIEGWKKNYETLTYQIDKCRTHAGMSSCGLM

SEQ ID NO: 5982 - protein, 1208 aa, synthetic construct
  REGION 1..1208: note = Synthetic
MKKRILGLDTGTNSLGWAVVDRDEYDNYTLVKHGGLIFQEGVKIEKKVESSKAAERTGYRSLRKHYFRRRLRKIEVLRVLIKHNLCPYLSEELLHAWHVHKTYPKTDDFMLWQRTSDNDDKNPYYYRHLCLHQKLDLERQDERYILGRAFYHLAQRRGFLSNRLDSTPEQETGKVQTGISDLTREMEAAGCEYLGDYFYQIYSDPNNHERIRTCYTDREQHYKKEFHAICEMQQLSQDLVAELDKALYFQRPLKSQRKGVGKCTFEPKCPRCAESHPDFEEFRMLSFINNIKIKTPRDLELRCLSLEEKEKIRSLFYRVSKPNFDFEDIAKALAGKGQYQYIKDVGDKPYKFNYRMTQGVPACPTTAQLIKIFGDDWKDAIAETYRLNNTRFGQKSVAQMVDDVLNVLSTFSSDNKLKLWAEKNLQLNEEQCKKFAGIKLSHGFASLSLKAIHKILPFLRQGYIYSHAVELANIPVIVGQEIWNDTDKQGFIIRNIQQMLQCQDQTTKDFCIKDFLLNNFELNTGAVDKLYHPSMIETYKDAEQKEGIYQLGSPRTNAIRNPMAMRSLHEMRKVINQLLREKIIDSNTEVHVEYARGLNDANMRKAIADYQRAQDQKHQKYQNSIKELYLQETGRNIDPTETDIRKYELWEEQNHKCLYTGAEIGIADFLGDNPKYDIEHTIPRSIGGDSIMENLTLCDSRYNRDVKKAKMPSELANHEEILTRIEGWKKNYETLTYQIDKCRTHAGMSKEQKDPIIQKRHRLKIERNYWKDKYERFTMTEPPSDFSRRQGAGIGLISKYAGLYLKSLFHDPKNRNKSRVFTVKGTTTAEFRRMWGLQSEYEKKCRDNHCHHSIDAITIACIGKKQYEDMASFYHDEELYDDGRGKKPQFRKPWPTFTEDVLNLEKSLIVVHETPDNMPRKARKYVRTTRGKFLAKGDCARGSLHKETYYGAIERDGKIEYVVRKALTSFEKEADIDNIVDDTVREIVRNAVRGKTFKEAIAQPIYMNKEKGILIKKVRCKAPKVLKIFSVKPCRDTSFHQYKKDIYVANDRNYMMAIYEKGADKKIGFEIVKNIEAANFYKKSMDRENYPCLVPQIKNGAKIKYCLKCGTAVLLYQNDAEEIDFNNMEDIIKRLYYITGLSLSESYGMVTLTHAQEARDKLDIQKGAFKMGEVYRPKINLRQTQFQGLIEGVDFNISILGDIKPLNK

SEQ ID NO: 5983 - protein, 1222 aa, synthetic construct
  REGION 1..1222: note = Synthetic
MKRILGIDTGTNSLGWAVVDRDENGQCTLLRKGSLIFQEGVKIEKGNESSKAAERTAYRASRKHYFRRRLRKVEVLKVLVKYGWCPYLSPEALHAWHVDKQYPMDEEFLQWQRTDDALDKNPYAYRHICLHDELDLDNEAERFILGRAIYHLAQRRGFKSNRLDQSEEDGKETGAVKEGINNLSEEMKAAGCEFLGDYFWHLYRENEHVLEGGKHRIRTRYTDREDQYKKEFYAICEKQRLSKEQIAELERALYFQRPLKSQRHSVGKCTFEKKKPRCADSHPAYELFRMLSFVNNIKVMGPYDVELRPLTSEEFEKIKSQFFRKSKPSFDFEDIAKALAGKNKYQYIKDAGEKPYKFNYRMTQSVSGCPTIASLISLFGDDYQNAIAEVYTLSEGKTKEQMVEDVWNVLYSFQDKENVKRWGMERLQLSDEEAEKFSKIRLSRNFASLSLSAIRRILPWLEQGLVYSRAALMAKIPDIVGSEIWQEHGERIQSEMLEFIDNFNASDENMQGTLDFCIKDYLLSNFELKPGAADALYHPSMIETYEDAKKNSQGVYQLGSPKTNSVRNPMAMRSLHKLRKVINMLLREKIIDQNTEVHIEYARELNDANKRWAIADWNKDREKARAKYAEEITKLYKAETGRDIVPTKEEILKYELWTEQNHICLYTGKEIGISDFIGPNPRFDIEHTVPRSVGGDSTMMNMTLCCSQFNRDVKKARLPQELSNIEDIMARLADWKEKITQLRKDADKVRTYSGMAKDMKDRQIRKRHKIRIELDYWQEKYRRFQMTEVPEGFSRRQGAGIGLVGKYAGLYLRSLFHKLEDRQKSNVRVVKGTTTAEFRKMWGVQDEYEKKSRDNHIHHCIDAIVIACIQTGDYNAVARYYQQYEEYERQRAQKPTFPKPWPTFTEDIKALASQMLVVHDTPDNFAKHASKTVYTPTGKHVAQGDSVRGSLHKETYYGAIERNGKIEYVVRRSLSSFEKASELESIVDETVKEIVKKAVAEKGLKEALASPIYMNKEKGILIKKVRCKVDSVKNPVDIRTHRDISRKEYKRTFHVQNDENYLLAIYEGIVKGKPKREFELVRNIDAAKYFKASTDRADYPSIVPEKSPNGYPLKHKLTVGKMVILYEASPEEIDFGNIEDLGKRLYKITGLSINPVGNGYGSIVMRHHQEARMAKEVKQKNGAYKNGEEYRAAIIMLHTQFHALVEGEDFEINALGEITLKH

SEQ ID NO: 5984 - protein, 1218 aa, synthetic construct
  REGION 1..1218: note = Synthetic
MKKRILGLDTGSNSLGWAIVDREDDGNYALIDKGVVIFQEGVKIEKGIESSRAAERTAHRALRRQYFRRRLRKIEVLKVLVKYNLCPALTMDELNLWHTRKIYPLNDDFLQWQRTNEKEDINPYHSRHICLTECLNLYLESHRFTLGRALYHLAQRRGFLSNRLDANEEAESGAVKSGISNLSKEMETAGCKYLGEYFYKLYKEKGNKIRIRTRYIDRENHYKAEFYAICEKQNLSPEMIKDLERALYFQRPLKSQRNSVGKCTFEKNKSRCSDSHPLFEEFSMFSFLNNVKIQGPYDAKLRPLNDEELAKIKPLFYRVSKANFDFEDIAKKIAGKGNYQCIKDKTDKQYKFNYRMTQGVPGCPTMAQLMAVFGEDWKTGIAETFDLSTRKDGTPKTADEMANDIWNVLYFFDNKEKLKEYAQKHLQLSPDLAEKFSKIKLSHDFSSLSLRAIRRILPFLRCGMLYSHAVFMGKIPDIVGKDVWNDESQREYIISRVADFASMPYDKLRETKLTLEQCIKDFLCEEYGASIADVETLYHPSMIETYPDARPNHDGIVLLGSPRTNAIRNPMAMRSLHEVRKVVNTLIKEGKVDRDTEVHVEYARELNNANMREAIKKYQDDRQKKHNEYAGEIKKLYKSATGIDIEPTETDVLKFQLWEEQGHMCLYTGKQIAITDFIGANPSFDIEHTIPRSVGGDSTQENMTLCSSHYNRFVKKALLPTQLPDYEQIIERIKPWQQEVKHLTAQIDKISTRGIWDKAKKDNLIRKKNKLKMERDYWDGKCKRFTMTEVPEGFALRQGAGIGLISRYAALYLKSYFNSGVETSHRQVYSIKGPVTAEFRKMWGLQEEYEKKSRANHIHHCIDAIVIACIGNNEYAQMGRYHHQMFDYYEGKGEKPVFPKPWSTFTQDVKSISDELLVVHDTRDNMPKKACRIVDTPHGKKQAKGDCARAGLHLDTYYGAIKNKDEIKYVVRKSLSPDFTLKEAENIVDETVKQKVKSAFVGNKLQLPVYMNEEKGIEIKKVRCFANTIKNPIHIRSQRDLSDKDYKQHFHVSNDTNYCMAIYEGKIKGKVKRDYKLVRTIDAAKYFKRSTNYEAQKTLVQELSNKGFELKQLLKVGQMVLLYESNPEEICFSDLNDISKRLYKIVGLSYLPVGVGYGTIVMRHHQEARNAKDITITKGAYNASQPIRSSIYLLHTQFNALVEGKDFEITPTGKIIKK

SEQ ID NO: 5985 - protein, 1221 aa, synthetic construct
  REGION 1..1221: note = Synthetic
MTTRILGLDTGTNSLAWAVVERDEKGNYTLVKRGDVIFTEGVKIEKGIESSKAAERTGHKSLRVHYFRRRLRKIETLKTLVRLGLCPHLSDEQLRLWKTKKTYPLTADLMLWQHSGSAEENNPYYCRYVCLTQKLDLTDQRQRFLLGRAFYHLAQRRGFLSNRLDTSAESDETGKVKSGISQLSDEIANAGCEYLGEYFYLLYKQYGNNIRLRNRYTDREEHYKKEFLAICEKQQLDAAWVDALQRALYFQRPLKSQRRGVGKCTFEPKKPRCAESHPANEAFRMLCFLNNIKIQTPHDATLRPLNEEEREKIWSLFFRKSKPNFDFEDIAKALAGKNNYAYYKDNNGKPYKFNYRMQQGVSGCPVTAQLMDVFGHDWQAGIAETYTAVAKKDSKKTLDEMGDDVWNVLYSFSSKDKLKAFAIEKLQLDEALATKFANIKLPHAFAALSLKAIRNILPFLRQGFIYSHAVLLAKIPDVVTKAVWENDDARERILSGVMDIITNYNPKDRGLEGTIDFCIKSYLKDVVDLKPGATDKLYHPSMIETYPDAKQNKAGVYQLDSPRTNAIRNPMAMRSLHVLRKVVNKLLMDGIIDRNTEVHVEYARELNDANKRKAIADYQKNLEKKRADYRKRIIELYAEECHKAIDPTDTDILKFQLWEEQNHKCVYTDAEIGICDFLGNNPKFDIEHTIPRSVGGDSTQMNLTLCDSAFNRQVKGTKLPTALDNHADILTRIAHWKSQCEELQKQIDKIRTFAGMEKGMKDRLIQKRHRLKMELAYWQGKYERFTMTEVPEGFSRRQGAGIGLVSKYAGLYLKSLFHNVYVIKGVTTAEFRRMWGLQGEYEKKSRNNHCHHCIDAITIACIGKAEYDRMAQYYHEEEDFLWHGSTYKPQFDKPWETFTEDVLAQEHSLLVKHLANDNMPKRAKKLIHTATGKHFAQGDAARGSLHKDTYYGAIEQNGEIRYVLRKTIASFTSESELENIVDQAVKEKVMAAVAGKNFKEAIAKPIFMNEEKGIRINKVRCYANSVKKPLNIRQQRDLSGKDYKHQFHVVNDNNYLMAIYQGEVKGRIKRDFVLVNNIAAATHFKQCAREDKCGALVPQNSPKGHLPLLATLKIGTQVLLYEDAPEEINFDNQQDLVRRLYKVVGFSSMTITGNDYGVLSLRHHQDAQQAKDVKFKNGKYQQNEALRQGITLLHTQFKALVEGVDFEFNILGEIKRKTAHA

SEQ ID NO: 5986 - protein, 1212 aa, synthetic construct
  REGION 1..1212: note = Synthetic
MTKRILGIDTGTNSLGWAVVDKDIDGTYSLIRKGSLIFQEGVKVEKGIESSKAADRTSHRALRKQYFRRRLRKIEVLKVLVEFGWCPYLSPEALHQWHVKKTYPMDEAFISWQRTNDNFEENPYYYRHLCLHNQLDLTEESDRYMLGRAMYHLAQRRGFLSNRLEQGNDDETGKVKEAISSLSKSMTEAGCEYLGDYFYRIYKEKGNTERIRTHYTDREEHYKKEFYAICKRQNLSGSQISILEKALYFQRPLKSQRQGVGKCTFEPSKPRVADSHPAFEMFRMLSFVNNIKIKGPYDVELRPLSAEEYEKAKPMFFRKSKPQFDFEDIAKAIAGKGKYQYIKDVGDKEYKFNYRMTQSVTGCPTIANLMSVFGDDYVSAIAERYVLSDGKKPEQMVNDVWNVLYSFADKDNVKQWGKDKLQLNDEEAEKFSKIKLTHSFASLSLAAVNKILPWLERGLIYSRAVLMAKVPDIVGKDVWENRGEDITKELLNLIENFNPKDVSMQGTLDYCIKDVLKDMCELQSGVTEKLYHPSMIETYPDAKKNANGIYQLGSPRTNAVRNPMAMRSLHQLRKVINTLLQEGTIDNQTKVHIEYARELNDANKRKAIAQWNKDRESLRKKYYEDIRKLYKEECGKDIEPTADDVVKFQLWEEQKHICLYTGDSIGIADFVGANPSYDIEHTVPRSVGGDSTMENMTLCSSKFNREIKKAKLPTQLSNHDEIMGRLEEWRERIEELRKGVDRVKTSSSMDKTVKDRLIQKRHLLKLELDYWLGKYKRFQMEEVPEGFARRQGAGIGLVGKYAGLYLKSLFHKADDRTKSNVRVVKGTTTAEYRKMWGIQDEYEKKSRDNHVHHCIDAITIACIEPGEYNATARYYQQLEEYERTNAIKPSFPKPWSTFTEDIKAIAQEMLVVHNTPDNMPKRARKYVQTSNGNGKKLAMGDSARGSLHNDTYYGAIERDGEIRYVVRKELHSIKETDVEYIVDDVVKEKVKQAIMEKGFKRAMEEDIFMNEEKGIKIKKVRCYTPSVTNPLHIRTHRDLSRKDYKRQFHVTLDGNYCMAIYEGEVKGKMKRTYEIVNMIDAAAYFKESAGLTNLYPIAPEEKNGMKFRCVVRTGTQIILLQSDDEEIELVNKKELSRRFYYVAVMQKDGRIVLRYNQDAREATILKKERKSGAYKVGEQYRSEIMLSLSDFHALVEGVDFKINVLGEITLLK

SEQ ID NO: 5987 - protein, 1224 aa, synthetic construct
  REGION 1..1224: note = Synthetic
MTKIFLLFLRKNYNLMMKKRILGLDTGTNSLGWAVVDCDEYSNYELVKYGDLIFQEGVKIEKGIESSKASERTGHRSLRKQYFRRRLRKIEVLKVLVKHGLCPYLSEEQLHNWHVRKVYPKTDDFMLWQRTNDNEDKNPYYYRHLSLHTKFNLDRQDERFMLGRALYHLAQRRGFLSNRLDSTPENDNGKVDTGISKLSHKMELAGCEYLGDYFYQIYSDPDNHERIRTRYTDREKHYKKEFQAICEMQQLSPEMVRDLEKALYFQRPLKSQRQGVGKCTFEPRCPRCADSHPDFEEFRMLCLLNSIKIQTPYDLELRSLNEEEKEKIVSLFYRTSKPNFDFEDIAKALAGKGKYKYYKDEGDKPYKFNYRMTQGVAACATTGKLRKIFGENWKEAIAETYRLNNTRKGQKTVAQMVDDVWNVLSTFESEDKLKHWAQLNLQLDEDQSKRFAAINLSHGFASLSLKAIHKILPFLRQGYIYSHAVMLANIPAIVGEEVWNDADKRSFILNHVLTYLQSEDQTTKDFCIKDFLLNNYNLKPGAVDKLYHPSMIETYQDAKQQGDVYQLGSPRTNAIRNPMAMRSLHEVRKVVNQLLKEKIIDQNTEVHVEYARGLNDANMRKAIADYQRAQDKKHKTDADSIKDLYFRETGNNIEPTETDIKKFELWEEQSHKCLYTGAEIGIADFLGDNPKYDIEHTIPRSSGGDSTMENLTLCDSNFNRNVKKTQLPAQLANHEEILTRIEGWKKRYETLTSQMDKCRTFSGMAKDIKDSVIQKRHKLKMERDYWKGKYERFTMTEVPDGFSRRQGAGIGLVSKYAGLYLKSLFHDPHDRSKSRVFTVKGTTTAEFRRMWGLQNEYEKKSRDNHCHHCIDAITIACIGKQQYEAVAKFYRDEALYDDGRGKKPQFRKPWPTFTEDVLSLERTLLVVHETPDNMPKKARKYVKTNRGEFLAKGDCARGSLHNDTYYGAIERDGKIRYVVRKPLSSFEKESDIDNIVDDTVKEIVREAVRGKNFKEAISQPVYMNKEKGILIKKVRCYAPKVLKIFSVKSCRDSSSHQYKDHIYVANDRNYAMAIYEKGADKKIRFEIVKNIEAANFYKKSMDREEYPYLVPQTKNGAKIKYYLKRGMAVLLYQNDAEEIDFNNMKDIIKRLYYITGLSLSESYGMVTLTHAQEARDKLEPKKGAFKMGEIYRPKINLRQTQFQGLIEGVDFNINILGELKPIKR

SEQ ID NO: 5988 - protein, 1241 aa, synthetic construct
  REGION 1..1241: note = Synthetic
MLVELLSCNEVFPIFTTKNLKMATMGKRILGIDTGTNSLGWAVVDREAEGGYSLIKKGCLIFQEGVKIEKGNESSRASERTAHRALRKSYFRRRLRKIAILKVLIKYSWCPYVTQEALHLWNVKKQYPMVEAFLSWQRTDEKLGRNPYVYRHLCLHQELDLSKESDRYILGRAFYHLAQRRGFKSNRLDQSEEGNKEMGKVKSGISDLSAEMERNHCVYLADYFYQLYQEKGCTVRIRTRYVDREEHYKREFYAICKKQHLSGEQVKELESALYFQRPLKSQRQGVGKCSFEKTKARCADSHPAYERFRMLCFLNNIKVQGPYDVALRPLNGTEREKIKPLFFRKSKPQFDFEDIAKAIAGRNMYQHIKEEGDRPYKFNYRMSQTVSGCPTTAAFISLFGENYERSIAEQYLRHQGKSVSQMVNDVWNVLYSFPDKSYVRCWAINNLQLTEAQADRFANIRLSRAFAHLSITAIRKILPWLEKELIYPHAVLMAKVPDIVGKDTWEQYGGAIEKELLELMAHFNPKDIALQGTLEFCIKDYLQNNFELRPGAVDRLYHPSMIETYPDAHKNAEGIYQLGSPRTNAVRNPMAMRSLHQLRKVINMLLREKVIDSDTEVHIEYARELNDANKRKAIAEWNKRREQARRKYAADIRQMYKEECGREITPTNDDILRFQLWTEQEHRCIYTGKTIGITDFIGGNPQYDIEHTVPRSVGGDSTMENMTLCESRFNRLVKRDILPAHLPNYEEILVRLEDWRKHIEDLRKQMDRKRTYADMPKSVKDSVIQKRHLLRIELDYWQNKYSRFLMEAVPEGFSLRQGAGIGLIGKYAGLYLKSLFHRPGDTARSNVRVIKGETTAEYRKMWGVQSTYERKSRDNHIHHCIDAITIACIQPKEYASTAQYYRQLEEYERSAAARPAFPKPWLTFTEDIKELEAALLVAHSTPDPMPKRARKRVITGVGRVTAKGDCARGSLHKDTYYGAIKRNGEVQYVVRRLLSSFEKPGDAESIVDEAVREKVKQAIAEKGLKEALAGDIYMNREKGILIKKVRCYAKMVKRPIDIRQHRDVSRKEYKRAFHVMNDDNYLMAIYEGTVKGKTKRDYELVRMIDAARFYKESTDRLDYPTLVPIQSKKGFPLKHQLKVGQMVLLYENTPEEIDFDDRMDLCKRLYKVYGLSSLPGSTTYGIIKMRYHQEARKADAIKPKNGAYHNGEEHRPAIIMYHTQFNALVEGEDFAISALGDITKL

SEQ ID NO: 5989 - protein, 1215 aa, synthetic construct
  REGION 1..1215: note = Synthetic
MKKRIIGIDTGTNSLGWAVVDKLDNGQYELVKKGSLIFQEGVKIEKGIESSKASERTGHRALRKQYFRRRLRKIEVLKVLIKYQLCPYLSDEQLHEWHVHKRYPMSDAFIEWQRTNENEQKNPYYYRYRALTQVLDLNSASDRFVLGRALYHLSQRRGFISNRLDSNENNEENGKVQKGISDLSKEIAESGCTYLGEYFYKLYQELGNKVRLRSRYTDREEHYIKEFDAICVQQQLGADLVKDLERALYFQRPLKSQKQGVGHCTFEPLRPRCAESHPAYEEFRMWSTINNIKVQGPTDEHLRHLRKEEIQKILPKFFRKSKPDFDFEDIAKELAGKNNYQYIKDESNKPYKFNYRMSQSISGCPTCAALREIWGDDFASSIAETYTNMQTRNGNMKTPEYAVDDVWNALLFMETKEKLEQFGINKLQLSGEQAKKFSNIRLSHAYSSISLCAIRKILPYLKRGLKYSNAVFMANVPTIVGKEIWQDDHDYIEQNLFAIIKSYEPGCGITLEDMLKDFLSNSYDLAPGAINKMYHPSMIDVYPDAKQTNGIYQLGSPRTNAIKNPMAMRSLHQLRKVINTLLKERVINQNTEVHIEYARELNDANKRAAIASWNKDREKKRKTYSEEIKKLYKAETHKDIEPTETDILKFELWEEQKHLCLYTGKTIGISDFLGPNLKFDIEHTIPRSAGGDSQMENMTLCDMTYNRQVKIGKLPSQLSNHDEIMTRLVQWQKKVYALTKDIDGIRTHSGMEKGVKDRLIQKRHKLKLERDYWRGKVQRFEMTEVPEGFSLRQGIGIGLISKYAGLYLKSLFHKQNDRSQTTVRVIKGLATSEFRKMWGIQDVYAKKCRDNHIHHCIDAIVIACIDPYSYNRLAHYYQALDNAKFGVGDKPVVVKPWPTFSEDMKALYDSVLVSHDTPDNMPKHTKRREVKTPTGVYSAQGDTARASLHNDTYYGAIERDGEIKYVVRKPLSSLKETDVENIVDDIVRQKVKDAIKVKGFKEAMSGDIFMNEEVGIKIKKVRCFCPAVANPLNIRQHRDISRKEYKQQYHVTTDSNYCMAIYEGVVKGKFKRSFEIVTMLDAASYYKKSADVSKYYPITPEEKNGLKLRCKITAGTQIILKQAEEEELDISDVNEIANRLYFVAIMSKDGRIVLRHSHEAREASLLVKEQSSTPYKIGEGYRPQIRMSLSNFHALIEGVDFVMNPLGEIKLIHHD

SEQ ID NO: 5990 - protein, 1053 aa, synthetic construct
  REGION 1..1053: note = Synthetic
MRYRLSLDVGTNSIGWCVLRLDDTLKPEGIEAIGSRIFPDGRDAKTKASLAEDRRIARSARRRRDRYLKRRTELLQLLKENGLMPSEQSACKALELQNPYALRARGLDEPLELHEFGRVLFHLNQRRGFKSNRRTDSGEDAGPIKEGIARLKAQLQEANARTYGEYLFALAQKGQPVRIRREDDSPKTQYPFYPERTLLQEEFQALWEKQRCHYPSLTDDLRQTLEDAIFYQRPLRPVQPGRCTFNPGEDRAPRALPTAQRFRMLQETNNIRIVSPTLEKRPLTLKERDAVLQTLLGAKKRTFEQIRKTLGLSAEDKITLESAKRTALSGDDTGFSLAKKECFGKSWWTLPLQEQDEIVSLLLTEEDESVLHDILTTRWALTDAQATQVGALSFLKGFAQLGMTALCAITAELEKDVIPYSEAVARAKLGSHSDFRDGVIWERLPYYGEILRRHIAKGTGKHTDRQEQRLGRIANPTVHIALNQIRRVVNELIKTLGHPTQVVVEVARELKEGEEGRRERERTQAEHQKANEGRKARLREMGIAVTGDALLRMRLWEELHPDAASRRCVYTGEPISMERLFSSEVEIEHILPFSASLDDSPANKTLSLRAANRYKAERSPAQAFAASPPGYDWQGILGRAAFLPDNKTWRFAEGAMERFDAEGGFLERQLKDTQYIATVAREYMTAICDHRQVWVTPGRLTNLLGRHWGLPKKNRDDHRHHAFDAVLIGVADRRILQLVGQTHARERLAGVERFLSTLPEPWPGFRDETIQACRGIIVSHKSDNRPGGRLHNATAYGLYKENSGIQIAQHKVPVSSLTTIADIRKIKGIGIASRFLALAGNLSPQECVEAILHIRGMKEKEAIEHLNSLVDCDDKTFKQRLQDYARKKGIRRVRILEPLTLIPINDKAGHPYKWFKGDSNAYYEIFAGQDGQWTGRIVSTFQACQSQDTAEQPSGDLVARLSNRDMLELEHEGIRKIVYVVKLSEKQLAFAEHFEANTDARNRDKDDAFRFIYKGSPDALRKAKARPIFITPAGKVIYKELPSHDPENGGGQR

SEQ ID NO: 5991 - protein, 1049 aa, synthetic construct
  REGION 1..1049: note = Synthetic
LDIGTNSIGWCILDLDEVCSPETIRAMGVRIFPDGRDAKSQASLAVDRRLARQMRRRRDRYLRRRSQLMDALIRHGLMPTTAEDRNELEGLDPYALRAKGLQEALSLFELGRVIFHLNQRRGFRSNRKTDKGSEAGKIKPAIKRLHDLMSEAGVSTLGEYLYLRRQSGHTVRSRLVGQGTKAQYEFYPDRSIVEDEFFRLWNAQAAYHPNLSDSARDEFHKIIFYQRPLKPVQPGRCTLEPTKERAPQAFPVSQWFRIYQELNQLRVVTPELHERELTFSERNTLAAILKQGKDLTFESLRTRLKLAPGHAFNLEGESRDKLKGDSTAYLLAKKDHFGPAWHELSPESQHDVVELLLEEESEDTLVAALMGRWQLDEKNARAIAALNLPAGYSRLCLEALCSITKELVKDVILYHEAVKRAGYASHSWFATGEIHERLPYYGLVLQRHVGFGTNHPADRAEVRYGRISNPTVHIALNQVRRVVNELIKLHGHPAQIVLEVARDLKNGLMARREIAKRQAEQKRANDRRRDQLKEFGIPVTGDALMRMRLWEELAENPAARCCPYTGEHVSMQRLFSNEVEVEHVLPFSRTLDNSPSNKTISLRRANMYKGNRSPFEAFGTSADGFDWSGIVSRAALMSSAKRWRFGEDAMSRYEREGDFLDRQLVDTQYIARITREYLTAVCDPCKVWVTPGRLTSLLASRWGFPRKNRDDHRHHALDAALIGVTDRALLKKVADKNSRERSQGVDNFLAGFEAPWNGFRSDVLAAYGGIVVSHKSDHGLGGCLHNETAYGILGPNGSQGNAQHYVPIGAITTPADVLKVKGFGLRASILSSIAGTPIRKCRDLLSRLVSMREREAKEFIRAFVGLDGKEFAKRLNDYATARGMRRVRLKETVTLVAINNREGKPYKGVKGDSNAYYAIYLDPDGRWVGEIVSTLQANSPSYRTRCDELGYPVVTHLFRNDMLELNENGVTKVVYVVRLSEKQIALAEHNEADVDGRTRDKSVDFTLIYKSSPASLQKSGAKIISVSPSGMIHYLEVPTHVAAGRGNSR

SEQ ID NO: 5992 - protein, 1060 aa, synthetic construct
  REGION 1..1060: note = Synthetic
VSSEHIPYRLSLDLGTNSIGWCMLKLLPEGNPGEVINMGVRIFSDGRDAKSGKSLAEDRRLARQARRRRDRFLKRRKELLKALIGSGLMPPDERQRKQLAALDPYLLRTKALDARLEPFELGRALFHLNQRRGFKSNRKTDKDQESGKIKAAIARLTATLQESGTRTLGEYLHNCRQAGRPIRFRPIKKGAGVDYALYPQRSLAEAEFDAIIAAQRPYHPQLDAGVEGKGGLRDIIFYQRPLKPVDPGLCTLMPLHPRAPLALPTAQRFRILQDLNHLRVLDTGNLAERLLTLDERNTLLVILETGKDLSFDAIRVKLGLPPSVTFNLDTGTKDGIKGDVSAKILSGKKLFGKAWASFSREIREDVVERLIKAEDEEELVAELVSGCSIDPAKAAAVAQASLPSGYARFCRETLAALCEQLERDVIPYSEAVVRAGFKSHSDLSTGEVFERLPYYGIALPRSIKPGSGKHTDPQEVRLGRISNPTVHIALNQLRKVVNELIKDHGKPAQIIVEVARDLKNGPAAMQEIRKRQKEGKDANDRRRTRLVECGVKVTADALLRLRLWEDLGRDETVRRCPYTGDVIGLAMLLSDEVEIDHILPFSRSLDDSPTNKTVCLRRANRYKLNRTPAEAFGDSRDGYSWEGVMERAARLSENKCWRFAPDAMERLEREADFLDRQLVDTQYIGRIAGEYLACICDKRRIWVTPGRLTRLLAHAWGFPKKNRNDHRHHALDAVLIGVCDRSLLKKVADHNAREVANGLDRFLADLEQPWPGFRDEALAAHDRIIVSHRPDHGLGGRLHNDTAYGILNLTPKARNNAQHRVSAETLSKPRDLLKIKGRGLRARLIAACNGMPLAQCLSLAQECEGMAESKAEAQLVKALGDLSEKQFKEKVHQFFKKNGIRRLRLVETIRLTPIHNAEGTAYKGFKTDSNAYYPIYLHKDGSWHGTIISTFEANNQETANTSETDPLITKLFNGDMIEINNNSKRIIAHIVKQSAQKIVVAEHFEANLSKRSKSNEFKYICITSPESLRKCQAKPLYVSPTGKVTYMRIMRHADPGDRRL

SEQ ID NO: 5993 - protein, 1261 aa, synthetic construct
  REGION 1..1261: note = Synthetic
MRILGLDLGVASIGWALIEVDDKYLPVKIDGLGVRIVSLADKEGSDFSSGKGVSACAQRTIYRTARKGNDRYRMRRTTLKNFLNKLGMIDPKVNLNLLPPLDLWALRADGAVNRKLTLNEIGRVLLHLNQKRGYRHSKNDTSEDAKNTDYVAKINERYAELRKSGMTIGQVGYQILKDSIHTSVNGKKFVTGRIKEGSDIYSASHLYPRQAHIDEFDRIMEVQSSFYPDLLTPEVITKLRHIIFFQRPLKSCKNLVSDCEFVEYFVKDTATGEIKHYRPKVAPVTSPLAQESRIWETVNNLRLENPMNKPRKGKNMNELSLWEPEINSHEWRLLQREYILTLDEKKKVVDFLRKNEKLTSTNLLKLLGLKKSDGFKPNIGAAGIKGNTTYFKLNEILQSYPEYRHLLDFNLEIEEKRVDQETGEVIPEISDRCYHQPLYELWHLLYSVSEKKDVEATLKTNFGITEQEVIDSLFALDFNTAGFSKKSAKFIRRILPYLMEGKMYSEACEAAGVRHSDYITSEENIERQLKETLSLLPKGSLRQPTVEKILNQMINVVNALIKEHGAIDEVRIELARELRQTKDQRSNTTKEISLRETDNKRIAKLIEQYGLKASRNTIQKYRMWEEAGGRCVYCGKPISITTFLAGNGAEKEHIVPRSVLFDDSFSNKTLSCTECNRTKGARTGYDFVASQGEKKLEEYLARVENMANNSNKKLRISRTKYKRLLTPGSDIPKDFLNRDLGETQYISRKAMELLREVVRNVGASTGKITDFFRHLWGYDKILHDLNLSRYESADLVIEDTFTHNGQTHTERRIKDWSKRMDHRHHAIDALTVALTRQRYVQRLNNLNAEHGNLKGDIESNGKNFKSDKSLITQWGEACPHFPVSVVKAAVDRIAVSFKPGKKVATSGKRKRKNGTEFKTFVPKGGLHLDTIYGKIKVPTAARSLKDCLKNPDMVSDREIAMKLKEVLSSCAGDISKAQKEIKKNPIKFDKENQPILYFPCYEERMTVRAGIASLSQKNASEIVDPVIRRVVEERFQECGSEKAYQQSLPERPIEHPAMPGIPVKYVKIFASVTPDTVVPVRKHGDKAIGFAKPGSNHHVAFYQQEDGNISALVTPFWVAVNRKKLGLDPIIHNPQEAWDKIIELGDKIDESLLTSMPLPNDQFMMSLQQNEMVILGLSDDQWNDAWQQKDLKTLTSHLYRVQKMSDGDYFFRLHNNTSTEFNADHRIMQTVIRCTSLKTWKSLNPHKVSLTHTGQIIPLHD

SEQ ID NO: 5994 - protein, 1263 aa, synthetic construct
  REGION 1..1263: note = Synthetic
MKILGLDLGVGSIGWSLIEVDDQYQLIKIIDMGVRIVPLAEKQEMNFLQGRGESINAQRTFRRTTRKGYKRRRMRRKLLVKILTDAGMYDPEATLDDLSPLELWKLRAEAVERKLSLREIGRVLRHLAQKRGYKHSKNSTDSESKDTDFVGAINTRYRELLEEGITIGQKLYSIIKNSIRESKNGKIFVSGRVNEGTDPYTESHLYPRQAHIDEFNKIMEEQSKYYPELLTSKMIGRLNHAIFFQRPLKSCKDLVSDCEFVEYWVHKDDGTLTTYHPKVAPISSPLSQETRIWETVNNIRLENRTNKPRKASGTSAPTKNSTEIESQEWRLLQREYVLTMEEKHRVVNYLRTNERLSSANLLKLLGLKGQGFTPNIPKNGLKGDITYVEIAEVLNDYPQYHHLLEFKLKEENSADKLKVNKETGEIIPEISEACYNQPLYKLWHLLYSVTERNDVEKALRQNFGIKEPELIDRLYALDFKTAGFGNRSAKFMREILPFLMQGMVYSDAVAAIGKRHSDYLTSEENEARILKTHLIPLQSGALRQPTVEKVLNQMILVVNDLVKRYGSIDEVCIEMARELRQSKAQREETNKNIGLREKDNERITKALKQYGAKLSRNNIQKYRLWEEAAHRCVYCGEMINITEFLNGEIGEKEHIIPRSQFFDDSLNNKVLACKRCNGQKGARTGYDFMESQGEKALEGYMERVRQMYENPDKKLRISKTKYNRLLTPGNEIPADFLNRDLGETQYITRKAMELLKEICRKVVPSTGKITDFFRHHWGYDMILHDLNLPRYEEAGLVEDVEFTHNDQTHTESRIKDWTKRMDHRHHAIDALTVALTRQKYIHRLNRLNSEHGFLKDDIELFGGKFKKNKSLLTEWAKACPHFGVNEVSNAISEIAISTKPIDKIFSLGKKQTRKDGSESRAFVPKGQLHNETIYGKIRVPMENKQSLKYCLAHPDMIQDKGIREAVKHILEAHSGNTKDALKWVKKHPLKVTKQGEPVEEFACWEEKLTIRTAVNSLKRDNIAKVIDRPLLKQLEERSKEFTDDKAFQASFKERPIYHPAMPGVPVKYVTCYARWTPDKVIAARKVNGKTIGYAAPDNNHHVAFYRSPDGKIEEQVISMWIAVKRAKLGLPGVITNPKEAWDMVINRSEDVDSEVVNTLPQEGSMFLGSIHKNEMFVLGLSEDEWNDAISQGYNKVLSDHLYRVKIITTGDYTLSLHTYAPSPKSTKLENKQNMLRCSIKKWISLNPHKVAVSPSGQITPIFD

SEQ ID NO: 5995 - protein, 1268 aa, synthetic construct
  REGION 1..1268: note = Synthetic
MKVLGLDLGVASIGWSLIEVDEKFNPIEILGIGSRIVPLNKSEPTDFAGGKGITRNAERTMQRTMRKGYDRFSMRRDHLRNRLTSLGMYDAGNTLDNLPPLELWGLRAKAATVGNRLSPEELGRVLLHLNQKRGYRHAKDSTDSESKDTAYVEAINNRYKALKEENLTIGQKMYDILKESAIVTKNGKTVVTGRIKEGDPYSESNLLPRQAHIEEYDKVMEVQSAYHPDLLTPEIINELRHIIFFQRPLKSCKHLVSDCEFIRYKIADENGVIKEYGPKVAPVSSPISQETRIWEAVNNLHLVNKSRKASRKRANADVPSLFDEGLPEGIISREARLLGREYHLSDEERLRVVEYLRKNEKLTASKLLEILGLKKSDGFTPNINLGTSGIKGNLTYVRIGQVLEDFPGYDHLLRFDLKEWDKVNTKTGEIYPEVSDDCYEEPLYKLWHILYSLSERKDVANALERHFNISDSDLVDRLFALDFKSAGFSNRSAKFMRRLLPFLRKGMKYSEACECVGVRHSDYETAEENKVKVLKTSIERLRKGELRQPVVEKVLNQMINIINELTEKYGEIDEIHIELARELKQSKERRAQATKDISLREKDNLRIAKLIEQHGETATRKRIQKYRMWEEAGGRCVYCGKSINVKSFLSGDDSEVEHIVPRSILFDDSFSNKTLACRKCNNEKNNRTAFDFMSSKPEKQFEEYLARVKEMAENPVKNLRISRTKYSRFLMPESELPENFLNRDLNATQYISRKAMELAKEICRNVHASSGIVTDYFRHIWGYDRILEQLNLDRYAGAGLVDRVEVEHKGQCHVEKRIRDWSKRLDHRHHAIDALTVALTRPGYVQRLSNLNTERGFLKEDIETEGVDFRTSHSLVEQWAESRPHFSVNRVSEAVDGIAVSFKAGNRAVTPGRKVLRKDGTIVRESLVPRGAMHEASIYGKTYVSIGEKPLKYCLQNPEMIVNREIREKITDLLKKHDNDIKKASAWIKKNPLACDDSGNAVTKFECVEPRMTIRYKLAAINSKNVDTIVDPVLKDIIRRRLDETGEKSFARSLEDSPITMPGSPRAIIKSVKCYAKLKEESTVAVKHSNGRPVGFAKKGNNHHVALYETPEGNIEAPVTSMWMAIKRRQLGLPEIIRRSDEVWDKICDLPESEVLTEVASELPDTQWKFKFSLRLNEMFILGLSEDEWRDAITSNDRKTLTNHLYRVQTLSPGDYRFRLHKDIASEFNQTQYALRHAIICKSIKSLFSLNPHKVRISPIGEIDPVDD

SEQ ID NO: 5996 - protein, 1256 aa, synthetic construct
  REGION 1..1256: note = Synthetic
MKVLGLDLGVASIGWALIELDDNLRPVEICGLGSRIVNLAVNEDSDFIKGKGESVNSQRTLKRTQRKGFRRFEMRRDNLLVLLSHPGMVDKDNSLLSLPPLELWHLRARAATDGERLSLPELGRVLRHLNAKRGYKHAKTSSDSESKDTAYVEAINNRYAELKESGLTIGQKFFAELQESVQTTPNGHKVVSARLSEGDPYSPSHLLPRQAHIDEYDRIMDVQKEYYPEILTTEVIERLRRAIFFQRPLKSCKHLVSDCEFISHTGSDGNTYRPKVAPSTSPLAEVTRIWEAVNNIRLSNRHNKPRKIKNIETGLFSDDIPEEKSRDWRLLQREFIPDSEERLKIFQFLMDNPKMSSKDLLKILGLKVADGFTPNIDSRRGLKGNVTRCEIKKALGDTPGAESLLRFVLKEEQAVDNETGEITRRISGDFKDEPFYRLWHLLYSVEDKECLTKALRKQFGITDPATIGCLYNLDLKNAGFTNKSAQFMRRILPYLAEGEMYSEACAHAGFNHSGYITAEENAARKLDTSLSPLRKNSLRQPTVEKVLNQMINLVNSIVEEFGPIDEIRVELARELKKSKEERANASSDIAAAEKRNDKFAKLILQYGIKPSRNKIQKYRMWKEADERCVYCGTQLSIQAFLSGEDTEVEHIIPRSLLFDDSFSNKVCSCRRCNQEKKARTAFDFMSSRGEEELQKYLVRIKNMFEKKEDRISKTKYTRLQMTESEIPKDFIARDLRETQYISRKAMEILRRICRNVYASSGSVTDFFRHAWGYDNILHDLNIPLYEKGDLVVEEDYEHKGQIHKRRRIVDWNKRLDHRHHAIDALTVALTRQGYVQRLNNLNTQREFMRGDIENSGARFKDSHRLLTQWADSRPHFPVSRVADAIDAVAVSFKAGKKVATLGKAQKRADGTKSRPLVPRAPMHEESIYGKMLYPIGEKDLKYCLSHIPMVADKEIRERLESILRDNDGDVKKAIKWLKKNPVINEKTGEERTAFKCFEERMVIRYKLSTLKANQIDKIVDKAVRELVRARYDECGSDKAFEQSLATAPLRFNPWSAPIKHVRCFAHLAPESTIAIRHDGERAVGYAKSGNNHHAAFYRKPDGSIEQMVVQFWTALGRKNIGLPPVIRDPKAAWAHIENLPSGTKIEEIAASLPGHDWELIQSLQSNEMFVMGLSDDEWRDALAGNRNLLSRHLYRVRVVSENFYVFRLHTYTSSEVNQSHLNMGTAIRSRSINSFLGLNPHKVKITPTGKIIPIDD

SEQ ID NO: 5997 - protein, 1048 aa, synthetic construct
  REGION 1..1048: note = Synthetic
MIRLSNKEETLAAMRLGLDIGTNSIGWCLLNLDDSGDPISIFKTGVRIFNDGRDPKSLTSLKANRRQARSARRRRDRFLQRQSYLINEMVRRGLMPEDENERKSLALKDPWQIRKSALDNELNPFDVGRAFFHINQRRGFKSNRKSQDNEAGVVKQSIAELEMRLFETGARTLGEFLADRNASGKTVRARRLGNQTSALYDLYPNRYMLEKEFDEIWSSQALYNPSLFSDEAKDAVKGIIFYQRKLKPQEVGRCTLIPEEERIPKCLPSFQRFRIYQELANLSWLDRDGKAHQVISSMEARDALFEELEAKKKVTFKRMRRILKRMNVFDFDASFNLESDIRQHLDGNMTSCLMRSDDLIGSAWDSMNEDDQDALIKMLNDNQIDDEEVEMSLSSDFGLTKEQIEACLDVRLPDGHGALSKSAIDKILPILKDQGLGYYEAVGEAGFGEANLYDPNAPLSNCLEYYGKALSGHVMNASGKPEERDEARYGSITNPSVHISLNQIRQVVNEIIRLYGKPDEIVLEIGRDLPMGADGKRELKNRQKRNQDKNEEARSALKRLGVIDTRKNRQKFQLWEQLASDPTERCCPFTGRMISVSDLFSDKIEVEHLLPFSSTLDDSMSNKVVCFREANRVKGKRSPFEAFGSSPDRYVWEDILDRSKRLPGSKRWRFLPNAMKMFEEEGGFMERHLNDMRYISRYTSQYLSTILPKNKIWVVTGRLTSMLRGFWGLNSVLRGHNDDAEGTSKKTRDDHRHHAVDAVVIAMTSRGLLQAISKSARRSEIDWIDHLFHDRIDPWDGFRDEVKTNIDNIIVSHRSRKKYQGQLHNDTAYGLVEHNENGASTVVRRKPVDGFKSLSHVGEIRDHLIKKALEVELQSHSGKDFQSVISAWCGERGIKSLRIVEKITVIPIKDKNNLIYKGYKGDGNAYMEIYEEPGTGRWKSEIVSRFNAQPIKAFTPNWQKEHPTARLVMRLRKNDLIMLEEDDQSVIYYVQKITGIRVYLAPHFEANVDTRDRTADDQFNFTIKSASSLKKGKAKRVHVSATGLISEA

SEQ ID NO: 5998 - protein, 1035 aa, synthetic construct
  REGION 1..1035: note = Synthetic
MRRLGLDLGTNSIGWCLLDLGDDGEPVSIFRTGARIFSDGRDPKSLGSLKATRREARLTRRRRDRFIQRQKNLINALVKYGLMPADEIQRQALAYKDPYPIRKKALDEAIDPYEMGRAIFHINQRRGFKSNRKSADNEAGVVKQSIADLEMKLGEAGARTIGEFLADRQATNDTVRARRLSGTNALYEFYPDRYMLEQEFDTLWAKQAAFNPSLYIEAARERLKEIVFFQRKLKPQEVGRCIFLSDEDRISKALPSFQRFRIYQELSNLAWIDHDGVAHRITASLALRDHLFDELEHKKKLTFKAMRAILRKQGVVDYPVGFNLESDNRDHLIGNLTSCIMRDAKKMIGSAWDRLDEEEQDSFILMLQDDQKGDDEVRSILTQQYGLSDDVAEDCLDVRLPDGHGSLSKKAIDRILPVLRDQGLIYYDAVKEAGLGEANLYDPYAALSDKLDYYGKALAGHVMGASGKFEDSDEKRYGTISNPTVHIALNQVRAVVNELIRLHGKPDEVVIEIGRDLPMGADGKRELERFQKEGRAKNERARDELKKLGHIDSRESRQKFQLWEQLAKEPVDRCCPFTGKMMSISDLFSDKVEIEHLLPFSLTLDDSMANKTVCFRQANRDKGNRAPFDAFGNSPAGYDWQEILGRSQNLPYAKRWRFLPDAMKRFEADGGFLERQLNDTRYISRYTTEYISTIIPKNKIWVVTGRLTSLLRGFWGLNSILRGHNTDDGTPAKKSRDDHRHHAIDAIVVGMTSRGLLQKVSKAARRSEDLDLTRLFEGRIDPWDGFRDEVKKHIDAIIVSHRPRKKSQGALHNDTAYGIVEHAENGASTVVHRVPITSLGKQSDIEKVRDPLIKSALLNETAGLSGKSFENAVQKWCADNSIKSLRIVETVSIIPITDKEGVAYKGYKGDGNAYMDIYQDPTSSKWKGEIVSRFDANQKGFIPSWQSQFPTARLIMRLRINDLLKLQDGEIEEIYRVQRLSGSKILMAPHTEANVDARDRDKNDTFKLTSKSPGKLQSASARKVHISPTGLIREG

SEQ ID NO: 5999 - protein, 1038 aa, synthetic construct
  REGION 1..1038: note = Synthetic
LAKRRLGLDIGTNSIGWCLLDLDDNGEPKSIFRAGARIFNDGRDPKSLTSLKANRRVARSARRRRDRFIQRQSFLINELVRCGLMPKDEHERRTLALKDPWQIRKTALDRKMSAYDVGRAFFHINQRRGFKSNRKSQDNEAGVVKQSIAELEMRLSETGARTLGEFLADRHASGEPVRARRLGSQTSALYDLYPDRYMLEKEFDAIWSSQASFNPSLFSEGAKDTVKGIIFYQRKLKPQEVGRCTLIPEETRVSKSLPSFQRFRIYQELANLSWLDREGRAHPITSSLPARDALFNELEAKKKVTFKGMRRILKKMNVFDFDASFNLESDIRQHLDGNMTSCLMRSEDLLGAAWDSMSEDDQDALILMLNDDQMDDEEVEARLSSDHGLTKEQIEACLDVRLPDGHGALSKAAIDKILPILKDQGLGYYDAVREAGFGEANLYDPNAPLSDRLDYYGKALSGHVMGASGKPEDRDETRYGSISNPSVHIALNQIRQVVNEIIRLHGKPDEIVLEIGRDLPMGADGKRELQNLQKRNQDNNEEARAALSKHGVIDSRQNRQKFQLWEQLASDPTDRLCPFTGRMISLSDLFSDKVEVEHLLPFSSTLDDSMSNKVVCYREANRAKGKRSPFEAFGSSPEGYDWEEIIERSSRLPSGKRWRFLPNAMRIHEEEGGFMERHLNDMRYISRYTSQYLATIIPSKQIWVVTGRLTAMLRGFWGLNSVLRGHNEDEGGSVKKMRNDHRHHAVDAVVIAMTSRGLIQRISKSARRSEIDSIDHLFHDRIDPWKGFRDEVKTTIDGIIVSHRPRKKHQGQLHNDTAYGIVSHNKSGPSLVVRRRAVETFSSLNHVSEIRDPLIKSALEEELRGLSGKSFQDAITSWCDKRGIKSLRVLETVSVIPIEDKNGSVYKGYKGDGNAYMDIYEEPDTGKWKSEIISRFDAQPSKRFTPSWQREYPTARLVMRLRKNDLLQLSSGERKNVYYVQVLSGSRITLAPHNEADVDARNRSKEDPFLFIYKAASTLQSSNAKRVHISPTGLISEA

SEQ ID NO: 6000 - protein, 1099 aa, synthetic construct
  REGION 1..1099: note = Synthetic
MVTMSDAVSFSFDIGHASIGWAALAADGKVLGCGSVIFPKEDCQNFARAGLRRQRRHVAATRNRMKRLRQLFVEKGVLTVQEAYEQAQPSSGVMMPWLLAAQALEKGRQLTWRELWQVIRWYAHNRGYDGNAEWAGDGPTAEDTEKVQNAKQMMEDSGADSMAVAICRFLEVDLETGVLHGDKYFKGQNVAFPRETVRGEVRTILTQAESYLPGCDVTFIRMVMDELSPEEAKRFGLPERYRGGLLFGQMIPRFDNRIISTCPISGEKTPLKHCPEYYRYRWAELMANLAVEVDGVKRPLLPREREALHACMTEQGYLTKGQLKKALEEITGGSAKQVDDYFLHAEMEKALVLDPVRKEVTGSKLGPIWQTLSSKHQKIFANQFFRDGKIKLEDWRARLLKDGEDVSAFDAAVEEVVAQTKPRGKRKAEPLTVDALMTQVHRLGAAASGRAPYSRQLMQQAVEEVMAGLHPKAVKSDDPSNPQQRNGCLARTNEILERERGRRLDEQTNNHLVRHRMLMFRRLLEDLYQQYAGGDIRRVGPTTIEVARDMVEYSGMSAQDKAKLFGQKVAPFNRAEKYLREAFEDADIFKPITYNMIRKARIAMAQNWVCPYTGRSFGPQEIAYDQVDFEHIVPRSQKISDSLDGLVITFREVNKMKGNRLALDFVRQCAGTSVAVVYEDENSEIVSEKRFRQIVDGWYPKRDPRSLPNATDEDFIRWRRKQNLLRETYDEKDNDFTPRLLTFTSHLNKLAALEARKFWHAEAAKVDALRQVEPEHLVGHMQGSVTHRFRSDWKLLGCLAEVCPEVVEKVGDDSRLLPKAQIREITHLHHAVDAVAIGLTRQCFARLGYPVLEREKCQTILKRKASNNDERDWLASLGIFQFDHQGRHHLKPLDEDIRASLIAALAQKRVVQHVPASMSGLKVEQTQWRVLHGPDGDGKLTLRQRGPRENGHRRFKEAKEASSRVLGFAPTREESKLKPRQAGIVISENFGAAISDAGATVIPFHRVWNRLQELKGADGKPPLVIRRGQVIQVANGRYKGLWRIHSVKDNKTGVSLDMARPELVKAENKKAGCGMNVRLASLVKNGLRQYETTLTGDPM

SEQ ID NO: 6001 - protein, 1085 aa, synthetic construct
  REGION 1..1085: note = Synthetic
MDTPVTTPDVSFSFDIGDASIGWAALSTPPRAVYPKILGCGVLLFPKDDCQNHLRAQYRRQRRHIAATRNRISRIRKLLVEMGALTEEQAAEQKEGASGVMMPWLLAARALHGAKLTWTELWQVLRWYAHNRGYDGNARWARGGEEEKDTEKVQKASALMEQYGTSTMAETICAFLGVNPDDDKAHISEKAPYFKGESVAFRREIVRDEVTRIVRSQFGVLPGCDEGFLSLLTGRDLTAEEKKRFKLPARYAGGLLFGQMIPRFDNRIITKCPVTGEKTPLKHCTDYYRYRWARLLANLRVKEEGADDKRALTAPERAELTRRMEKTGGLTKTQLKKALEEITHADAKSLDDQFFSPETEKALVLDPVRDALSGAPFENVWPLVPEALQRRIAGEFFKSGRLSLADLLAAVRKAGADTTQMENAIRLDFLKAAKRKRKEPLTYEAYLADVKHVAEASGRAPYSRPVLRKVYEEVLSGMDPAAIADSQPPSAPEKRNGCIAITNEFLDREAEKRLDDMTNNHLVRQRMGMFRRLFGELFKTYAGSQPSRVAEVTIEVARDLQEYAGKNANERAALFSEKAKPFQKAEAVLRKGFEEAGIARHPTYSMIRKARIAMAQNWTCPYTGRHFSAADIANDRVDFEHIIPHASRRSDALEGLAITFKEINKAKGKRTALEFIRSGEEGLMTESRFRDYLDGLYPKYPPSRDASDEDKINWRRKQWFLREDYDERDAEFTKAALTVTSHLNKLAALEARKILRGSAKAAGMDAGSPEHRVAHMVGAITGEFRKDRNWDLLGCIVPVCPEIVDPLSPEKRHLPKGEIRNITHLHHAVDAITIGIARNIFPGHVVKREVCEAILSRRPNPAQRSTLESMGVFFFDKDGSAHLKDMPEELRQNIIDKLAECRVVQHVPRSKHGLRAELTQWGVKHYDAEADRVKVVQYTRDSANGNARKRKEKWKNPRKLLGYNPVGESKLKPRKAVVFIDVNFGIALLPEPVVLPFHKVWKRLGDLAAQNGGKIPTVLRQGDVIEVPNGRYKGRWQIRSTKDNAAGVAVSIAKPHLVETFKKNVLVSSLIKSGMTIVRQPLIGS

SEQ ID NO: 6002 - protein, 1179 aa, synthetic construct
  REGION 1..1179: note = Synthetic
MNKNVILGIDVGVASLGACVVEVDDAERPVGFLDGVSFIYPTPDGAAERRGHRAMRRGYRRKRLRLQALRRYLAELLNIPADFDGKPDGVKDPAHTDLVAGEDALRDARGNRLISPNSRTRLRAVGLSEALSAADLARAILHIAKNRGMRLTRVTGTSEEDEKARKEASVMVEQARATRREMAEHNAETPGMLLWLREQEAPAAHQRKPLRRRVGTSLSLQFVRAQVEEEFDRLLAFQRQFHPALTAEVCEILHEKVFFEKKPPKPEIGRCLYNPETDERLPLACDLFQQKRIYEEVNNLRIEYADASREKLTFDQRDLLVARLMAGEDLGVAQIKKLIGATERGLRLSLEGQAGRNTGPARKLLGHAVRRTLKEADARFAKRDENANAGRMVALYDALDDEHRQAFEKLLREEDDRERMVTALMRDYGIAQDEAENAADGIALPRGYGAAGLSATLDILEKLKADIIDSNTAAERAKLIPATAREIACKRLPYYGEIFPHLVRGRMAPDAKGYPAATIEEKFGRIPNPVVHVALNSLRKVVNALVKKGEKQGWVFKGVQIEMAREMKKTQEDRDKDARRIAREQAKNAEYDAITLAHNMPASRKNRRKLKLWEAQNKMCPYTGLSIDVSDLFSGKFDIDHTLPRSKTLDDSLYNLLVIHESVNKKKANRSPYDAFSGGLDVEGVPQRSYEQIVENVRRIPGIRHKEKLFRPDAMEKYEDQDAFAQRYKTDTSYIAKTAKQYLQCVFPHLRSKNGVEAINGFITDELRKRWGVMDLVQMVAHQQDPDLVEAPPTKEERAEGIKKGKNRDDHRHHLLDAAITACTPHDVVRKLQTISGSRNKHDLAERYKVPLPWGDFRDDLYDLIDQARTTHRANRELNGKLHMATNLGVVARFADGRYLVRQRKRFDASEFSSIEDVKKKLVVDPALMARLAKDMTSGEAVLFWASREPLADLQRHDERLREIAGRIEDLFMLQPTETTYEDVDKKTGAIEIRTRKFKEDERLTEAFRAYRQECLAAGRTPRRTVRLYGLDEAVMIAGAKGGALPARTFKPGSNAWLDIFRNAHGKPEFEVVRTIDAMRPGHVPQWQCHAGNDLLLRLFKGDTVRLRSKDGKTRLCVLATNSPGDWEFQPLNLSPHISRHPARKNFRFGFKALCDADPQLVVRDVLGRIVYESPRLNW

SEQ ID NO: 6003 - protein, 964 aa, synthetic construct
  REGION 1..964: note = Synthetic
VGTSLALQFVRSQLEDELDALLAFQHPFHPALDADTCRTLHEKVFFEQEPPKPEIGRCLYNPETEERLPLACDLFQQKRIYEEVNNLRIEYADASRAKLTRDQRDLLVARLMAGEDLGVAKIKKLIGATERGVRLSLEGQAGRNAGPAKKLEGHAIRRTLSDADGRFAALGQGGAHMVALYDGLDEERRTGFEKLLRDEDDRDRMVLALMRDYAVAGAEAENAADGIALRRGYAATGLTATFEILEKLKADIIDSNTAAEQAGLVAASAREMVCKRLPYYGEVFPHLVRGRMSPETRGYPAATIEEKFGRIPNPVVHVALNSLRKVVNALVKKGEKQGWVFKRVQIEMAREMKKTQEDRDKDSRRIAREQAKNAEYDAITLAHQRPASRKNRRKLKLWEAQNRMCPYTGLSIDVADLFSGKFDIDHTLPRSKTLDDSLYNLLVIHENVNKAKGNKSPFEAFAGGLNVAGVPARSYEQIVETVRRIPGIRHKEKLFRPDAMDRFEDQDAFARRYKTDTSYIAKAAKQYLQCVFPHLRPTGGVEAINGFITDDLRKRWGVMDLVQQVAHQQDPDLVEAPPTKEERADGTKRGKNRDDHRHHLLDAAVTACTPRDVVQKLQTISASRAKHDMAERYRVPLPWADFRDDLYELIDQARTTHRPNRELNGKLHMATNLGVVARFADGRYLVRQRKRFDPGEFSSLDDLKKKLVVDPALIARLEKDMTAGQAVLFWAAREPLADLQRHHEMLGDIAGNIERLFALQPSEATYEDVDRKTGAVEIRTRKVKEDERLAAAFAAYRDECLTRGLSPRRTVRLYGLDEAVMIGGGDGGKLPSRTFKPGSNAWLDIFRDGSGKPGFEVVRTIDAMRPGYVPQWQQHDSNDLLLRLFKGDTVRLRSKDGKTRLCVLATNSPGDWEFQPLNLSSHISRHPARKNFRFGFKALCDADPQLVVRDVLGRIVYETSRLNW

SEQ ID NO: 6004 - protein, 1181 aa, synthetic construct
  REGION 1..1181: note = Synthetic
MSAKKSTNVALGVDVGVASLALCVVELDAKKNPIGILDGVSFVYPAADSAAERRQHRSARNGYQHKSSRLKEIRNLLISKFGLMPDFDGKSSGISDCTPTDLALEDEGPLDKNGKRLVSPNSRSRLRSAGLTQKLTQADLARAIMHIAKNRGMRLTRVLGTSDEDQKARKEASVMALQARETSRLMQSENAETPGQLLWKRELAATASHLRLPLRRRVGTSLRLQFVRGQLEHELSALLAAQKSWHTELTTDFCAQLTELVFFENPAPPPEIGRCTYNPETEARIPVSSDIFQQKRIYEEVNNLRIEDKDGGRTKLTLEQRDIIAGRLMMGDDLSASQIRNLLEITSKNRKVSIEGRKVNTPSKKLMGHAIMSALVAADERYEYESGNHGRLCELYMSLEDYQREDFEKALREEKDRQTLVTILCSGYGVEYVEAENAADTIALPRGYASTGITATIELLENLKKQVVDNTTAADYARLVPVVGRNLTFDRLPYYGIIFPHLVRGRMSPEDRGYPAATNEQRYGRIPNSVVHNSLNAIRKVVNAFLKKAKRNGWVVSSVRVELARELKKSQEQRDKDALRMHREQVQNAAYDAALVKLGVTASRKNRRKLRLWEAQERVCPYTGVAIAEKDLFNGKFDLDHILPRAKTLDDGLGNLLLVHEAANKVKGDKTPFEAFHAGLRIDGLPARTYGEILNAIEKTKGLASKKWRFLPDAMDKFDDENDFQQRYKSDTSYIAKTALHYILTVFPDLRGTSGGQAVNGQITSELRNRWGLGDLVQEVAHHQDPLLMEAPPTREERELAKKKAKNRDDHRHHLLDAAIAACAPRNVVQQLQSIAARPWSKHQIGVAMPWPEFRNDLYDMIWNCQTTHQPNRSLNKQLHQATGLGVVARLDDWQFVVRTRKRLDIQDFGTSDKLFKDLRVDAKLIRSLVKGIEAGTVEVLGRATDLIGELTRHGEDLENLALEFRSLLDEQPSRQEYEYVDKKTGETMTGSRQIPADVRLGLAFSAYRQRCLDSGIQPRRTVSLYCVKTAIVVATNEKDHPARVYRPGSNAWLDVYRNMEGELDFEIVRTIDAMRPGWKPQWQSCSENSRVLRLFNGDTVRLQGKDGKRRLCTLLTTSTGGGTSTRGDFAFQPINLSSHIGKHPARNTFRFSFKSLMEAQPELVVRDCWGRVTYESGRLN

SEQ ID NO: 6005 - protein, 1025 aa, synthetic construct
  REGION 1..1025: note = Synthetic
MAWRLGLDLGTNSIGWCVLELGADSLPCNLLGAGVRIFSDGREPAAKGRIGDSLAVVRRGARGMRRNRDRRISRKKTLADYLIGLGALQKNSPHCPYECRAKAVSGTVTKDELGRALFHLGQRRGFLSNRKTDSDEETAFKSKISALRAVLAERKQTLGQYLFDREQTGQSLRFRGDEGDYYPDRRMYKEEFALIRDKQAAFFTPEQWDAIDNIIFHQRPLKPVEKGKCQFYHDQDRAHAGLPIAHTYRIAQEVNNLRWLDEGLAPHRLDAEQRHVLYTVLHQQKSLSWSAMRSKLKRADGTPLFPKASKFNFEDADNRRTGLKGNDTYIDLSGLFGALWEKLDQTRQNDLVELMYDAAKDEEVAGYCKSIGFTDEQAAQACKYKLPSATYKVSRHFMQQIIPPMMEEGLRYDEAVLSLGLHHSYDEDGEIFEKLPYYGAVLLGSTIGGNPSASEDEPERKYGKIGNPTVHVALNQIRRVVNALVDRYGLPDQIHLEVGRELKQSRDDRAEMSKKIAKNEKENDRIREKCRKLGLAHPAAMDVKKYKLWEELGTDRLSRQCPFSGASISAAMLFNGDVEIEHILPFSQTKDNGMMNMTLATRQANRIKRNRCPYDARHDFAAQGWAWEDILERAKKLPQKKRDRFGESASQEWLDTTAFLDRQVTDNSYIAKIARRYLGKLCGGNNVVCVSGQLSGLLRGKWRLNNLLNEEGKKMRDDHRHHAVDAIVVGMTSRSIIQGVNTNRTDDGRIHYDVPALPQGLYQQAQALLNTMIISVKPDHGKNGKFFNDTAYGFVGEEQRDADLKDYNLVVRKPIDSLSNKEITNIRDPYIRGLVINYFYQQTGENPKDSKLDDKKRAALLHDFGHKEWPRISGQARPMRSIRILVANQKVEPIPSAPYKGYAIPNFICCDIYRVPKGKAGAWKKGEYKYEGVFWSYIDIQNGEKDDKKPHPAAKFLMRLYKDDMVVLERNGKKDVMRVYGYSTTNNCLDLRPQYQTDGKQTFVGINTVASTMKKINLSPDGKVA

SEQ ID NO: 6006 - protein, 1048 aa, synthetic construct
  REGION 1..1048: note = Synthetic
MDKAPGTDIGELGFDPDTFATALMTSEEFRSKDRVIWAGIDIGVASTGLCLVDILNHEIVLMASHLFKSPVVDKKKANAAPESLASVRRGARSVRRNIMREGRRKKAIRAVLADSDLIPADADGEWFAARRDERTVVKLRSKALGHPLSSRELARVLYSFASHRGYIDYGKSDKEDDAGKVKKALAANHAALADGGCKTFGQYLAGQPRSRNRAGDYSYTTDIGMTIDEVRTIFARQRELGSEIATEALEERYIAELTWLTDTSKRDMSTYLKVGFCTYRGAPYRRGATSTISFEMVRAHQTLCNTVILHSDGTSSTIPGNTRIEIVRELFAVKKSVKPLKWSGLRRRLGLAEGDSFKGRPLEEEKRDCIALPAWAVLCSGLYEGHRDLLERLHDHIDDADAVCSALTFASSAASLAGRLAPLALTDDEVEAIIDLPCSARLFSGYASASLEALQMLRGTFEDPCVTSLSQAEEDSGLAQMRAILAEEHGETADGLLCAFSDWDPTCKNPVVLRATAQVRRMVNSAIRHYGLPDVIRVEVARDLKRSKHERQIVAESNRARLKLNEQAKRDIVEFLGLPDDHYVRGRDLDMVKLYREQGGKDPYTGSGIDFRRMLEEHGYAEIDHILPISRTCDNSQANKVLCLTKSNRDKSNRSPYEWMTSGEASAPDWNVFCGRMERWAKMCEPRRYARKKLANLTCENLAERAGNFIDRNLNDTRYMSVALAKWLRECLPFARDGHEHVFCVAGGATALMRNVWGIGITGPDGKKNRDDDRHHAVDAAVIACCDSSIVKNVALVNEGHARADVRQRLFRDSLPYPEFKEQVDAWIPCIVPTLTLPSTVTGSVLKDTVYPYLGRDEAGKDLYLTVKRDKDGRIVERKVNKATTMWKDGHGGCRKYDEMCALDAVFDASAGKRGRWAFDPVYCIDIPHRDAERRTMRAFSKEKAIDLWDTVEVSEDAPRMTIRRGDVLVCDGKAARFHSYNVSNGAIFTFSNQSYNPKQLQFTGPLSNERFPTQSKWRPDILIMQEDCLGLCWLSFLAQRAATMQMK

SEQ ID NO: 6007 - protein, 1038 aa, synthetic construct
  REGION 1..1038: note = Synthetic
MVEYSDPREFGFHPETVMTALMPYEQFSSKTRRLILGIDIGIASVGVCLIDIRNHEIILMASHIFKAPVEGKQKDISARPSGASIRRGYRSVRRTTKRRKNRKKVVRDIEKKYVLIPDDADGQWFAIRKDEPDVLHLRGKALLYKLNARELARILYAFAGRRGYIDHGKGTTDDDSGKVKKALSENRKILDENGYETIAQYLLKQPTSRNREGDYRYMVDIEMVTDEVHTIFRHQRDLGSDIATEELEGEYLSALRRLTDTSARNKKIYSRVGYCTYLGAPEKRAASSLISFEMVRAYEKLSNIKIEHQGREATYISPEKRNEIVESLFAVSKNPKPLKWSQLREKLGMQSSDSFDSRLPTDEKSDCIKIPAWNALCTGLFTSNRALLDRLHDDTDIADAVSSALTYASSGESLRNALENLSLDLSEQDIDSLLDLPYASKLFSGYCSTGVRALQMLRDAFKDPQIEKLYDAEMATGLYEARQALAAERNESKDGLLCPYLEFDPTCTNPVVLRATAQVRRMINSIIRHYGLPNIIRVEVAKDLKRSKHEKAIIAATNKANKDSNEQAKKDLVAFYGLPNDAHVSSADFEKMRLYREQFGQDPYTGKGINLERMLNDRDYVEIDHILPLSRSCDDSKSNKVLCLTKSNRDKANRTPYEWMTSGEPSAPDFGDFCRRMDAWAGKGKSAHYTKSKLSKLKNSTFGKEEQKFIDRNLNDTRYMSRQLAMWVRECLPFPDDKRQHVFCVAGAATSLMRRIWGIGIVDKKGKKDRSDDRHHAVNAAVIACCSPEIVKGIARVNSGRSNIKERERLRYESMPYPEFKDQVEAWIPCIVPTRTVSRTATGSLLKDTVYPYVGVDDRGKDLYRRNGKIEPASTLWKDGSGGCKLYDGVYGLVAVFDEGMRKSGGWRFDPVYYIDVPNVRQDFIREFTKDLSIDYWTKVQLKGDEPRIFLKQGDVLLQDGCVMRYYKYNVSNGVISSYSKIGEKSVPLQKTGPLSEEKFPKQSKWDSSLTVMQEDCLGLCWLRFLSNRAGKFENFPV

SEQ ID NO: 6008 - protein, 1027 aa, synthetic construct
  REGION 1..1027: note = Synthetic
MAAYEDPCELGFDPGLVKTALMSRGQFCSKPRKLILGIDMGIAGIGICLMDEVNREIVLMATHLFDCPWNPKNKTSLASARRQARSQRRNIARRAARKRHIRKILMAHGVIPEDATAEWFSVRKGDQDNIRVRVKGLSEILDGRELARVLYGFASRRGYIDHGKADNDKDAGKVKKALKENAEIMEANGYETFAQYLITQPRIRNRQDDYTHCVDIGMVVDEVHTIFRHQRELGNNLATESLEGEYLAALRWLTDTTKRDRIIYSKVGYCTYLGEPVKRAPKSSISSEMVRAYQTLANVKVEHIGGAATQISPTERNRIVHDLFKVSKNPKPLKWSQLRRKLGLADTATFAGIRQSDEAKDICVKVPAWNALCSTLHDLNPTLLSRLHDDTDLADAVCAAATFASSSESFATRIAELADGLSKDDVEALLELPYGSKLFTGYGSTSLKALQMLRDAFEDTAIDRLYDAEVATGLHDARKALAAERNVSDDGLLKPYSSYSPICTNPVVLRSCAQLRRIINSIIRHYGLPDTIRVEVAKELKHTKHEKELIDDGNRYNRRENEKAKDDIVQFFGLADSDHVRGRDLEKVRLYNEQGGKDPYTGQGIDFGRMLTEKGYVEINHILPFSRSCDNSKTNKVLVLTKSNRDKSNRTPYEWMTSGEPTAPNWDEFCIRMDVWASGKEPKHYYSSKLAKLKEDNFTDNIDTFISRNLNDTRYMSKDVAKWLADCLPFPADGRRHVFCVSGAATALMRGIWRIGILDGDVKKNREDDRHYAVDAAVIAACTPSIVKGIALISEEHASNRDADRLLDGSLPYPEYRDQVKAWIPCIVPTYSPARTATGALFKENAFSYKGIDGKGKDLIKKKKGALGPCTTAWKDGKGTARAYDGQYGLLAVYDESAARWLFDPLYYIDVQKRKAEEPFIRKFSKDLSIDYWEKIPLTGNEPSLLLKRGVVLIQDGTVGRYYGYDIAHNTVKLSSSGKVPFQKTGPLAAEKFPTPTKWTDELKVMQEDCLGLCWLEFLTERADRCQ

SEQ ID NO: 6009 - protein, 1027 aa, synthetic construct
  REGION 1..1027: note = Synthetic
MAAFEDPCEHGFDPDLVKTALMSREQFSSKPRKLILGIDMGIAGVGVCLMDELNHEIVLMATHLFDCPWNPKNKTSLASARRQARSQRRNIARRAARKRHIRKILMAHGVIPENATAEWFSIRKGDQDNIRLRVKGLSEVLDSRDLARVLYGFAGRRGYIDHGKADNDKDAGKVKKALKANAEIMEANGYETFAQYLITQPKIRNRQNDYIHTIDIDMVVDEVHAIFCHQRELGNDLATESLEGEYLAALRWLTDTTMRDRIIYSKVGYCTYLGEPNKRGPKSSISSEMVRAYQTLANVKIEHIGSAATQISPLVRNQIVHDLFKVSKNPKPLKWSQLRKRLGLADTDTFAGIRQSDEAKDICVKVPAWNALCSTLHDLNPALLNRLHDDIDLADAVCAAATFASSSESFATRIAERTDGFAKEDMEALLELPYGSKLFTGYGSTSLKALQMLRDAFEDTNINRLYDAEVATGLYDARKALAAKRNASDDGLLMPYSSYSPICTNPVVLRSCAQLRRVVNSIIRHYGLPDTIRVEVANDLKRTEHEKKLITSGNIYNRRTNEKAKDDIAEFFGLQSTDQVKGRDLEKVRLYDEQSGKDPYTGQGIDFGRMLTERDYVEVDHVLPFSRSCDNSKTNKVLVLTKSNRDKANRTPYEWMTSGEPSAPNWDEFCIRMDVWAKGKEPKHYYSAKLAKLKEDSFADNVESFISRNLNDTRYMSKEIAKWLADCLPFPDDGRRHVYCVSGAATALMRRIWRIGILDDNGKKNREDDRHYAVDAAVIAACTPSIVKGIALISEEHATHRDADRLLNRSLPYSEYRNQVKAWIPCIVPTYSPNRTATGALFEENTYSYRGVNEKGKDLIKKKKGKLGPCTTAWKDGKGSAKAYDKQYSLLAVYDDSTSRWLIDPLYYIDVQKRKHEEPFIRKFSKNLSIDYWEKIPLTGTEQTLFLKPGVVLTQDGLVGRLHSYDISDNKVRMYYARGETSFQKTGPLAGEKFPTFSKWTDDLKVMQEDCLGLCWLEFLTERAGSC

SEQ ID NO: 6010 - protein, 1027 aa, synthetic construct
  REGION 1..1027: note = Synthetic
MAAFADPRESGFDPELVKTALMSREQFSSKPRKLVLGIDMGIADIGICLMDGLNQEIVLMATHLFDCPRNPKDQTSLASTRRQARSQRRNIARRAARKKHIREILIAHGVIPEGADAEWFSVRKGERDNIQLRVKGLSEVLSCRELARILYGFASRRGYIDHGKADNDKDAGKVKKALEANAEIMEANGYETFAQYLITQTKIRNRQNDYSHTIDIDMVVDEVHTIFRHQRELGNELATESLEGEYLVALRWLTDTTKRDRIIYSKVGYCTYLGEPVKRGPKSSISSEMVRAYQTLANVKIEHIGGPATQIAPAVRNQIVHELFKVSKNPKPLKWSQLRKKLDLADTATFAGIRQSDEAKDACVKIPAWNALCSTLHALNPALLNRLHDDIDLADEVCAAATFASSSESFATRIAERTDGFTKEDMDALLELPYGSKLFTGYGSTSLKALRMLRDAFEDTKIERLYDAEVATGLYDAREALAAKRNAPDNGFLKPYSSYSPICTNPVVLRSCAQLRRIINSIIRHYGLPDTIRVEVANDLKHTEHEKKIITSGNIFNRRTNEKAKDDIVQFFGLPDSAHVKGRDLEKVRLYNEQGGKDPYTGQGIDFGRMLTEKDYVEIDHVLPFSRSCDNSKTNNVLVLTKSNRDKANRTPYEWMTSGEPTAPNWDEFCIRMNVWAKGKDPKHYYSSKLAKLKEENFTNNLDTFISRNLNDTRYMSKDVAKWLTDCLPFPDDGRRHVFCVSGAATGLMRRVWRIGILDEDGKKDRDDDRHHAVDAAVIAACTPSVVKSIALISEEHATHRDADRLLNRSLPYPEFKNQVDAWIPCIVPTYSPTRTATGALFKENAYSYRGVDEKGKDLIKKKKGALGPCTTAWKDGKGTARAYDGQYGLLAVYNESTSRWLLDPLYYIDVQRRKAEKPFIRKFSKDLSIDYWEKIPLTGDEQTLFLKPGDVLAQDGLVGRLHSYDISVNTVKMYYARGEISFQKTGPLAAERFPTLSKWNDGLKIMQEDCLGLCWLEFLTDRAASC

SEQ ID NO: 6011 - protein, 783 aa, synthetic construct
  REGION 1..783: note = Synthetic
MVLHTQGRTGQHPAARQGPERDSQRPRARSHSLRLRSRRGYIDYGKADNDKDAGKVKKALKANAEVMEANGYETFAQYLITQSRIRNRQATTPIVWISTWWWTRFIPFSAISASWETNLPPNRLKGSISPPCVGLQIRQARPDHLLQSGPLYLSRRARQTRPEIVHLLRDVRAYQTLANVKIEHIGGSATQIAPAVRNQIVHELFKVSKNPKPLKWSQLRKKLDLADTATFAGIRQSDEKNDACVTAPAWNALCSTLRDLNPTLLNRLHDDIDLADAVCAAATFASSSEAFASRIAELTDGLSKEDVEALLELPYGSKLFTGYGSTSLKALQMLRNAFEDTKIERLYDAEVATGLYDAREALAAKRNAPDNGFLKPYSSYSPICTNPVVLRSCAQLRRIINSIIRHYGLPDTIRVEVANDLKHTKREKKLITSGNIYNRKVNEKAKDDIVEFLGLANADRVRGRDLEKVRLYNEQGGKDPYTGRGIDFGRMLTEKSYVEVDHILPFSRSCDNSKTNKVLVLTKSNRDKANRTPYEWMTSGEPTAPNWDEFCIRMDVWASGKEPKHYYSSKLAKLKEDNFTNNIDSFISRNLNDTRYMSKDVAKWLADCLPFPKDGRRHVFCVSGAATGLMRRVWRIGILDENGKKDREDDRHHAVDAAVIAACTPSVVKSIALISEEHATHRDPHRLLNRSLPYPEFKDQVDAWIPCIVPTYSPTRNATGALFKENAYSYKGIDEKGKDLIKKKKGEAGPCTTAWKDGKGTARAYDGSTACLPFITNRPHVGF

SEQ ID NO: 6012 - protein, 644 aa, synthetic construct
  REGION 1..644: note = Synthetic
MVEYSDPRDFGFRPETVMTALMPYEQFSSKTRRLILGIDMGIASVGVCLIDIRNHEIVLMASHIFKAPVEGKQKDISARQSGASIRRGYRSVRRTTKRRKNRKKAVRDIEKKYILIPDDADGQWFAIRKGEPDVLHLRGKALLYKLNGRELARILYAFADRRGYIDHGKGATDDDSGKVKKALSVNRKILDENGYETIAQYLLKQPTSRNREGDYRYMVDIEMVTDEVHTIFRHQRDLGSDIATEELEGEYLSALRWLTDTSARDEKIYSRVGYCTYLGAPEKRAASSLISFEMVRAYEKLSNIKIEHQGREATYISPEKRNEIVESLFAVSKNPKPLKWSQLREKLGMQSSDSFDSRLPADEKSDCIKIPAWNTLCMGLFTSNRALLDRFHDDTDVADAVCSALTYASAGESLRNALENLSLDLSEQDIDSLLDLPYASKLFSGYCSTGVRALQMLRDAFKDPQIEKLYDAEKATGLYEARQALAAERNESRDGLLCPYLEFDSTCTNPVVLRATAQVRRMINSIIRHYGLPDVIRVEVAKDLKRSKHEKAIIAATNKANKDSNEQAKKDLVAFYGLPNDAHVSSADFEKMWLYREQFGQDPYTGKGINLERMLNDRDYVEIDHILPFSRSCDAAVPSVELLS

SEQ ID NO: 6013 - protein, 1027 aa, synthetic construct
  REGION 1..1027: note = Synthetic
MAAFEDPRESGFDPELVKTALMSREQFTSKPRKLILGIDMGIESVGICLMDELNHEIVLMASHLFDCPWVKKTKTSLAAARRQARSQRRNIARRAARKKHIRKILMAHGVIPEGTAAEWFSVRKGEQDNIQLRVKGLGEVLTNRELARVLYGFASRRGYIDHGKADNDKDAGKVKKALKANAEIVQANGYETFAQYLITQPRIRNRQDDYAHCVDIDMVVDEIHIIFRHQRELGNGLATESLEGEYLAALRWLTDTTKRDRIIYSKVGYCTYLGEPVKRAPKSSISSEMVRAYQTLANVKIEHIGGPATQIAPAVRYQIVHDLFKVSKNPKPMKWSQLRKKLDLADTATFAGVRLSDEKKDICVEVPAWNALCSTLHNLNPTLLDRLHDDVDLADAVCAAATFASSSEAFATRLAELTDELSKEDVEALLELPYGSKLFTGYGSTSLKALQMLRDAFEDTKIECLYDAEVATGLYDARKALAAERNVSDDGLLKPYSKYSPICTNPVVLRSCAQLRRVVNSIIRHYGLPDTIRVDVAKELKRTKHEKKLVDDGNKYNEKVKKKAADDIVQFFGLPDSAHVKGRDLEKVRLYNEQGGKDPYTGQGIDFRRMLTEKGYVEIDHILPYSRSCDNSRINKVLVLTKSNRDKANRTPYEWMTSGEPTAPNWDEFCIRMDVWASGKEPKHYYSSKLAKLKEDNFTNNIDSFISRNLNDTRYMSKDVAKWLADCLPFPEDGRKHVFCVSGAATALMRGIWRIGILDDDGKKNREDDRHHAVDAAAIAACTPSIVKSIALISEEHATHRDADQLLNGSLPYPEYRDQVKAWIPCVVPTYSPARTATGALFEANTYSYKGINEKGKDLIKKKKGALSPCTTAWKDGKGTAKAYDKQYGLFAVYDESISRWLIDPLYYIDVQKRKTEEPFMRKVSKGVSIDYWDKIPLTGNERTLLLKPGDVLTQDGFVGRLNSFDISNNSVEMYYSRGKISFQKTGPLANEKFPTFSKWTDELRVMQEDCLGLCWLEFLTNRANRC

SEQ ID NO: 6014 - protein, 614 aa, synthetic construct
  REGION 1..614: note = Synthetic
MVRAYQTLANVKIEHIGAPATQIAPAVRSQIVHELFKVSKNPKPLKWSQLRKKLDLADTDTFAGIRQSDEGKDACVKLPAWNTLCSTLHDLNPALLNRLHDDIDLADAICSAATFASSSEAFATRIAELTDGLSKEDMESLLELPYGSKLFAGYGSTSLKALQMLRGAFEDTNIKRLYDAEVATGLYDARKALAAKRNTPDDGLLKPYSKYSPICTNPVVLRSCAQLRRIINSVIRHYGLPDTIRVEVANELKHTKREKKLITSGNIYNRKVNEKAKDDIVEFLGLANADRVRGRDLEKVRLYNEQGGKDPYTGQGINFGRMLTEKDYVEVDHILPFSRSCDNSKTNKVLVLTKSNRDKANRTPYEWMTSGEPTAPNWDEFCIRMDVWASGKEPKHYYSSKLAKLKEDNFTNNIDSFISRNLNDTRYMSKDVAKWLADCLPFPKDGRRHVFCVSGAATGLMRRVWRIGILDENGKKDREDDRHHAVDAAVIAACTPSLVKIIALISEEHATHRDADRLLNRSLPYPEFKDQVDAWIPCIVPTYSPTRNATGALFKENAYSYKGIDEKGKDLIKKKKGEAGPCTPPGKTARGLPGLTMGSTACLPFITNRPHVGF

SEQ ID NO: 6015 - protein, 502 aa, synthetic construct
  REGION 1..502: note = Synthetic
MMEYSDPRDFGFRPETVMTALMPYEQFSSKTRRLILGIDMGIASVGVCLIDIRNHEIVLMASHIFKAPVEGKQKDISARQSGASIRRGYRSVRRTTKRRKNRKKAVRDIEKKYILIPDDADGQWFAIRKGEPDVLHLRGKALLYKLNGRELARILYAFADRRGYIDHGKGATDDDSGKVKKALSVNRKILDENGYETIAQYLLKQPTSRNREGDYRYMVDIEMVTDEVHTIFRHQRDLGSDIATEELEGEYLSALRWLTDTSARDKKIYSRVGYCTYLGAPEKRAASSLISFEMVRAYEKLSNIKIEHQGREATYISPEKRNEIVASLFAVSKNPKPLKWSQLREKLDMQSSDSFDSRLPTDEKDDCIKIPAWNALCTGLFMSNRALLDRFHDDTDAADAVCSALTYASSGESLRNALENLSLDLSEQDIDSLLDLPYASKLFSGYCSAGVRALQMLRDAFKDPQIEKLYNAEKATGLYEARQALAAARETNIKSNVMSATI

SEQ ID NO: 6016 - protein, 1239 aa, synthetic construct
  REGION 1..1239: note = Synthetic
MSQHRRYRIGIDVGLNSVGLAAVEIDANHDNPLDEIPISILNAQSVIHDGGVDPDEAKSATSRRASAGVARRTRRLHKSKRQRLAKLDEVLNELGYPVEDESQFPAGSNPYIAWQVRAKLAETFIPDVETRKRMISIAIRHIARHRGWRNPYSSVADAERMSHTPSPFMVEYAKKLDFEINDRRTNGFYHSPWQSVDEEGKRLSKSELEKQPKIEDWNDNPINGKTIAQLVVSSLEPQTKIRRDLTHGLQTESTLNIQTEKLHQSDYIHELETIFERQHVDQTTQEQLLEATFHTKNPKAVGAAAKLVGKDALDSRYYRASRATPAFEEYRVMAAIDTLRIREHGTERQLTTDERRKLFDFIKGLPSKKTKNEPSISSLTWGDVADFLGIQRIDLRGLGSLKDGEPVSAKQPPVIETNDIMQKAPDPIAAWWSQANTKERDRFVEFMSNAGAIKDTSDEVRNIDAEISQLLEELTGSELESLDKITLTSGRAAYSSQTLRNITNYMYETGCDLTTARQELYHVGKNWAPPAPPIYEHTGNPSVDRTFSIIHRWLCNMRDQYGEPETVNIEYVRDGFSSTSTQLAEQRERDRRYADNLKMLSNYEGASSRSDVRRIKALQRQNCQCIYCGRTITFETCQMDHVLPRKGPGSDSKFENLVATCGECNKSKSDTLYMNWAKTYPNTNLQDVLRRIQEWSKDGWMTDKRWRQYKEALILRLEATEKQEPLDNRSMESVSYMARELRNRIYGFYGWHDQDDALKQGRQRVFVSSGSMTAAARRTPFESPLIKGADEETYESSLPWLDGMKGKTRLDRRHHAVDASIIAMMRPQIVKILTEAQEIRSEQHDKYRKGQTPDYVCKRRDYWRNWRGTPDTRDEEVFNYWAGEQLRTLTDLVSQKMADDEIPVIYPTRLRLGNGSAHKDTVVSMMTRKVGDELSITAINKAESGALYTALTRDSDFDWKTGLSANPNRRIRVHDKWFEADDTIKFLEPAVEVVLKNNTRARIDPEALDKVHSTLYVPVRGGIAEAGNSIHHVRFYKIPKLNSKGKQTGSIYAMLRVLTIDLAMNQYDKETGKKQDLFTLPLPESSLSRRFSEPKLRQALIDGTAEYLGWAVVDDELEIPAFANARITEEQAINGSFTDRLLHSFPGTHKFRFAGFSRNTEIAIRPVQLASEGLIETDENRKRQQLRLTQPNTEYSNSIKNVLKSGLHLKVNTLFQTGILVTRANSQGKQSIRFSTVEE

SEQ ID NO: 6017 - protein, 1022 aa, synthetic construct
  REGION 1..1022: note = Synthetic
MFLEAIMNYRLSLDLGTNSIGWAIYKLNEKDKPISIINAGVRVFTDSRDPQTGTSLAAERREKRGIRRNRDRFLKRKERLMQTLIKYNLMPENKEERKALEKLNPYELRSRALDEKLEPHEIGRALFHLNQNRGFKSNRKTETKDSDASIIKTSINEFQNMMENNNVRTPGEMLYKLYKENKPVKAKIYGKGKDAKYEIYCDRNMIEDEFEQICKAQSSLGNNITEKAFDEIKDIIFFQRDLLPTKIGKCSAIPSEDRAPKALPISQEYRILQTVTDLRIIKPDQTSVFLTPEQQKLLFEELNSKKQRDFNEIRKLFGLDSSYSFSHEHMSKIKGNETSSELRSTKRFGKKWDKFSIEEQTEIVKLLLEEPEENAVKKTLINKWDVTDEQAENIANANLPAGYMSYCEKALYQLSESMKNNKSLTEALQDNGYNNLNPQMDGSMRKLPYYAKVLERYIGTGSGDENDSEEIRYGRISNPTVHRGLNQLQRLVNKIIDKYGKPTQIVIELGRELKMSQQKKKEVLTKQKDNETLNKKYEEILSDIGERNTRKNRDALRLWEELGKNPMGRCCVYCGRTISITELISAEVEAEHILPFSRTLDNSLANKTVGHRRCNRNKHNKTPYEAFGNFKEWENILARAKYLPVNKRWRFAKDAMENFEKENSFIDRQLTDTQYYSKVARIFLTAVCKDVWSVNGRLTSLVRRWTGLNGILSATNEKDRNDHRHHAIDAMAIGLIDRSFLNAVSKKSAKNELENIDAVLSNRISMIPWEGFFEDAKKAILEIIVSHKQEHGKNNKLYDETAHGIKTNEEGDKNLVTRKLIAEMSLKEIENIRDNKIRQMILEALYGTDKKEHKKILEEFSKNTGIYKARYNKTQYNYEIIKHGTNRFYKACIKADYHHIDVYETREGKVSGEAVTYLDVMRNKMPDWKKIKPKPKLLLRLHKKDILKINENGMEKYYVILQLEPGEPNNRVVIAETTVGGKRTEIMKSKDLRKYINYNKIKKLKPKKVKVNEIGEIKELKY

SEQ ID NO: 6018 - protein, 1384 aa, synthetic construct
  REGION 1..1384: note = Synthetic
MKKILGLDLGTNSIGWALIEVDELNGPFQILAMGSRIIPLDADARDQFQKGQAISKNKDRTTARTQRKGYDRKQLKKSDDFKYSLKKILEKLNIFPTDELLNLPSLDLWKLRSNAVSNNEEISPKQLGRILYLLNQKRGYKSSRSEANADKKDTDYVVEVKGRYKLLKEKNQTLGQYFYDELSSANQNNTYFRVKEKVYPREAYIEEFDAIINTQKSKHSFLTDDVIHSLRNEIIYYQRKLKSQKGLVSICEFEGFETSYFDKKTQQDKTIFTGPKVAPRTSPLFQLCKIWEVVNNISIKIKNPEGSKYKWDDRIPTIEEKQTIVNHLLENENLSFAELLKILELKKEQVYANKQILKGIQGNTTYSAIHKITGNSEHVKFDTHTIPSKHFAVLIDKKTGEILDERDSVELNSALEQEPFYQLWHTIYSIKELDECKNALMKRFNFEEEIAEKLSKIDFNKQAFGNKSNKAMRKMLPYLMLGYNQADAESFAGYNRRLTKEEKSKNVSDEPLQLLAKNSLRQPVVEKILNQMINVVNAIIEKYGKPEEIRVELARELKQSKDEREDTDKQNGFNKKLNELVVTKLSELGLPTTKRYIQKYKFIFPAKDKNWKEAQVANQCIYCGETFNLTEALSGDNFDVDHIVPKALLFDDSQTNKVLVHRNCNSTKTNNTAYDYISKKGGNALGEYILRVDEWFKRGIISYGKMQRLKVSFEEYQERKKVGKETEADKRIWENFIDRQLRETAYIARKAKEILGKVCHNVTSTEGNVTAKLRGLWGWDDVLMNLQLPKYKEIGQTQIKEWTSDHGNRKHQKEEIANWTKRDDHRHHAIDALVIACTQQGFIQRINTLSSSETKDEMQREIDFAKKKYGNNYDEKILNENNEIVKGQKEKNNQLNSYLISQRPENFTTKYIEQEADKILVSFKAGKKVATISKFKATGKNKETGVIVPRGALHEQFVYGKIKTIAKDFKTGLLIKYPIKYLFENPDLIAEPIVKTKVEERLNDFGRDIKKCIESLKKFPIYLDLAKSIVLISSYCYKDEFVIKYKITDLKNDDVKYIIDEKVMHLVQERLDAHNGKEKEAFKDILWFNENKRIPILTVRCFTGLSAVQAIKKDENGKEIGFAKTGNNHHIALYKDNTGKHIQHLCTFWHAVERKKFKIPYIINNTNTLWNDLINKELPQSFLDKLPTDNLDLQLSMQQNEMFVLGLSQEEFDEAIQQNNKALLSKNIYLVWSIGDNQYWFRHHLETKNSELKVTIGAKESRRFYLFKSIGAFLSKNPIKVRLNHLGEITKVGEGHTKEQRYISSEVNLLLLNEPTAIYQTQNRLKIFNSFEEAKQDEIDFIIKQSPIDRIKHTVDLILKAYGFNEEDLRIRKQNNTIRIIKAE

SEQ ID NO: 6019 - protein, 1351 aa, synthetic construct
  REGION 1..1351: note = Synthetic
MFSQQNNLYCESLSKLYYNITKNFLSKNEVCRIYEIFFCSILTYFLKKYNHDIFKKSSTMKTILGLDLGVTSIGWAVIVTDDDNTPIKILGMGSRIIPLSTADKEEFQKGQAISKNQSRTIARTQRKGYNRKQLRKEELKKILGELGITPSKELLNLPSIELWKLRADAASGNAPLSAEQLGRIFYMLNQKRGYKSARSEANQDKKDTDYVAAVKGRHQQLKEKGQTIGQHFYTEMLTLEENSGHFQVKNNVYPREAYLEEFNAIIAAQKPQHAFLTDDVVDRLRDEVIFYQRKLKSQKGLVSICEFEGFERTFFDNVKQKDKTIFTGPKVAPKSSPLFQLCKIWETVNNINLKVKNTDGSKNKWADYVPTLEQKQEIIEHLFKNAGISLDALRKILGFNKDEIFVNKQIEKGLQGNTTYAEIHKILGDSKPELLGFNINIEPSKHSALLVDKRTGEILAEKEGQQVSAEIEKENFYQLWHTIYSIKDLDECAAALIKRFNIDPNVAAQLAKIDFSKGAFGNKSNKAMRKILPYLMQGYNYADACSLAGYNHSDSQTKKEKEENVVDDKLKLLEKNSLRQPVVEKIINQMIHVVNAIIDKYGKPDEIRVELARDLKKSKDERNEAELQNASNKKLNEEVANRLKELGLPVTKRFVQKYKFIFPVRDRKIKEAQLVNQCIYCGETFNVTEALSGDNFDVDHIIPKSMLFDDSQTNKVLVHRKCNAKDKSNKTAYDFIAAKGENELAIYLDRVDDWFKRGVLSYGKMQRLKVSYEQYAERKQLKKETEADIKLWENFIERDLRQTQYIAKKSKDLLKKICNNVTVTEGKITAQLRNLWGWDDVLMNLQLPKYKALGQTEIKEWTSEHGRRLHKKEEITNWTKRDDHRHHAIDALVVACTKQGFIQRINTLNSSDTKDAMDREIKAAKEKYNELYDKKLLTETNEQVKNHTERFNKLETYLKSQQPPLFTTRYVEQEADKIFVSFKAGKKAATYGIRKIKKDGKKVVVQEKIVVPRGALHEQSVYGKIKTQEKDKPLKYLFENPETIVDNRIKILVKERLDKFEGDVKKALTSLKKEPLFIDNEKNTLLEKAACYTDATVLKYKLQALKANQVNDIVDEGVKRIVKARLAQHKNEKEAFKDTVWFNQEKRIPIVSVRVFARPDASKLAIIKTDENNKPIGFALTGNNHHIAIYKDNTGKLVQHICTFWSAVERKKFGVPTVVKNTGTLWSELLHKDLPGTFLDKLPQDGLELEYSLQQNEMFVLGLPKESFEDAIKNNDLPLLSKHLYLVWSISDNDYWFRHHLETKNSELKSTTGAKESKRYYRFQSVGTFTKENPIKVQLNHLGEITKIGEP

SEQ ID NO: 6020 - protein, 1319 aa, synthetic construct
  REGION 1..1319: note = Synthetic
MFSQRNNPYCELLFKIIVTNIEEKNLEVIMGIRNSDIFFISNFMWYQKLIMMIKNILGLDLGTNSIGWALIEVDENNIPIRIIAMGSRIIPLSTSDKEEFQRGLSITKNQNRTVSRTQRKGYDRKQLRRSDLKKILKKYNIFPSEELLKLPMLDLWKLRSDSANPNEDISAEQLGRILYMLNQKRGYKSARSEANSDKKDTDYVQAVKGRYAQLKDRRQTIGQYFYEELSTAFSDKNNQQYFRVKEEVYPREAYIEEFDTIINAQKDKHGFLTDKVIHQLRNEIIYFQRKLKSQKGLVSICELEGFEKTVYDKEKNKNKVVFVGPKVAPKTSPLFQLCRIWEVVNTISLKIKNPEGSKYKWGEKVPNLKQKEILADYLFKNENLSFSTLLEILELKKEDVYVNKQILKGIKGNEAYAALHNVLGDHELLNFDVSIITSDHTAILVDKKTGEILEERAGLELDASLEREPLYQFWHTIYSLKDLDECKNALIKRFGLDEDIAEKLSHIDFNKQAFGSKSNKSMRKILPFLMEGYNYSESCSLAGYNHSNSLTKDERESQITLERLELLPKNNLRQPIVEKILNQMINVVNTILEKYGKPSEIRVELARELKQSKDERNDTDLQNSRNKKLNEEIGKRLAELGLPVTKRYIQKYKFIFPSLSKNLKDAHVNNQCIYCGETFNLTEALNGDAYDVDHIVPKALLFDDSQTNKVLVHRKCNSTKTNQTAYDYITAKGEEEVRIYSERVDDWFKKGIISYSKMQRLKVSHKEYLERKKLGKETETDKKLWENFIDRQLRDTQYISRKSREILQKVCNNVTTTEGGVTAKLRNLWGWDDILMNLQMPKYKELGQTITKEWTSEHGKRKHQKEEIENWTKRDDHRHHAIDALVVACTKQGFIQRINTLNSSETKDLMIKEVEEAKIEFNEKTTLLEKYLKTQKPFTTREVMKEADKILISFKAGKKVATITKFKATGKNKETGVIVPRGALHEQSVYGKIKVIEKDKPLKYLFENPDKIVNSRIRDLVETRLSENENNSKKALSTVKKNPIFFNEEKNEILEKASCYNDATVLKYKLQNLKANQVDDIVDERVKFLVKERLTQFGSKEKEAFKDILWFNQEKQIPIITVRLFARPDANNLQIIKKDKNGKDIGFVLTGNNHHIAIYEDKDSKLVQHSCAFWHAVERKKYNIPAVIKNSADVWSLLLDKELPVLFLDKLPADELNLKFSMQQNEMFILGLSQEGFDEAIKNNDKSLLSKHLYLVWSISNNDYYFRHHLETKNTELKNIPTAKDSKRYFRFKSVGALVGINPIKVRLNHLGEITKIGE

SEQ ID NO: 6021 - protein, 1306 aa, synthetic construct
  REGION 1..1306: note = Synthetic
MKKILGLDLGTNSIGWALIEVDENNIPIRIIAMGSRIIPLDADARDQFQKGQAISKNKDRTTARTQRKGYDRKQLKKSDDFKYSLKKILEKLNIFPTEELLKLPSLDLWKLRSDAVSDIEDITPEQLGRILYMLNQKRGYKSARSEANADKKDTDYVAEVKGRYTELKEQNKTLGQHFFDELHLAHQNNTYFRVKEKVYPREAYIEEFDAIINAQKLKHPFLTDEIIHTLRNEIIYYQRKLKSQKGLVSICEFEGFETTYFDKKTQQDKTIFTGPKVAPRTSPLFQLCKIWEVVNNISIKTKNPEGSKYKWGDRIPTIEEKQIIANYLSVNENLSFAELLKILGLKKEQVYANKQILKGIQGNITYSAIHKIIGNSEYLKFDTQTIPSKHSAILVDKKTGEILDERDSVELSSDLEQEPFYQLWHTIYSIKELDECKNALVKRFNFDEEIAEKLSRIDFNKQAFGNKSNKAMRKMLPYLMLGYNQSDAESFAGYNRRLTKEEKSKNILDERLQLLSKNSLRQPVVEKILNQMINVVNAIIEKYGKPYEIRVELARELKQSKDEREDADKQNGFNKKLNELVMTKLAELGLPTTKRYIQKYKFIFPAKDKNWKEAQTANQCIYCGETFNLAEALSGDNFDVDHIVPKALLFDDSQTNKVLVHRNCNSTKTNHTAYDYISKKGSEALNDYVTRVDEWFKRGIISYGKMQRLKVSFEEYQERKKVGKETEADKKIWENFIDRQLRETAYIARKAKEILGKICHNVTSTEGNVTAKLRQLWGWDDVLMNLQLPKYREIGQTQLKEWTSDRGNRKHQKEEITNWTKRDDHRHHAIDALVIACTQQGFIQRINTLSSSETKDEMQKEIDSAKKKYGENYDEKILSEKNEIIKGQKEKNNQLNIYLISQRPENFTTKYIEQEADKILVSFKAGKKVATISKFKAIGKNETTGVIVPRGALHEQFVYGKIKTIAKDFKTGLLIKYPIKYLFENPSLIAEPTIKTKVEERLNDFEGNIKKSIESLKRAPIYLDLAKTILLTSSHCYKDEFVIKYKITDLKKDDVKYIIDEKVKHLVQARLDAHNGKEKEAFKDTLWFNENKKIPILTVRCFTGLSAVEAIKKDENGKEIGFAKTGNNHHIAIYRNSEGKQIQHLCTFWHAVERKKFRVPYIINNTNSLWNDLLDKDVPQAFLDKLPADNLELQFSMQQNEMFVLGLSKEEFDEAVQQNNKALLSKNLYLVWSLSENNYWFRHHVETKNSDLKNISGVKESKRLYNIRSIGALNELNPIKVRLNHLGEITKIGEGGKYKASEDNLL

SEQ ID NO: 6022 - protein, 1280 aa, synthetic construct
  REGION 1..1280: note = Synthetic
MVKNILGLDLGTNSIGWALIEIDDNGTPIKIIAMGSRIIPMSSNDRDEFERGLSITKNQNRTVSRTQRKGYDRKQLKKSYLKEILNKYNIFPSEELLKLPMLDLWKLRSDSANPNENISAEQLGRILYMLNQKRGYKSARSEANADKKDTDYVQAVKGRYAQLKDKNQTIGQFFYDGLYNASATDSYFRVKEEVYPREAYIEEFDTIINVQKDKHDFLTEEVINQLRNEIIYYQRKLKSQKGLVNICEFEGFEKTIFDKEKNKNKVVFVGPKVAPKTSPLFQLCRIWEVVNNISLKIKNPEGSKYKWGDKIPDLKEKEIIVDYLFKNASLSFEDLRKILNLEKGSVYVNKQILKGIKGNETYSVLQSILGDDELLNFNVSIIPSNHTSMLVDKKTGEILEERAGLELDASLEKEPLYQLWHTIYSLKDLDECKNALIKRFGFDNEIAEQLSKIDFNKQAFGNKSNKSMRKILPFLMEGYDYSQACSLAGYNHSNSLTKTEREQQITLDKLELLAKNSLRQPIVEKILNQMINVVNAIIEQYGKPSEIRVELARELKQSKDERNNADLQNSKNKKLNEEIGKRLAELGLPVTKRYIQKYKFIFPSLSKNLKDAQVNNQCIYCGETFNLSEALSGDAYDVDHIVPKALLFDDSQTNKVLVHRKCNSTKTNQTAYDYIATKGEEQVRVYSERVDDWFKRGIISYSKMQRLKVSHKEYLERKSLKKETETDKKLWENFIDRQLRDTQYIARKSREILQKVCNNVTTTEGGVTAKLRNVWGWNDVLMNLQMPKYKNLGQTVVKEWTSDHGKRKHQKEEIENWTKRDDHRHHAIDALVIACTKQGFIQRINTLNSSETRDEFKKEIEEHKKRLGKSFSEDDYEHLYREKSTLLDDYLRSQKPSIFTTKYVEQEADKVLVSFKAGKKVATITKFKATGKNKEEGVIVPRGALHEQSVYGKIKIIEKDKPLKYLFENVDKIVNPKIKSLVEERLNKNKNDAKIALLSLKKNPIFLNDEKTEILEKSSCYNDATVLKYKLQSLKANQADDIVDERVKFLVKERLAQFGNKEKEAFKDTLWFNEEKQIPIITVRLFARPDANNLQAIKTDENGKGIGFVVMGNNHHIAIYEDKDSKLIQHSCTFWHAVERKKYNIPAVIKNSSEVWNQVLDIKLPESFLNKLPADNLNLKFSMQQNEMFILGLSQEEFDEALKNNDKSLLSKHLYLVWSIAEGDYWFRHHLETKNTELKKTDGAKESRRFFRLSLKGFNDLTPVKVRLNHLGEITKIGEY

SEQ ID NO: 6023 - protein, 1276 aa, synthetic construct
  REGION 1..1276: note = Synthetic
MTKHILGLDLGTNSIGWAIIKVDDNNVPIKIIAMGSRIIPLYSNDRDQFQKGQAISKNKDRTTARTQRKGYDRKQLKKSDNFKYSLKKILEKLDIFPTEELMKLPTLDLWKLRSDAVSDIENITPKQLGRILYMLNQKRGYKSARSEANADKKDTDYVAEVKGRYKLLKEQNQTLGQYFYNELSAANQNNTYFRVKEKVYPREAYIEEFDAIINTQKPKHSFLTDDVIHSLRNEIIYYQRKLKSQKGLVNVCEFEGFETTYFDEKTQQNKTIFTGPKVAPRTSPLFQLCKIWEVVNNISLKIKNPEGSKYKWGDRIPTIEEKQTIADYLLENENLSFVELLKILGLKKEQVYANKQILKGIQGNITFSAIHKIIGNSEHLKFDIHTVPSKHLAILLDKKTGEILDEGDSIELSSALEQEPLYQLWHTIYSIKELDECKNALMKRFNFEEEIAERLSKIDFNKPAFGNKSNKAMRKMLPYLMLGYNQSDAESFAGYNRKFTKEEKSKNISDEPLQLLAKNSLRQPVVEKILNQMINVVNAIIQKYGKPEEIRVELARELKQSKDEREDADKLNGFNKKLNELVATKLTELGLPTTKRYIQKYKFIFPAKDKNWKEAQVANQCIYCGETFNLTEALSGDNFDVDHIVPKALLFDDSQTNKVLVHRSCNATKTNNTAYDYIAKKGNEALNAYVTRVDDWFKRGIISYGKMQRLKVSFEEYQERKKVGKETEADKRLWENFIDRQLRETAYIARKAKEILGKVCHNVTSTEGNVTAKLRQLWGWEDVLMNLQFERFKYANQTKLETWTSDHGNRKHTKEIIDKEIWTKRDDHRHHAIDALVIACTQQGFIQRINTLSSSDVKDGMRKELEEDRIVYNERLTLLENYLVEKKPFSTEEIEHEADKILVSFKAGKKVATISRYKAVGENKKTGVIVPRGALHEQFVYGKIKTISKDFKTGTLIKYPIKYLFENPNLIAEPLIKIKVKERLLDFNNDIKKSIESLKKSPIYLDLGKTILLTSSHCYKDEFVIKYKITDLKKDDVKYIIDEKVKQLVQERLDAHNGKEKEAFKDTLWFNENKKIPILTVRCFTGLSAVEAIKKDDNGKEIGFAKTGNNHHIALYRDDTGKYIQHLCTFWHAVERKKFKIPYIIKNTNTLWNELINKELPQPFLDKLPADNLELQLSMQQNEMFVLGLSKEEFDEAMRQNNKSLLSKHLYLVWSIGDNQYWFRHHLETKNSELKVTLGAKESRRFYLFKSVGAFLSKNPIKVRLNHLGEITKIGE

SEQ ID NO: 6024 - protein, 1271 aa, synthetic construct
  REGION 1..1271: note = Synthetic
MGKILGLDLGSASIGWAVIEEKDSTVKIVALGSRIIPYDGTEGQDFAKGTGESRNSLRTKARTARKGYDRYQLRRKYLVDVLIKNEMMPDENLKSLPKMQLWELRSKAVTEYISKQELGRLLIWLNQKRGYKSSRSDANLDKKDTDYVKDVKSRFEKIKELDLTIGQYFHNELKNDEYFRVKENIFPREAYIEEFDVIWNTQAKYNPSLNDCPKEILEKIANGIFLGSSSSQQSLRKDAITNGLKYIIKNQIIYNQRPLKSQKGLVSVCEFEGFWTNKDGKEFFVGPKVAPKSSPLFQLAKIWENVNNIRLSSKRGETIELALEEKQKVFEHLNNNEKLTATDLFKILGKSKNEFTVTKQLEKGIQGNITRNAIIKVLGENEVSKKLLKLDLNIVETDKSGYLYSKKTGEVLGEKPVKYIDAGVENEPFYQLWHTIYSINEIQECSHALQKRFGIDTETADKLAAIDFSKFAFGNKSAKTIRKILPYLMEGNMYSEAMSYAGYEHSNSLTKDENLGRKLLDKLKPVEKNSLRQPIVEKILNQMVNVVNAIIEKHGKPNEIRIELARELKQSKEERNDTDKAMSKRQRENEVIANYLAEYGLRATKNNIIKWRLYQEIDNQDKKLNAICIYCGQPISITEAIKGTEVDVEHIIPKSKLFDDSQSNKTLAHRRCNANKGDMTAYDFMKTKPQQEFDAYVERVNTLYANRIIGKAKREKLLMSEDKIPDNFIDRQLRESQYIAKKAREILQTVCHNVWSTSGTVTAELRHLWGWDDITMNLQMPKYKELGLTEMVEWESENGKNKHSKEVIKDWTKRDDHRHHAIDALTIACTKQGFIQRFNTLSASKTREDMLKEIEQRSEPYKEKLSLLEKYIVSQRLFSVAEVENAAAQILISFKSGKKVAVKGKRKIGKRGNKKVVQTDIIVPRGALSEESVYGKIKTIEKNKPVKYLFENPHLIFKPYIKNLVEQRLEKFENDTKKALASLKKEPIYLDKEKTKLLEYATCFKEEFVIKYTVDTNFNKTDKIVDEQIKRILQTRLQKFDNKPKEAFKDVQQGEKSLKWYEDEGLERPILSVRCFTGLSAVVPVKKDGEGSEIGFVKPGNNHHIAIYANDDGDKPEQVCCTFWHAVERKKYDIPVVIKSANEVWDKILQQRENTYPQSFLEQLPPPNLDLKLSMQQNEMFILGMTNEELKIAIDNKEYRKISENLYRVQKIFGNKKQIEVVFRHHLETQLNDDNNAKISKRFVKIQSLSTLFSLNPFKVKIDCLGDVKPQ

SEQ ID NO: 6025 - protein, 1269 aa, synthetic construct
  REGION 1..1269: note = Synthetic
MKTIMVKNILGLDLGTNSVGWALIEVDENNLPIRIIAMGSRIIPLSTSDKEEFQRGLSITKNQSRTVSRTQRKGYDRKQLKKSDLKKILNKYNIFPSEELLRLPMLDLWKLRSDSANPDENISAEQLGRILYMLNQKRGYKSARSEANADKKDSDYVQAVKGRYDQLKDRKQTIGQYFYDELYNANANNSYFRIKEEVYPREAYIEEFDTIISAQREKHDFLTDEVVHQLRNEIIYFQRKLKSQKGLVSICEFEGFEKTVFDKEKNKNKVFFVGPKVAPKTSPLFQLCRIWEVVNTITLKIKNPEGSKYKWGEKIPDLKEKEILADYLFKNESLSFSKLLEILELKKENVYVNKQIQKGIKGNETYSALHSILGDNELLNFDVSIMTSNQTALLVDRKTGEILEERAGLELDASLEKEPLYQLWHTIYSLKDLDECKNALIKRFGFDEETAEKLSRIDFNKQAFGNKSNKSMRKILPFLMEGYDYSQSSSLAGYNHSNSLTKNEREQQITLDRLELLPKNSLRQPIVEKILNQMINVVNAILEQYGKPSEIRVELARELKQSKEERNETDLQNSKNKKLNDEIGKRLAELGLPVTKRYIQKYKFIFPSLSKNLKEAYVNNQCIYCGETFNLTEALSGDAYDVDHIVPKALLFDDSQTNKVLVHRKCNSTKTNQTAYDYIATKGEEEVRVYSERVDDWLKRGIISYSKMQRLKVSHKEYLERKKLGKETETDRKLWENFIDRQLRDTQYISRKSREILQKVCNNVTTTEGGVTAKLRNLWGWDDVLMNLQMPKYKELGQTITKEWTSEHGKRKHQKEEIENWTKRDDHRHHAIDALVIACTKQGFIQRINTLNSSDTKDLMIKEVEEAKVEFNEKTTLLEKYLKTQKPFSTHEVMKEADKILVSFKAGKKVATITKFKATGKNKETGVIVPRGALHEQSVYGKIKVIEKDKPLKYLLENSDKIVNPRIKNLIEIKLSENKNDPKKALLALKKIPIFLDEEQSITLEKASCYNNATVLKYKLQNLKAAQVDDIVDEKVKKIVRERLSQFGNKEKEAFKDTLWFNEEKQIPITTVRLFARPDANNLQTIKKDEDGNGIGFVVTGNNHHIAIYEDKDNKLVQHSCTFWHAVERKKYNIPAVIRNSADVWSQLLGKELPESFLDKLPADELNLKLSMQQNEMFILGLSQDEFDEAIANNDKSLLSKHLYLVWSISNNDYYFRHHLETKNTELKNIPTAKDAKRYFRFKSVGALVGINPVKVRLNHLGEITKIGE

SEQ ID NO: 6026 - protein, 1269 aa, synthetic construct
  REGION 1..1269: note = Synthetic
MKRILGLDLGVSSVGWALIEVDEFTFKPIRIIGMGSRIIPLSTDDRTQFEKGQSITKNQDRTKSRTQRKGYDRKQLKKSDNFKYSLKKELEKFNIYPDKELFNLPMLDLWKLRSDATSEPIDAKQLGRILYMLNQKRGYKSARSEANADKKDTEYVAEVKSRYARLKDANETIGQHFYKELSTAFSNNSYYRVKEQVYPREAYIEEFETIINTQKEYHSFLTDEVIDRLKNEIIYYQRKLKSQKGLVSVCEFEGFDKVTKNKTTNKEKVVFVGPKVAPKSSPIFQLCKIWETVNNISLKVKNPEGTKYKWGDRFPTIEEKKQIADYLAVNAHLSFNELIKILDLKKDDVYANKQILKGIQGNITYQEIYKIIGENDLLRFNTSVIESNEEAILVDKKTGEILKQRNRLVIASSFEKEPLYQLWHTIYSIKDLDECKSALMSRFSFDEEIADKLSRIDFNKQAFGNKSTKAIRKILPYLMDGFDYSQSCSLAGYNHSNSLTKQENLEREIKPRLELLSKNSLRQPIVEKIINQMINVVNAIIDAHGKPHEIRLELARELKQSKDERDAADKSNINNKKQNDLIGSRLEAMGLPATKKYIQKYKFIFPTKDKKWKEADVVNQCIYCGETFNLTEALRGDNFDIDHIVPKALLFDDSQTNKVLVHRHCNSNKLDKTAYDYIAQKGEVKLNEYLQRVDDWFARGVLSYGKMQRLKVSFIEYQERKKLKKETEADKKLWESFIDRQLRESQYIASKSKQILEGICHNVTVTEGTVTARLRKVWGWDDVLMNLQMPKYRELGQTEMKEWTSEHGKRKHKKEEIINWTKRDDHRHHAVDALVIACTQQGYIQRINTLNASDVRNEMLKEVEDAKTQYSEKLTLLDKYFITKKPFTTSEVEKEADKILISFKAGKKVATTSKFKAKGINKDKGVIVPRGALHEDSVYGKIKVEDLNKPIKYLFENPEKIVHQKIKKLIKERLIQNDNDVKKALSTIKKDPIFLDESKEVVLEKASCYKDVTVKKYDLLSLSSKQIDDIVDEKVKELVKERLKQFGNKEKEAFKDVLWFNEKKQIPIKTVRLFARPDANSLQPIKKDENGKDIGFVVQGNNHHIAIYRNNEGKQIQHSCTFWNAVERKRNKLPVIIKDTTDLWNNISEQKLSQSFLCLLPEDGLTLEFSMQQNEMFILGLTNDEFNDAIRNNDKSTLSKHLYLVWSISNNDYWFRHHLETKNSELKSIPTAKDSKRYFRFKSVGALIGMNPIKVRLNHLGEIIKLGEF

SEQ ID NO: 6027 - protein, 1269 aa, synthetic construct
  REGION 1..1269: note = Synthetic
MMTKNILGLDLGTNSIGWALVEVSENNIPVRIIAMGSRIIPLSTSDKEEFQRGLSITKNQSRTISRTQRKGYDRKQLKKNDLKKILKKYNIFPSEELLKLPMLDLWKLRSDSANSNEYISAEQLGRILYMLNQKRGYKSARSEANSDKKDTDYVQAVKGRYAQLKDRNQTIGQYFYEGLSNAFSDKNNQQYFRIKEEVYPREAYIEEFDTIINAQKDKHDFLTDKVVHQLRNEIIYFQRKLKSQKGLVSICEFEGFEKTVFDKEKNKNKVVFVGPKVAPKTSPLFQLCRIWEVVNTITLKIKNPEGSKYKWGEKIPDLKEKEILADYLFKNESLSFTKLLEILELKREDVYVNKQILKGIKGNETYAALHSVLGYNELLNFDVSIITSNHTAILVDKKTGEILEERAGLELDASLEREPLYQLWHTIYSLKDLDECKNALIKRFGFDEDIAEKLSGIDFNKQAFGNKSNKSMRKILPFLMEGYDYSQSCSLAGYNHSNSLTKEEKEQQITLDRLELLPKNSLRQPIVEKILNQMINVVNAILEQYGKPSEIRVELARELKQSKDERNETDLQNSKNKKLNEEIGKRLAELELPVTKRYIQKYKFIFPSLSKNLKDAHVNNQCIYCGETFNLTEALSGDAYDVDHIVPKALLFDDSQTNKVLVHRKCNSTKTNQTAYDYIATKGDEQVRVYSERIDDWFKRGIISYNKMQRLKVSHKEYLERKKLGKETETDKKLWENFIDRQLRDTQYISRKSRDILQKICNNVTTTEGGVTAKLRNLWGWDDVLMNLQMPKYKELGQTVTKEWTSEHGKRKHQKEEIENWTKRDDHRHHAIDALVIACTRQSFIHRINTLNSSETKDLMVKEVEEAKIEFNEKTTLLEKYLKTQKPFSTQEVMQEADRVLISFKAGKKVATITKFKATGKNKATGVIVPRGALHEQSVYGKIKVIENDKPLKYLFENSDKIVNPGIKNLVETRLSENENNSKKALSTLKKNPIFLNEEKSEILEKASCYNDATVLKYKLQNLKASQADDIVDERVKFLVKERLAQFGNKEKEAFKDTLWFNEEKQIPIITVRLFARPDANNLQTIKKDKDGKDIGFVLTGNNHHIAIYEDKDNKLVQHSCTFWHAVERKKYNISAVIGNSSDVWSQLLDKELPGSFLNKLPADKLNLKFSMQQNEMFILGLSQDEFDEAIKNNDKSLLSKYLYLVWSISENNYWFRHHLETKNSDLKKTDGAKESKRLYNIRSLGSLFSLNPIKVRLNHLGEITKIGE

SEQ ID NO: 6028 - protein, 1268 aa, synthetic construct
  REGION 1..1268: note = Synthetic
MTKNILGLDLGTNSIGWALIEVDENNTPIRIIAMGSRIIPLSTSDKEEFQRGLSITKNQSRTVSRTQRKGYDRKQLKKSDLKKILNKYNIFPSEELLKLPMLDLWKLRSDSANPNENISAEQLGRILYMLNQKRGYKSARSEANADKKDTDYVQAVKGRYAQLKERNQTIGQYFYEELYNANTNNSYFRIKEEVYPREAYTEEFDTIINAQKNKHDFLTDEVVHQLRNEIIYFQRKLKSQKGLVSICEFEGFEKTVFDKEKNKDKVVFVGPKVAPKTSPLFQLCRIWEVVNTISLKIKNPEGSKYKWGEKIPNLKEKQILADYLFKNDSLSFTKLLEILDLNKNDVYVNKQILKGIKGNETFSTLHTVLGDNELLNFDVSIIPSNHTSMLVDKKTGEILEERAGLELDASLEKEPLYQLWHTIYSLKDLDECKNALIKRFGFDDETAEKLSHIDFNKQAFGNKSNKSMRKILPFLMEGYDYSQSCSLAGYNHSNSLTKDEREQQITLDRLELLSKNSLRQPIVEKILNQMINVVNAILEQYGKLSEIRVELARELKQSKDERNDADLQNSKNKKLNEEIGKRLAELGLPVTKRYIQKYKFIFPSLSKNLKDAHVNNQCIYCGETFNLTEALSGDAFDVDHIVPKALLFDDSQTNKVLVHRKCNSTKTNQTAYDYIGTKGEEQVRVYSERIDDWFKRGIISYSKMQRLKVSHKEYLERKKLGKETETDKKLWENFIDRQLRDTQYISRKAREILQKVCNNVTTTEGGVTAKLRNLWGWDDVLMNLQMPKYKELGQTVIKEWTSEHGKRKHQKEEIENWTKRDDHRHHAIDALVVACTKQGFIQRINTLNSSDTKDLMQREIKEAKKLLGENYNEKEFENDNEFVKNHKERLSQLDDYLRLQKPVKFDTKYVEQEADKVLVSFKAGKKVATITKFKATGKNKDTGVIVPRGALHEAGLYGIRTIYSKGGIAEKHIIKKYKVGVSAQDHIFTGKETYSVKKDKNGNEKVDDKIKIVLDSIVDNKVKEVVLNRLNRGFNNEEDYRIDVKKALNNFKNLDEDPLWYNESKGIKILSIKLKTGLKDSVVPLRLNEKNEVITLVKTGNNHHIAIYEDNDGKLIQYSCTFWHAVERKKYNIPTVIKNSSEVWNQVLDKKLPESFLNRLPADKLNLKFSMQQNEMFILGLLEEEFDKAIKDNDKSLLSKYLYLVWSIAEGDYWFRHHLETKNTELKKTNGAKESKRYFRLSTKGLIDLNPVKVRLNHLGEITKIGEY

SEQ ID NO: 6029 - protein, 1268 aa, synthetic construct
  REGION 1..1268: note = Synthetic
MIKNILGLDLGVSSIGWALIEVDENNIPIRIIAMGSRIIPLTASDKEEFQRGLSITKNHSRTVSRTQRKGYDRKQLKKSDLKKLLIKYDIFPSEELLKLPMLDLWKLRNDAANPNENISAEQLGRIFYMLNQKRGYKSARSEANADKKDTDYVQAVKGRYAQLKNENKTIGQFFYNGLNNANLNNSYFRIKEEVYPREAYIEEFDTIIKAQKGKHNFITDEFIHQLRNEIIYYQRKLKSQKGLVSVCEFEGFEKTVFDKEKDKNKTVFVGPKVAPKTSPLFQLCRIWEVVNTITLKIKNPEGSKYKWGEKIPTLEEKELIAEYLLKNESLSFTKLLEILNLKKDDVYVNKQILKGIKGNETYASIHKILGDNNLLNFDVSIIPTEKTSILVDKQTGEILEERAGLELDASLEKQPLYQLWHTIYSLKDLEECKNALTKRFGFDEEISEKLSKIDFNKQAFGNKSNKAMRKILPFLMEGYDYSESCSLAGYNHSNSLTKDEREQQKTIDRLELLTKNSLRQPIVEKILNQMINVVNAIIEQYGKPSEIRVELARELKQSKDERNDADLQNSKNKKLNEEIGKRLTELGLPATKRYIQKYKFIFPSLSKNLKEAKVNNQCIYCGESFNLTEALSGDAYDVDHIVPKALLFDDSQTNKVLVHRKCNATKTNQTAYDYMATKGDEAVRIYAERVDDWFNRGIISYSKMQRLKVSHKEYLERKKLGKETETDKKLWENFIDRQLRDTQYISRKAREILQKVCNNVTTTEGGVTAKLRNLWGWDDVLMNLQMPKYKELGQTVTKEWTSEHGKRKHQKEEIENWTKRDDHRHHAIDALVVACTKQGFIQRINTLNSSETKDLMQREIKEAKKLLGENYNEKEFEQDNALVKNHKERLSQLDDYLRLQKPIKFDTKYVEKEADKILVSFKAGKKVATVTKFKATGKNKITGVIVPRGALHEAGLYGIRTLYSKGGIAEKHIIKKYKVGVSAQDHIFTGKETYTVKKDKNGNEKIDDKIKIVLDSIVDNKVREVVLNRLNRGFNVGDDYRKDVKKALSNFKNLEEDPLWYNESKGIKILSIKLKTGLKDSVVPIRLNEKDDVITLVKTGNNHHIAIYEDKDNKPIQHSCTFWHAVERKKYKIPTVIKNSSGVWNELLNKELPESFLNKLPADQLTLKFSMQQNEMFILGLSKEEFDEAIKNNDKPVLSKHLYLVWSIAEGDYWFRHHLETKNSELKKTEGAKEGKRFYRLSTKGFIDLNPIKVKLNHLGEITKIGEY

SEQ ID NO: 6030 - protein, 1266 aa, synthetic construct
  REGION 1..1266: note = Synthetic
MEKKILGLDLGISSIGWAVIKEYEKEGKAILGLGSRIIPLSTDDKEEFSTGNTISKNQKRTVKRTQRKGYDRYQLRRGDLIKILNECGMMPDQALMELNSVELYGLRDKAVRDKIEMKEIGRMFYHLNQKRGYKSSRSDANLDKKDTEYVIAVKGRHQQIKDAGLTIGQYFYYQLLQDKYYKIKEQVFPREAYIEEFDAICAEQQKHYQVLSNELINKIRNEIIYYQRNLKSQKGLVSVCEFEGKERADIKGNKVFTGPKVAPRSSPIFQLCRIWENVNNISFKIKNPEGAKYKWADYILSLEQKTEIARYLNVNPLLSTAELLKMLGLKKEDVYINKQLARGLKGNITYEEIAARINKETLLKFEVNIEQLEGKAYLLDKKTGEILQEHNKLIVDAKIEKEPLYQLWHTIYSIKDAEECKEALTVKFGLLEDEATALANIDFTKQSFGDKSAKAMRKILPYLMQGYNYADACSLAGYNHSNSLTKEEKANIETEDYLQNLSKNSLRQPVVEKILNQMINLVNAIIEQFGKPDEIRVELARELKQSKDERNESDKQNSLSKKINDEIAKRLKEMGLPETKRFIQKYKFIFPVKDKKWNEANAINQCIYCGESFQLSEALAGDNFDVDHIIPQALLFDDSQTNKVLVHRKCNGDKNNATAYDYIASKSDAALASYIMRVDDWYSRGILSYTKMQRLKTSYNEYLERKKVKKETEADKKLWEGFIDRQLRETAYISRKARQILQKVCSQVYSTEGSVTATLRRLWGWEDVLLQLQLPKYKQLNLTEVKEWQSDHGRRKHQKEEIKDWNKRDDHRHHALDALVIACTRQGFIQRINTLNASDVRNEMNKAVEDAAIEYNEKLTLLEKYLVLQRPFDTQQVKEELAKVLISFKAGKKVATTGNRKAKVNGKKEVVQKDIIVPRGPLSEEFVYGKIRSLERNLKTGEIVKHKPKYLFENPHLIFKAYIKKLVEERLSECDNDVKKATASLKKEPLFLNKEKTKILEYASCFKDEFVIKYKIQGITAKDIPYIVDEGAKEAVKTRLEQFNNKEKEAFKNIEDNPVWYNAEKRIPIKTVRMFTGLSSVEPVKKDAEGKDIGFVKPGNNHHIAFYQDENGKKVEHNCTFWHAVERKKYKLPVIIKNPKQVWDRILQDEVKYPQNFLKKLPDDKWIFVESLQQNEMFILGLNPEAAKEALIKNDKRVLNQHLYLVWSIAEGDFWFRHHVETKNSELKSTKGAKESKRFYRCGLSAFENLNPVKVRVTILGEITKQ

SEQ ID NO: 6031 - protein, 1266 aa, synthetic construct
  REGION 1..1266: note = Synthetic
MNKTILGLDLGSTSIGWVLIKVDENNIPIEILAMGSRIISLSSDERAQFQKGQAISKNQDRTTARIQRRGYDRKQLKKSDDFKYSLRKALEKYSIYPSKELLNLSMLDIWKLRSDAASLPIEPKQLGRVLYMLNQKRGYKSARNEANADKRDTEYVQAVKGRYTQLKDRNQTIGQFFYKGLKNAVEQNQYFRVKEKVYPREAYIEEFDTIINVQKKHHPFLTDDLIHSLRDEIIYYQRKLKSQKGLLSVCEFEGFEKTIKDKSGNDKEVFVGPKVAAKSNPLFQLCRIWETVNNINLKVKNPPDAKYKWGDRTPTLDEKKQIAEHLWKNEQLSFTDLLKILTLKKDDVYSNKQILKGIKGNPTFADIHKIIGDSNLLNFNTKIISNGKDAYIYDRKTGEILEERHGSIISKEIEKQPLYQLWHTIYSIKDLEECKQALIKRFAFSEEIAEKLSKIDFDKQGYANKSVKAIRKILSYLMQGYNLYEAESLAGYVSRSLTKDELEKTGTDKKLTLLPKNSLRQPVVEKILNQMINVVNALIEKYGKPAEIRIELARELKQSKDERDAADKLNSFNKKINDKVANALKELDIPATKRFIEKYKFISPTRDKSWNETQVVNQCIYCGETFNLTEALTGDAFDVDHIVPKALLFDDSQSNKVLVHRKCNGNKTNLTAYDYISKKGNAVLNQYLSRVDEWFKRGIISYSKMNRLKVSFEQYQERKKQKKETEADKKLWESFIDRNIRETQYISRKSKEILGKICSKVRVTEGNVTAKLRKLWGWEDVMLHLQLPKFKELEQTEMKEWTSEHGRRKHYKEGIANWSKRDDHRHHAVDALVIACTQQGFIQRINTLNASDVRDEMKKEVDAAKVEYNEKMTLLETYLLIKRPFDTAQVSKAIDEILISFKPGKRVVSISKFKAKGKNINTGVLTPRGALHEQSVYGKIKIIEKNKAAKYLFENPKTIIDKSIQQKVLDKISEFNGDVKRAINSLKKSPVYLDNEKQKVLETADCFKEEVVIKYKLDSLKAKDVPYIVDKKVKELVQQRLYEHGGKEKEAFKTTLWHNEEKQIPIKSVRCFTGLSAVEGIKKDEKGEDIGFVVLGNNHHIAIYKDADGKLIQHACTFWHAVERKKFKLPVVIQDTNALWTTILDKQLPQPFIDKLPVDNLKLEYSLQQNEMFILGLSKENVKKAIAENNKSLISKHLYLVWSVGENQYWFRHHLETKNSDLKQTLGAKESKRYYLFKSVGAFLAQNPLKLNIDCLGNISPVKKIL

SEQ ID NO: 6032 - protein, 1266 aa, synthetic construct
  REGION 1..1266: note = Synthetic
MSKTILGLDLGVTSIGWALIEVCEEKFPIRITAMGSRIIPLTTDEKTEFQRGQSISKNQNRTTNRTQRKGYDRKQDRKENLKKILENLDIFPSENLMKLPSLELWKLRSDAASSDKILTDEELGRVFYMMNQKRGYKSARSEANMDKKDTEYVADVKSRHAQLKESNQTIGQYFYGELLRAKENSEYFQVKKKVYPREAYIEEFDKIIEVQKEKHKFLTDDVVDEIRNKIIFYQRHLKSQKGLVSFCDFELVKKEVINENGKIITKILGPKIAPKSSPLNQLCKIWETVNNISLKIKNPEGSKYKWSDWTPTLENKIEIANYLNTHDSLTFSELLKIVNLKKEEVYTNKQILKGLQGNKTFSAIAKILGEKHPLLNFEIDIKPQEKQAFLVDRKTGEILEEHASYIVDENIEKEPLYRLWHTIYSIKDSEECKNALIKKFGHYIEEEKAEKLSKLDFTSSGYANKSHKAMRKILPYLLKGYNYSQACSLAGYNHSNSLTRVENSERFLKDKLKLLKKNELRQPVVEKILNQTIHIVNAIIEKYGRPAEIRVELARELKQSKDERNDADIQISKNNKLNQEIAKRLQELGLPSTKKNIQKYKFIFPVRDKKITEGKVFNQCIYCGKSFSLSDAMRGDNFDIDHIVPKALLFDDSQMNKVLVHRECNDNKGKLTAYDYIASKGEDELKKYLDRVDTWYNQNIISYGKMLRLKVSHKEYLERKSKNKQTEADKRLWENFIDRQLRESSYISRKATEILKNVCRNVSTTEGGVTAKLRKLWGWDNVLMNLNIEKYRKLGQTEIVEWTSNFGKEQHKEERIKNWTKRDDHRHHAIDALVVACTKQGYIQRLNTLNASDTRNKMLREISDAAVKYNERLTLLENYLIAQKPFTTRDVEEAASQILVSFKTGKKVATISKYKAQGKNKSIGVLTPRGALHEQFVYGKIKTIDSDKPLKFLFENVDLIKDEKIKTLIEARIAKYNGDGKKALASVKKSPIYVDIETKKTLDKADCYKDEYVIKYKIQDLKKKDLQFIVDDKIRAILSAKIGEHNGNEKEAFKETVWFNKEKGIPIKTVRCRTGLSAVQPVKQDGNGKNIGFAKTGNNHHIALYYDNEQNIHQHICSFWHAVERKKYKFPVIIKNSAELWNTVLEGAYPEDFLKQLPDNNLTLKFSLQQNEMFILGLEDEDFEYAIRNNDNELISEHLYLTWSIADNDYWFRHHLETKNSDLKKIEGAKESKRFYRLTSVGSFLKLNPKKVKVNHLGEIIKIGEN

SEQ ID NO: 6033 - protein, 1260 aa, synthetic construct
  REGION 1..1260: note = Synthetic
MSCKKILGLDLGVSSIGWALIKEENEKPNEIIGMGVRIIPLDKDESDEFSSGNKITKNQNRTSKRTARKGYYRYVLRRTALTAELKKHNMFDEQLFKISQLELWELRAKAVTEKISLKELGRVLYHLNQKRGYKSSRSEENADKKDTDYVAEVKNRYQLLKEEGKTIGQKFFEELSKNKHYRTKQQVFPREAYIEEFDAIMQKQKEFYTDVLTDALINHLRDDIIYFQRKLKSQKGLVSICEFEGFHVKNKDGKEIFTGPKVAHRSNPLFQVEKIWETINNISIKDKRNNEFPISLEQKQKIFEYLDNHEKLSQTELFKILEIKDKSGWFGNKMLSKGLQGNLTKIAIKNALNNDELAKKWLTFNLNIQPTGSKTYQYNPNTGEVIKEIEAKIVSEKCINEPLYQLWHTIYSISDIEECKNALIKKFGFDNATAERLAKIDFTKQSYGNKSLKAIRKILPYLMDGFKYSDAASIAGYNHSNSLTKDQVLARQLLDKIPLLQKNSLRQPVVEKILNQMIHIVNDIIDEKRGWVTKEEREKGLFEIRIELARELKQSKEERNETFKNINKIERENKEIEKRLQELGLRATRKNIIKYRLFNEINGEDKKVNAMCIYTGKTFSLTDALKGNEIDVEHIIPKSLLFDDSQSNKTLTFRWINQEKGDRTAYDYMASKGEAALNEYIERVNKLFKDGIIKKAKHDKLLMPGDKIPKDFIERQLRESQYIARKSREILTQVAKNVWSTSGSVTEYMRRLWGWDDVLMNLQMQRVKEIIPDPLAEGITEIVEWETHDGQKHQKEVIKDWTKRDDHRHHAIDALTIACTKQGYIQRINTLSAKATRDELYKAVSERKEEFRESLSLLDKYFISQRPFTTKEVENKAAEIIVSFKPGKKVATWGKRFIKKNGKRIKVQDHILVPRGPLSEESVYGKIKTIEKNKPVKYLFENPHLIFKPYIKELVEKRLAEHEGDTKKALGSLKKDPIYLDENKTIPLQYGTCYKEEYVLKYPLGYGQGYLFSGKEDDKKALKVIESIVDKKVKQIVKERIFPNNKFVPIKDSLNNLEKNPIYYDILKKIPIKTVRCFTGLSAVEPVKYNNDGQPIAFVKPGNNHHIAIYEDEHGNKIPHLCTFWHAVERKKYGIPVIIENPKEVWDKILNDKEKYPQSFLEKLPGDKWKIHQYFQTNEIFFIPNAEKNLKYSDCLYRLQKMSIIGNQINLWFRQIFETQIKDDKLSSKSLRFYNVQSIGALEKLKLQKIRVDRLGCIIK

SEQ ID NO: 6034 - protein, 1259 aa, synthetic construct
  REGION 1..1259: note = Synthetic
MKKILGLDLGVSSIGWALIKEENEQPTEIIGMGVRIIPLDTDENDEFTRGSAITKNQKRTQKRSMRRNYYRYILRRTALTKELKKHGMFDENLFKLPKLELWQLRAKAATEQVSIKELGRILYHLNQKRGYQPTKGEATEDSQDNKKDTQHVKEIKNRYQQLKEENKTISQKFFEELSKNPFYRTKQQIFPREAYIEEFDKIMKKQQEFYPDVLSDELINHIRNDIIYYQRPLKSQKGLVSICEFEGFHVLNKEGKKIFTGPKVAHRSNPLFQIEKIWESINNIVIKNKKNEDFPITLEQKQKIFEYLNENPKLTLKELFKILGIKERSGWYGNKMLYKGIQGNVTKTLIKQAIGNDESAKKWLQFNLKTRPNANNESKTYLVNKDNGEVISDEDRLIIDESFINEPLYQLWHVIYSISDINECKKVLINKMGLSEEVADRLSKIDFAKLSYGNKSIKAIRKILPYLMKGYQYSDASYLAGYNHSNSLTSEEVMKKRLLEKLPLLSKNALRQPVVEKILNQMIHIVNDIIDEKRGWVTREERDKGLFEIRIELARELKQTKEERNETFKNISKIEEENKKIEKKLQELGVRATRKNIIKYRLFNEISENKINALCIYTGKMFSLSDALNGDNIDVDHIIPRSLLFDDSQSNKTLTFSYINQEKGDQTAYDYMASKGETALNDYIERVNKLYENKIISKAKRNKLLMPASKIPQDFINRQLRETAYLSRKAREILSQISKNVWATSGNVTSYLRRLWGWDDILMNLQLKRIKELITDPLSEGITEKIEIETSDGQKHSKEIIKDWSKRDDHRHHAIDALVVACTKQGYIQRVNTISAQATRDELFKEVNERKEEFREQLSLLDKYFILHRPFTTSQVEREASKIIVSYKPGKKVATYGKRFIRKNGKRIKVQDHIIVPRGPLSEEYVYGKIKVLDKNKSLKYLFENPHLIFKPHIKELVEKRLEEFDGDIKKALASTKKNPIYLPNKSEPVILEYATCFKEEYVLKYPVTKITLKDIPYIVDNKIRELIKERLEQFKGNTNEAFKEPIYIDKEKQIPIRTVRMFTGLSGVEPIKYNDSGMPISFVKPGNNHHIAIYVDKDGKKYPHLCTFWHAVERKKYEIPVIIDNPQSVWDKILSSSYQYPQSFLEKLPNDNWELLFTLQQNEYFLLHENKEYLDDILRRFDYQELPKNIFRVQKIFYNGKQLEIFFRHIYETKLIDNEWARKQKKYYPVKSLGALEKLNPIKIRVSRLGEIEAIGIK

SEQ ID NO: 6035 - protein, 1254 aa, synthetic construct
  REGION 1..1254: note = Synthetic
MNITLNYMKKILGLDLGAASIGWAIISEEIETDKTRVEILGMGSRIIPYEGTEGKDFAKGTGESRNALRTKARTIRKGYDRYQLRRKYLVEELIKNQMYPDDVLRHLPKLQLWELRSEAVHSPVSLKELGRLMLWLNQKRGYKSSRSDANLGKKDTDYVAVVKSRHENIKELNYSIGQFFYKELLADNSYKVKENIFPREAYIEEFDAICKTQQVAHSNVLTNELIKKIRDEIIYYQRPLKSQKGLVSVCEFEGFWRKGKDEKEYFVGPKVAPKSSPLFQLAKIWENINNIKIGSRTGGEINITNEQKRAIFQHLDNNDKLTSSDLLKILKLKKDECYVNKQLTKGLTGNITKHAIRQCLGDLAAKYDNLLKLELDINVLPNEGYLYDRKTGEVLGSKPILVIDPKVEYEPLYQLWHTIYSINDKDECSRVLQLKFNIEKSVADQLAAIDFTKHAFGNKSAKVIRKILPYLMDGDGYTDAMSYAGYNHSASQTKEENLQRQLLDYLKPIQKNSLRQPIVEKILNQMVNVVNSIIEKYGKPDEIRIELARELKQSKEERNDADKSMSKRQRENEFIAKRLEEYGLRATRNNIIKWRLYEEMDNQDKKLNAICVYCGQPISLTQAIRGDEVDIEHIIPKSKLFDDSQSNKTLAHRHCNKTKNDLTAYDFMKSKPEAVFNEYVVRVNYLYANHIINKSKRDKLLMTESKIPDNFIDRQLRESQYIAKKAREILQTICYNVWSTSGTVTAELRHLWGWDDVTMNLQIDKYRELGLTHFVEWESDHGKNKHQKEVITDWTKRDDHRHHAVDALTIACTKQGYIQRFNTLSASKTREDMFAEIEKRSLEFKEKRSLLEKYIIGEQPFSVLDVEKAVASILVSFKAGKKVAVWGKRKAGKRGNKKVVQDRIIVPRGALSEQFVYGKIKRQEPDRPIKYIFENPHLIFKPKIKAKVEERLSIFDGDVRKALASLKNDPVYLDENKEVVLEKATCWKDEYVLKYPVDINFNKIDKVVDTKIKKILQNRLLKFGEKEKEAFKDVQLEDKTIIKWYEHEGLERPIKSVRCFTGLAAVVPVKKDENGKDIGFVKPGNNHHIAIYTNAEQNKHQHISTFWHAVERKKYGIPVIIKNTNEVWDLIQSKPEGTYPTSFLEMLPPPNFKLLVSMQQNEMFLLNMPEELKENLDLNKKSTLSNYLYLVWSLSDNDYWFRHHLETKNSELKSVVGAKESNRFYRFKSLSSFFSTNPIKVRLNNLGDIIGVVQ

SEQ ID NO: 6036 - protein, 1252 aa, synthetic construct
  REGION 1..1252: note = Synthetic
MKKILGLDLGVSSIGWALIKEEQEKPVEIIGMGVRIVPLDTDENQEFTQGNTITKNQERTKKRSTRRSYYRYVLRRKALTAELKKHQMFNEKLFGISKLELWGLRSKAVEQQISLEELGRVLYHLNQKRGYKSVKNEEKDNKEETNYVSEIKNRYDLLKNEGKTIGQKFYEELSKNYHYRIKQQVYPREAYIEEFNKIIKKQQEFYPEILTDEFINHLRDNIIYHQRNLKSQKGLVKTCEFEGFHIKNKDGKEIFTGPKVAHRSNPLFQTAKIWESINNIVIEDKRKNKYPITIEQKQAIFQYLDNNIRLSQSELFKILGIKDKSEWYGNKMLSRGIQGNTTKVAIKEALNNNDLAKHLLQFEIKVKKVNQSDNSNTYLIDNDSGEITKEEGRLIVDNNIVNEPLYQIWHVIYSIRDINKCKYVLVKKWGLDEITAEKLAKIDFTKSSYGNKSIKALRKILPYLMKGYKYSDAASFAGYNHSKSLTKEEIIEKKLLDKIPLLPKNVLRQPVVEKILNQMIHIINDIIDENRGWITREERDKGKFEIRIELARELKQSREERNETYKNLSRIEKENKEIERRLEELGVRATRKNIIKYRLFSEISENKINATCIYTGKMFSLTDALNGNEIDVEHIIPKSILFDDSQSNKTLTFSYINKEKGDRTAYDYMASKGEEELSKYIERVDQLFKNKIINKQKRDKLLMPANNIPKDFIERQIRESQYISRKSREILNQICKNVWVTGGGVTAYLRRIWGWEDILMHLQLKRIKELIPDPVGEKITEIVEWETEDGQIHHKEVIRNWNKRNDHRHHAIDALVIACTKQGYIQRINTLSAKTTRDEIFKEVSQRNTDFRESLSLLDKYFITQKPFTSSQVEEKVNKVIISIKPGKKVATYGKRFIRKNDKRIIVQDHIIVPRGALSEESIYGKIKILDQKKPVKYLFKNTHLIFKPYIKELVEQRLSEYNGDAKKALASLKNNPIYLDNKNRKVPLEYASCFKEEYVIKYPIKSITEKDIEYIVDKKVREIISQRLKQYSGNTEEAFKEPVYLNNEKKIPIKTVRMFTKLSAVEVLKYDENGKPIAYVKTGNNHHIAIYQDEDGKKIPHLCTFWHAVDRKKYGIPVIIDNPKSVWDKILSSKENYPQSFLIKLPDQNWKFIQSFQQNEIFYISPDNKDDINIDNIEPFNLYRLQKISMKKGKKIDLWFRQIFETETNDSENYSLIKKFYNAQSISRIETLNPIKIKVNRLGEIEAIDLK

SEQ ID NO: 6037 - protein, 1251 aa, synthetic construct
  REGION 1..1251: note = Synthetic
MKKILGLDLGTASVGWSVIEEKTEKGKIKTQILGLGSRIIPYEGTEGKDFAKGTGESRNSLRTKARTARKGYDRYQLRRKYLVESLGKTNMFPNETLKNLPKIELWALRNNAVYSEIALQELGRLLLWFNQKRGYKSSRSDANLGKKDTEYVSTVKSRHEKIKELNLTIGQYFYKELSNDPFFKVKENIFPREAYIEEFDAIWQEQSKHHLFLDNCSEEILNQIAKGIFPGEKQEHYRQEVIKGGLYNTIRNMIVYNQRPLKSQKGLVSVCEFEGFWRTGKDGKEYFVGPKSAPKSSPIYQLSKMWENVNNIKVGSRSGGDIEISVEQKQAIFQHLDNNEKLTVTDLLKILKLDKKNCYINKQVERGLVGNITKHAIRQCFGNSTKYNHLLNLNLHTVETEKKGYLIDKKTGEILDEKSIKFIDAKIEQEQFYQLWHIIYSIQDKQECSNALQAKFSIEPNIADNLAEIDFSKYAFGNKSAKVIRKILPYLMEGNKYSEAMSYAGYEHSDSLTKDENLKRKLLDTLKPIQKNSLRQPIVEKILNQMVNVVNAIIEKYGKPDEIRVELARELKQSKDERNEAEKKNTKRQRENENITKRLAEYGLKATRNNILKWRLYEEIDNEEKKLNAVCIYCGQPISLTEAIKGNDVDIEHIIPKSKLFDDSQSNKTLAHRHCNKNKNDLTAYDFMKSKPTAVLEAYIERVNSLYANHVINKAKRDKLLMTEEKIPDNFIDRQLRETQYISRKAREILQTICYNVWATSGTVTSELRHLWGWDEITMNLQFEKYKQLGLTEIVEWQSEHGKNKHQKEVISGWTKRDDHRHHAIDALTIACTKQGYIQRLNTLTSEKTQEDFRKALENCTIDFKEKRSKLEKYIISEQPISTAEVEDAVANILISFKSGKKVAVIGTRKAGKLGNKKIVQTGIIIPRGSLHEEGVYGSIKQYKKESSNKHVSFENQIVKKYKLGVGSQGFIFTGKETYEQKEKINKKTGEETKVIIDKFQRTLDSIVDNGIRKVILNRLNFGFDTGESYKTNSKKALDNLKDLENNPIYLDVNKTIPIKSVRCFTGLSAVVPIKKDENGKDIGFVKSGNNHHIAIYTDRDGKKVEHLCTFWHAVERKKYGIPIIIKSPLEVWSIIEDKKLPESFLNNLPFVDWTFELSMQQNEMIILGIDDIIIKDILNAKNIKMISKYLYNIQNLSEKQYRFSHHLETKFDITKMNQPDNRFYNIRSVDSLFKLNPVKLKIDRLGNISL

SEQ ID NO: 6038 - protein, 1250 aa, synthetic construct
  REGION 1..1250: note = Synthetic
MKTIWGLDLGSASIGWAIVKEDNNITKIVALGSRVIPYDGTEGQDFVKGTGESRNTLRTKARTVRKGYDRYQLRRKYLVDVLVKNRMMPDENLKCLPKKQLWELRSKAVTEYISKQELGRILLWLNQKRGYKSSRSEANFGKKDTEYVVAVKCRYEIIKERNLTIGQHFYNELCNDEYFRIKENVFPREAYIEEFDKICEKQKVHLGLSNELIAKIRNEIIYYQRPLKSQKGLVAVCEFEGTWKTKDGKEYFVGPKVAPKSSPLFQLSKIWENVNNIKLSTKYGEDVELTLDEKLKVFDYLDNNERLTSTDLFRILHKNKKEFTVTKQLEKGIQGNIVKTSILKILGKNYKELLKLDLAIIETEQFGYLYDKKTGEILGEKSLKCIDSKVEKEPFYQLWHTIYSINNVQECSNALQKGIIVVRKEGKNDEVRVKIDKETADKLAAIDFCKFAFGNKSAKTIRKILPYLMEGDKYSEAMSYAGYDHSNSWTKDDNLRRDLLDKLKPIEKNSLRQPIVEKILNQMVNVVNAIIEKYGKPDEIRIELARELKQSRDERNSADLKMSKRQRENEIIANRLEEYGLRATRNNIVKWRLYQEIDNQDSKLNAICVYCGQPISLTEAMLGREVDVEHIIPKSKLFDDSQSNKTLAHRHCNSTKGDMTAYDFMKTKSKQEFDNYVERVGLLYSKKIISKTKRDKLLMSEDKIPDNFIDRQLRESQYIARKAREVLQTVCHNVWATSGTVTAELRHFWGWDDVTMNLQMYKYKDFPNLIETIEWESEHGKRKHSKEVIKDWTKRDDHRHHAIDALTIACTKQGFIQRFNTLNTSRTRNDMWNAIEKCSVEYKDKLTLLEKYIILQRPLSVKEVEDAVSQILVSFKAGKRVAVWGKRKVGKGGNKRVVQDRIIVPRGALSEQFVYGRIRSIEKNKTLKYLFNNPHLIFKPYIKILVEQRLNKYENDTKKALASLKEDPIYLDVDKTKLLEYGTCFKEEFVIKYDVDVNFARTEKIIDEKIKYILQTRLQRFGGSSKEAFKDVQLGEKTLKWYEDEKLEHPIHSVRCFTGLSAVVPIKKDEYGNEIGFVKPGNNHHIAIYVDRDGNENEHVCTFWHAVERKKYGIPVIIKNTNDVWDKIWQQPDNAYPQSFLKQLPSVNLEMKLSMQQNEMFVLEMTKGDVKVAIENSNYKKISEHLYRINSISTSDYCFYHHLETKKDIKNADSKASKRFFRIKSMKALFSLNPVKVKIDCLGNIIDMNK

SEQ ID NO: 6039 - protein, 1249 aa, synthetic construct
  REGION 1..1249: note = Synthetic
MKKILGLDLGSSSIGWAMIAENDNASTGNTSILGMGVRIIPYEGTEGKDFSKGTGESRNATRTLARTARKGYDRYQLRRKLLVDALVKNNMMPGELLMKAPKMDLWALRSKAALGEITPCELGRLLLWLNQKRGYKSSRSDANLDKKDTDYVAAVKSRHERLRTDNLTIGQFFFKELSNNEYFRVKENVFPREAYIEEFDTICSKQRFLSDELVAKIRNEIIYYQRPLKSQKGLVSVCEFEGFYTTKNGKEYFVGPKVAPKSSPLFQVAKMWENINNIQLSTSKGDDITISLEQKQAIFKHLDNNEKLTVTDLTKILGFKKGQFTVNKQISKGINGNITKVAIQKVLGGNKAYDQLLNFNIKIDTKDGCGYVYDKKTGEVLREKPILVVNTRIEEEPLYRVWHTIYSIPDIEICSRTLQHKFGIDEATARELAAIDFTRQGYGNKSAKAIRKIIPYLSEGDLYNEAMSFAGYDHSNSLTKDQNLNRKILEELKPIAKNSLRQPIVEKILNQMVNVVNAIIKKYGKPDEIRIELARELKQSKEERNDTEKAITKRERENENITKRLAEYGLRATRNNIIKWRLYEEIDNEDKKLNAMCIYCGQPISLTEAIKGEDVDIEHIIPKAKLFDDSQSNKTLAHRHCNSTKNNRTAYDFMKSKPEQVFNDYLERVNTLYNNHIIGKSKRDKLLMTESKIPNNFIDRQLRESQYIARKSREILQTICYTVWATSGSVTAVLRHLWGWDDVTMNLQLPKYKELQESTGTTFIETVEWESEKGKNKHTKEIIKGWSKRDDHRHHAVDALVIACTRQGFIQRINTLNASRTRDEMYKTVEQYGQKFKEKLTLLEQYLITQQPITVKEVEHAVANILISLKPGKKVAVKGTRKVGKRGKKRVVQTGIIIPRGSLSEESVYGRIKTIEQKKPVKYLFEHPELIFKPYIKKLVELRMEEHGQDAKKALASLKKDPIYLNPEKTILLEYATCFAEEYVIKYKVDVNFNKTEKVIDQGIREILQNRLAKFGGKEKEAFKDVLTTDKTIKKWYEDEGLERPILSVRCFTGLASLVTVRKNNTGKDISFVKSGNNHHIAIYQNAEGTPSTHLCTFWHAVDRKRFGLPIIIKDTSIMWDNIFSESDNKYPEDFLEKLPASGLILKESLQQNEMFVFNLQRDELKLAIANKNFKLITDNLYRLQKLTIKPSSGQVDIVFRHHLETQIIDDNFSKTSRRYINIQSLKAYFDLIPNKVIIGLTGDIVLAE

SEQ ID NO: 6040 - protein, 1248 aa, synthetic construct
  REGION 1..1248: note = Synthetic
MNKKILGLDLGVTSIGWAVIQENDSRKEILGMGSRIVPLDNDEKTEFSTGNKISKNQKRTAKRTQRKGYDRYQLRRSYLTKVLIENKMFDESLFKLPSIELWGLRAKGVTEKLSLKEIGRVLYHLNQKRGYKSSRSDANLDKKDTEYVLAVKGRHQEIKELGLTIGQKFYKELQQNEFYRIKEQVFPREAYLEEFDAIVKIQSGFYPEIFTEQLISKIRNEIIYYQRPLKSQKGLVSICELAGFTTKDGKGNSIFVGPKVAPKSSPIFQLCKIWEIVNNISLKIKSQESKGNKWIDFVPTIEQKERIVNYLNNNTKLSYTELIKILGLNKENVYANKQIQNGLPGNITVAEIKKVLENDIPDFDIEILLLDSIQVLVDKKSGEILSEVSGEVISENFENNTLYRIWHTIYSIKDEVECQLALVQKFGISEQKAKALAKIDFTKHGFGNKSSKAIRKILPYLMRGYVYSDACELAGFNHSNSLTKEEKAKMEYAEKLELIPKNSLRQPVVEKILNQAINVVNAIISKYGKPDEIRVELARELKQSKDERNEMDFRNRSNEKLNAEIGQRLSSLGIPATKRYIQKYKFIFPSLSKNLKDAHVENICIYCGKSFNISEALTGDNFDVDHIVPKSLLFDDSQTNKVLVHRSCNAQKTNQTAFDFIAKKGDVELTDYISRVDDWFKRGIISYSKMQRLKISYEGYLERKRQKKETESDKKIWENFIDRQLRETQYISRKARSIFEKICPLVTTSEGTVTAELRRLWGWNDVLMNLQKPKYQALGLTQKIEWSSNHGQKQHSKEEIIGWTKRDDHRHHAVDALVVACTKQGYIQRINTLNSSDVKDAMRREILDASIVFDEKRNLLEQYFIKERPFTTSEVENEAAKILVSFKSGKKVASKGIRKAKINGEKQIVQRNIIVPRGALSEESVYGKIKIIEKGKPVKYLFEHPDLIVNTDIKNLIRERLNQNEGNVRLALASIKKNELLTQSGVKILEGDCYKEEYVIKYPIQNIKSKDVEFIVDGAVKNAIQKRLDKYGGKEKEAFKETVWLNEEKQIPIKTVRMFTGLSVVEPFSKDNRGHAIGFVKPGNNHHIAIYIDENGNKLEHICTFWHAVERKKYGLPVIIKDTNEVWSKILEGNDYPDSFLEKLPKDKLIYHESMQQNEYFLLGIDESVLSDLENIDYSFLSDYLYRVQKIGASYYVFRHHLETSLVDTNEAKLSKRYISIRSFAAYDSYKPIKVWVDVIGKIRKINA

SEQ ID NO: 6041 - protein, 1248 aa, synthetic construct
  REGION 1..1248: note = Synthetic
MKRILGLDMGSASIGWAIIEEDGNVIKIIALGSRIIPYNGTEGQDFVKGAGETRDALRTKNRTARKGYDRYQLRRKYLVDVLVKNDMMPDESLKCLSKMQLWELRNKAVTEYVSKQELGRILLWLNQKRGYKSSRSEANLDKKDTEYVAAVKCRYEMIKEKNLTIGQCLYNELCSNEYFRIKENVFPREAYIEEFDKICEKQKKHLGLTDELIARIRNEIIYYQRPLKSQKGLVAVCDFEGFYEKTDGKERFVGPKVAPKSSPLFQLAKIWESVNNIKLSTISGENVELTLEEKKKIIHHLDNNGKLTSIELFKILHKNKKDFIVPRQLEKGIQGNIVKVSIIKILGEKYSELLKFDLTVIEEIGRCGYLYDKKTGEVLNEKTLKCVDSKVEKEPYYQLWHTIYSINDVQECSNALQKGIIIAGKVKDGDEVRVKIDKETADKLAAIDFNKLGFGNKSAKAIRKILPYLMEGDKYSEAMSYAGYDHSVSWTRDENLRRGLLDKLKPIAKNSLRQPIVEKILNQMVNLVNAIIEKYGKPDEIRIELARELKQSKDERNAADLKMSKRQRENEIIASRLEEYGLRATKNNIAKYRLYEEIENQGGKLNAICVYCGQPISRTEAILGREVDVEHIIPKSKLFDDSQSNKTLAHRRCNSFKNDMTAYDFMKTKPKQEFDAYVERVGRLYSKNMISRAKRDKLLMSEDEIPDNFIDRQLRESQYIAKKTREILQTVCCNVWATSGTVTAELRHLWGWDDITMNLQMHKYKELGLTETVVWESEHGKRKHSKEVIKGWTKRDDHRHHAIDALIIACTKQGFIQRFNTLNASKTREDMQSEIEKSSVEYKEKLTLLEKYIISQCPLSVEDVKNAVSQILVSFKSGKKVAVWGKRRVYKNGKREVVQDKIIVPRGALSEQFVYGRIRAVGKEKKMLKYLFNNSHLISNSHIKTLVEQRLNQYGNDIEKALASVKDNPIYLDADKTNMLEYGTCFEEKFVMKYNVDVNFTKTEKVVDEKIRNILQTRLQKFGGKSKEAFKDVQYEEKSLKWYEDEKLERPIHSVRCFTGLSAVVPIKKDEYGNEIGFVKPGNNHHIAIYVDKDGNKIEHVCTFWHAVERKKYGIPVIIKDTNDVWDKIWQQPDCTYPQSFLEQLPTVNLEMELSMQQNEMFVLEMAQEDVKVAIENNDYKTISEHLYRVNSLSSSDYYFYHHLETKKDIKNTDAKESKRYFRFKSVKALFLHNPVKVKIDCLGNIIQ

SEQ ID NO: 6042 - protein, 1245 aa, synthetic construct
  REGION 1..1245: note = Synthetic
MKKILGLDLGVTSIGWSVVTEKEDTKEILGMGSRIIPLSTDDKDEFSSGNKISKNQKNTTRRTQRKGYDRYQLRRKRLTEILISKNMFDPALFTLTPLQLWGLRAKAAGDMSKPHKIQDNAKVTLQEFGRILYHLNQKRGYKSSRSDANLDKKETEYVAEVKNRHQQIREQNLTIGQNFLRLLNENANYRIKQQVFPREAYMEEFDSICRQQQKHHPDQITDDFIDQVKNEIIYYQRKLKSQKGLVSICDFEGFWIKNKITGKDIFSGPKVCHRSSPLFQVCKLWETINTITLKNKKGEILSIPLEKKQDIFNYLDTHEKMSAAQLLQILGLNRNEGWYTNKQIERGLQGNVTNTQLLKYFSDGDPLLKFDLTVSATGKDAFLVDKRTGEVIGSAAHRLVEDSLEQEPMYRLWHTIYSIRDTDECKQALTKNFNIDESVAEKLSLLDFAKYSFGNKSAKAIRKMLPFLLEGYVYSDACSFAGYNHSDSYTKEEQLKKKLLDRLPLLAPNSLRQPVVEKILNQMINLVNAVLEKYGPIDEIRIELARELKQSKEERNDTFANLSKREKENIQIQKRIEGEYGLRSTRKNVIKWRLFHEIKNEETNINAICLYCGKPFGITDSLRGNSIDIEHIIPKSLLFDDSQSNKTLSHRSCNELKGNKTAYDFMKSKSEEEFAAYLDLIDTLFKNKIIGKAKRDKLLMTEEKIPKDFIERQLRQTQYIARKAREILEQVCHTVWSTSGSITEYLRRTWGWDDALMNLQLPKYRELGLTEWKEWETNDGQIHKKEIIKDWSKRDDHRHHAIDALVIACTQQAFIQRINNLSAKGNREEMYREIPDAKSRNISLLECYIVSKRPFTTKEVAEKASEILISFKSGKKVATFGVRKIKQDGKTRIVQKNIIVPRGPLSEESVYGKIRAMARDTKTGQMIKYPVKFLFEHPEKIVKSRIRKLVETRLAKFENDQKKALASLKKEPLYLDSNHTTVLEYATCYSEEYVIKYPLGSIKANDVPYIVDGKIQLLIKDRLEKHNNKEKEAFKEPLFYDAEKKIPIRSVRMFTGLSNVEPVKKDTNGRNIGFVKPGNNHHIAFYIDESGKVVEHSCTFWHAVERKKYGIPVIIKEPGKIWDKLLNGNYPEEFLNKLPKDQWIYQESLQQNEMFILGFGTETLEQQINNTNKITLSQNLYRVQKMSIKGNGQLDITFRHHLETQLNDSSTAKESKRFYNIQSIGAFEKLNPQKIRITGLGDIQL

SEQ ID NO: 6043 - protein, 1245 aa, synthetic construct
  REGION 1..1245: note = Synthetic
MKRILGLDLGSASIGWALIRENEINGNVNREILGLGCRIIPYEGTEGKDFEKGSGESRNAIRTQMRTMRKGYDRYQLRRKYLVQELIKHNMYPSDELKGLPKIQLWELRNRAATERVSLTELGRILLWLNQKRGYKSSRSDSNLDKKDTEYVATVKSRHQLIKEQNLTIGQYFYKQLQNDQFFRVKEKVFPREAYIEEFDTICNEQKKHYPNILTQELISKIRNEIIYYQRPLKSQKGLVSVCEFEGFWRKGPDGKEYFVGPKVAPRSSPIFQYAKIWENINNIKIENKQGNNIEITLEQKRALFEHLDNNEKLTTTDIVRILGLKKNECFFNKQLAKGIVGNATKCAILNCFDEAHKYAHLVKFELDIIETSKKTYLYDNTTGEVINEKTVKYIHPKIEKEPLFVLWHTIYSISDQDECSRVLQDKFGIEKEIADKLASIDFTKHGFGNKSTKTLRKILPYLMEGDKYSEAMCYAGYNHSNSLTKDENLKRELQEKLKPIPKNSLRQPIVEKILNQMVNVVNAIIDKYGKPDEIRIELARELKQSKEERNETYLNITKRERENEQIAKKLQEFGLRATRNNILKWRLYEEMDNEDKKLNAICIYCGQPISLVEAIKGADVDIEHIIPKSKLFDDSQSNKTLAHRHCNTGKGDLTAYDFMKSKPTELFNAYLERVAKLYANKVISKAKRDKLLMTESKIPNNFIDRQLRESQYIAKKAREILQTISHNVWTTSGSVTAELRRLWGWDDVTMNLQFNKYKELGLTSFVEWESEHGKSKHSKEVITGWSKRDDHRHHAVDALVIACTKQGYIQRFNTLNSSRTKQDLIADVEKKSLEFKEKLSLLEKYIVSEQPFTVKEVEEKVAEILVSFKAGKKVAVTGKRKVGKKGNKKVVQTGIIIPRGALHEESVYGKIKTAVHKPIKYAFENPDLIVIPKIKKLVEERLSKYENVKDAIASLKKEPLFIDKNKQVLLKYASCYSSDYVIKYPVDINFNKVDKVVDGRIKQILQARLNKFNGKHKEAFKDMQRGDKVIKWYEDEGLPVPIKTVRCYTGLSAVVPVKKDENGNNIGFVKPGNNHHIAIYTDSEGNKHEHVCTFWHAVERKKFGLPVIIKNTNEVWDKIQQKPLGTYPEEFLEKLPLPNLTLEVSMQQNEMFILGMAPEEISNCLDNKDYRAISEKLYRVQKLSMKNYVFRHHVETQLIDNEASKKSKRYYLIQSLGALFNLNPVKVKIDCIGNIIAWNNTDGV

SEQ ID NO: 6044 - protein, 1243 aa, synthetic construct
  REGION 1..1243: note = Synthetic
MKRILGLDLGSSSIGWAFIEEDQQKTTIIGLGSRIIPYEGTEGKDFAKGTGESRNSLRTKARTARKGYDRYQLRRKYLVDALVKANMFPDESLKNLPKIELWALRDKAVHSQITLKELGRLLLWLNQKRGYKSSRSDANLGKKDTEYVATVKSRHEKIKELNLTIGQYFYKELSKDSFFKVKENIFPREAYIEEFDTICSTQKQFYPEILNDEFISKLRNEIIYYQRPLKSQKGLVSVCDFEGFWRTAKDGKEYFVGPKVAPKSSPIYQLSKMWENINNIKVGSRLGGDIEITAEQKQAIFQHLDNNEKLTVTDLLKILQLDRKNCHVNKQIEKGLVGNITKHAIRQCLGDPTQYNHLLRLNLDIIESDKKGYLVDKKSVEILNEKSTQYIDANVEHEPLYQLWHTIYSIQDKQECSNALQAKFKIDPTIADKLADIDFSKHAFGNKSAKAIRKILPYLMEGDKYSEAMSYAGYEHSDSLTKDENLKRKLLDQLKPIQKNSLRQPIVEKILNQMVNVVNAIIKEHGKPDEIRVELARELKQSKEERNDTDKAMSKRQRENENITKRLAEYGLKATRNNIIKWRLYEEIDNEEKKLNAVCIYCGQPISLTEAIKGNDVDIEHIIPKSKLFDDSQSNKTLAHRHCNKNKNDMTAYDFMKTKPTEVFNEYVNRVNELYANHVINKTKRDKLLMPEDKIPDNFIDRQLRESQYISRKAREILQTICHNVWATSGTVTAELRHLWGWDEITMNLQFEKYKQLGLTEMVEWESEHGKNKHQKEVISGWTKRDDHRHHAIDALTIACTKQGYIQRFNTLSAVKTREDMKNTIEERSVVFNEKRSLLEKYIISEQPIEVADVEEAVANILISFKSGKKVAVIGKRKIGKRGNKKVVQTGIIIPRGSLSEDSVYGKIKTIDVRKPIKYVFENPQLIVKPYIKQLVEERIDSHNGDIKKAIASMKNNPIYLNKDKEIILEYASCYKTEYVIKYTVDINFNKIDKVIDGKIKNILQQRLDKFGGKAKEAFKDVQLSDKSIIKWYEDEGLKRPIKSVRCFTGLSAVVPVKKDEAGKDIGFVKPGNNHHIAIYTDKDGNRFEHVCTFWHAVERKKYGIPVIIKDAAEIWDKIQLQPEGTYPESFLEKLPDVQLKLELSMQQNEMFVLGMASEDIQLAIETNDYKTISDKLYRMQKMSLKPSSGQIDLVFRHHLETQIVDDISSKESKRFINIQSLGTLFGLNPYKLKIDRLGNISL

SEQ ID NO: 6045 - protein, 1243 aa, synthetic construct
  REGION 1..1243: note = Synthetic
MKKILGIDLGVASIGWAMISENKNTKKILGMGCRIIPLSTDDNKEFTRGNKISKNQKRTQKRSQRKCYDRYRLRRQALVNELAKREMLDKNLTNLNQIKLWELRSKAVTEKVSLKELGRILFHLNQKRGYKSNRSDSKLDMEDTEYLAEVKSRYEKLKEEGLTIGQKFYNELKDNHYYRVKQQVFPREAYMEEFDKIMNQQQKHYSDIITDEFKSKLKNEIIYYQRRLKSQKGLVSICEMEKITRQTENGKTFFVGPRVAHKSSPLFQVCKIWETINNITLINKKGEIYAIPIDKKREIFEYLDNNNKLTQTELFKILELKKEDGWLGNKMLTRGIQGNILKSEILKTVSGLEFDHELLKFDLIIEQFPETITFLKDRKTGEVLDEQIKKVISPVIEKQNLHKLWHVIYSIPDYEDCVNTLVNKFNIGKEAASKLAKIDFSRFTFGNKSVKAIRKILPYLMDGYGYSDACEFAGYNPTGSLTIEENAERKLSDKIENLPKNSLRQPVVEKILNQLINLVNAIIDEKNGFVTNEERNNGSFEINIELARELKQNRQERDETLKALIKTENENEKIRKRLEEEYKVRATRNNVIKWKLFHEIVEGTNKVNATCIYCGNFFGLSDALNGNEVDIEHIIPRSLLYDDSQSNKTLTHRNCNSRKGNRTAFDFMQSKGEKALNDYIERIEFLFKNKVIGINKRNKFLMSENKIPQDFIQRQLRETQYITKKSKKLLSEVSKTVTATTGSVTSRLRYLWGWDDVLLNIQLPKFKKNSLTEMIEWEAGDGSKGKVEKIIGWTKRIDYRHHAIDALTIACTKMGYVQRINTLSSKLTRDEMFRALKNNSIITNSKLSLLENYLLSQKPFETKYVQEEASKILVSFKPGKKVATLGVRKIKKDGKKIVVQSNIIVPRGPLSEESVYGKIKVIEKNKDLKFIFAKPHLIFKTYIRKMVEERISKYNGNSKKALASLKKNPIYLNENKNVVLEHATCYKEEYVIKYPLESIMPQDVKYIVDNKVKKIVEDRLSKFKNAKEAFKEPLYFNVEKKIPIKSVRMLTGLSSVEPVKRDDSNREIGFVKPGNNHHVAFYINENEKDKKIEHICTFWHAVERKKFGLPVIIKNPKEVWRKISDTKNEIEYDEKFLAKLPKDGWVFVESMQQNEMFIIGLKDDIIKQAIKDRNKKLLSEYLYRVQKISSFNYVFRNHIESDINDYTESSKLIKRFYSVRSIGAFDKLNPRKVKVNNLGEIEF

SEQ ID NO: 6046 - protein, 1241 aa, synthetic construct
  REGION 1..1241: note = Synthetic
MAKKILGLDLGANSIGWALIEETENNSKIIAMGSRIIPLNPDDKDEFMQGNAISKNQKRTEKRTQRKGYDRYQLRRKALTEVLLKNNMFDPNLFNLKQLELWGLRAKAVNEKISLTELGRILYHLNQKRGYKSPTKASSLEKKETEYVQEVKNRYQLIKEQNLTIGQKFYEELKQNPYYRTKEQVFPREAYIEEFDKIIECQKKYYPHVLTEELVNKIKNEIIYYQRPLKSQKGLVCVCEFEGRRIIINGKEIFVGPKVAPKSSPIFQITKIWETINNLKLKNKNGEQINIPIDKKRAIFEYLDKNEKLTTNELFKILEIKKEDGWYGNKQINNGIQGNITKVKILKALEGQEFDAHILQFNIEINEFHEEVSLVDTKTGEYITTNKKVVLHNIEQEPFYQLWHTIYSIDGTQECKQALIKKFNLSEQLAEKLANIDFKTSGYGNKSVKAMRKILPYLMDGYNYSNACSLAGYNHSFSLTKEELLQNQLKDKLELLPKNSLRQPIVEKILNQLINLVNEIIDENRGWVTRQDRISNNFEIRVELARELTSSKEERNEAFKLQREREKQNKIIAERLEKEYGLKPTRNNIIKWRLFHEITNEQEARINAICIYCGQPFGFSDALTGNNIDIEHIIPKSLLFDDSQNNKTLSHRHCNAAKGQNTAYDYMKSLGDDKFNEYIERVDKLFKDKLITKSKRDKLLMPASKIPKDFISRQLRESQYIARKAKQILGAICYNVCSTSGSITEHLRRIWGWDDVLMELQLPKYRAVGLTEIIEIEIDGQIHQKEVIKGWTKRDDQRHHAIDALVIACTQQGFVQRINTLASQTTKTEMLAELENQTETYKKKLSLLDKYLISKRPFTTQQVKEKVANILVSYKAGKKVATYSVRKINQNGKKVIVQQKIITPRGPLSEESIYGKIKIIEKDKDVKYLFENYELIINQHVKQLVLERLQFYQFNSKKALASLKNAPIYLDPDKKVKLEKAHCYKEEYVIKYPLQTIKPKDANSIVDKKIRELVTQRLEQYKDKEKEAFKDPLYLDDKKTIPIKTVRCFTGLTKVEPIKKDENGNDIGFVKPGNNHHIAIYTDQNGNKYEHVCTFWHAVERKKYGIPIIIYDTQEVWNKILNQNHSFPQSFIEKLPNDQWTLLFSMQLNEMFLLGLKNEDIKQCIDTQNYSKLSEHLYRVQKIAQKNYMFRHHLETQINDSAEAKLSKRFYLIQSINALYDLNPIKVKIDLLGQIYFLDNI

SEQ ID NO: 6047 - protein, 1237 aa, synthetic construct
  REGION 1..1237: note = Synthetic
MKKILGLDLGVSSIGWALIEENDSSKRILGMGTRIIPLSTDDKDEFTSGNTISKNQKRTLKRTQRKGYDRYQMRRENLRKALRAKNMLPESDLMNADKFLIWKIRNDAVSERLGLKELGRVLLHLNQKRGYKSSRNEANLDKKDTDYVAEVKSRYEKLRESNETIGQHFYREISADRYYRVKDQVFPREAYIEEFDRIIVKQQEFYPDVLTPEFVNKLRNKIIFYQRPLKSQKKLVSLCEFEKRLVVTNDGKGGKTKSYKGPRVTHRSSPLFQVCKIWESINNIKLKNKYGEEYKIPLEKKRQIFDYMDNNEKLSFKELLKILELKKNEEWTGNSWLDKGLKGNTTKIRIAKCFDTPAYAEGLTVFKLDLIQSGKITERIDCETGEIQSIPEKIIAPLFEKQPLYRLWHTIYSINDETECRNALIKNLGIPEVTAEKLASIDFTKEGFGNKSSRAIRKILPYLMDGMVYSEACLFAGYNHSGSVTKEENQGREVLNFIPLLEKNSLRQPIVEKILNQMINVVNSVINEYGKPDEIKVELARELKQSREERQNTFKNINQRERENENIAKRLVEEYNQRATRNNILKWRLFHYVKGDDSKVNNICIYCGKSFGITDALAGAEVDIEHIIPRTLLFDDSENNKVLAHRKCNQAKGNMTAYDYMKSKGEHDFKDYLERVNQLSAQKIINRIKRDKLMTPAEKIPKDFIQRQLRETQYISKKAIEILSTVSRDVHPTSGSVTEFLRRIWGWDDVLLNLQLPIYRKAGLTEWIEVETNGQIHKKEVIKDWKKRLDHRHHAIDALAIACTKQGYIQRINTLSSDITREEMYKEVSETDSRRASWKTLLEKYIAGKQPFTTSEVEKQAEKILVSFKQGKKVASKGVRKINIHGKKKIVQKDIIVPRGPLSEESVYGKIRVIEKNKPVKYLFENPHLIFKPRIKKLVEERLARFEGNARQAYLSLRKEPIFLDNEKTIRLEYGSCYKEEYVIKYPLSSFKPKDIDSVIDENVRQILRNRLSEFKGNEKEAFRNLENNPVWYNFDKKIPLKTVRRFTGLSSVEPVKYNDKKEPIGFVKPGNNHHVAIYVDEEGVKHEHVCTFWHAVERRKYGFPAIITDPRKVWDKIINQNNNLPDSFLNKLPSDGWNFLLSLQQNEMFVLGLPEEEVNRAIRENDTAVLSKYLYRVQKIAASDYYFRHHIETEIENDEISKKMFKYYRVNSLNALFYLNPVKVRVSCLGQISKSC

SEQ ID NO: 6048 - protein, 1235 aa, synthetic construct
  REGION 1..1235: note = Synthetic
MKKILGLDLGSASIGWAVTSEENSNGEVKREILGLGSRIVPYEGTEGKDFEKGTGESRNSVRTKMRTARKGYDRYQLRRKYLVNELIKNEMYPTEEVKNIPKMELWELRNRAVTSKISLTELGRLLLWLNQKRGYKSSRCEANLDKKDTDYVAEVKSRHQTIKEKSLTIGQYFYQQLSDDEFFRVKENIFPREAYIEEFEAICKQQQKHYPDLITEKFIQKVRDEIIYYQRPLKSQKGLVSICEFEGFWLKGKDDKEYFVGPKVAPRSSPIFQIAKVWENVNSIRIENKYGDKIELSLEEKQAIFNHLDNNENLTQAQIITILKLKKNECFFNKQIAKGIKGNVTKTAIIKCFEESKNYSHLLKFEYSICEDKLVDKETGEILEDISYRYIDPRIENEPYYQLWHTIYSISDMDVCSRVLQQKFSIEPDVADKLAKLDLTKGGFGNKSAKAIRKILPYLMEGYVYSDAMLFAGYDHSNSLTKPENLQRKLLERLKPIPNNSLRQPIVEKILNQMVNVVNATIDKYGKPDEIRVELARELKQSKEERSDTSRFLSKRERENEQIVKKLEEFGLRATRNNIVKWRLYEEMDNEDKKLNAICIYCGQPISITEAIKGNDVDIEHIIPKSKLFDDSQSNKTLAHRRCNTDKGDRTAYDFMKGKSEQALVAYVDRVNKLFTSKIIGKAKRDKLLMTEDKIPQNFIDRQLRESQYIARKAREILQTICHNVWSTSGTVTAELRHLWGWDDVTMNLQFPRYKELGLTEIREWESEHGKNKHSKEVIVGWSKRDDHRHHAIDALTIACTKQGYIQRFNTLSSSKTRDDMKKDVDRRSIEYREKLNLLEKYLISEQPFTVREVEEKAANILISFKAGKKVAVVGKRKVGRRGNKKVVQEGIIIPRGALSEESVYGKIKKVEAKKPLKYLFENPHLIFKPRIKQLVEERLGKFDGDTKKALASIKKEPIYLDKKKSTLLEYGSCYSDEYVIKYSIDINFNKVDKVIDENIKRILQQRLKKFNGKPKEAFKDVQRDEKVLKWYEDEGLERPIRAVRCYTGLSAVVPVRKDANGKEIGFVKPGNNHHIAIYTDAEEKKIEHICTFWHAVERKKFGLPVIITSTNEVWDKIQQSAEGTYPESFLKLLPEPHLTLHLSMQQNEMFVLGMTNEEFEIAKSSNDYRALSDKLYRVQKLGGDDYNFRHHLETELVNDNNAKVSKRFFRVNSIGALDGLNPIKVKINCIGNLV

SEQ ID NO: 6049 - protein, 1225 aa, synthetic construct
  REGION 1..1225: note = Synthetic
MKKILGLDLGVSSIGWALIDEDDKEILGVGCRIVPLSTDDKDEFVKGNAISKNQKRTLKRSQRRGYDRYQLRRKYLLEVLKQNGMVPDQTLVKLSKLDLWNIRAKAVNEKLTLSQLGRVLLHLNQKRGYKSSRSDSNLDKKDTEYVANVKSRYEQLKEMGLTIGQYLFRELSQNQYFRIKELVYPREAYIQEFTSIIRKQREFYPEILTDELILKIKDEIIYYQRGLKSQKNLVSVCDYEGSWKKVQNNGKEKEVFIGPKVAHRSSPLFQVIKIWETINNIQIRKKDGIYFEITLEKKKELFNYLDNNENLTYSELLKILELKKDEVYSNKMLTKAKGLQGNITKNSILSCFNNIDDHSHLLKLDIVIEQKNDDGFLVDKKNGEILKSKPKKIISVEVEKQPLFKLWHTIYSISEKEECINALIKNFNLPEDVALKLANLDFSKYGYSNKSHKAIRKILPYLMEGDMLYDSCSYAGYYHVLSITKEENHKRKLKDKLELLTKNSLRQPIVEKILNQMINLINSLITKYGKPDEIRIELARELKQTKDERYDTYKYLDKREKENEQIAKELEEYGLRATRNNIIKWRLYHEISEDGKKQNAICIYCGQPISFSAAISGEEVEVEHIIPRSKLFDDSQSNKTLAHRKCNSNKKEQTAFDFMKSKSEQEFNDYLERINTLYKNKIIGKTKRDKLLMPIDKIPADFINRQLRETQYISRKAREILQSICHNVWVTSGSVTSELRYFWGWDTVIENLRLPQFRNLGLTQLEEINDKNSKIKREKIIGWSKRDDHRHHAVDALTIASTKQGFIQRINNLNSDNIRNEMMRNIESSKLEFNKNNTLLENYLISQKPFTTEQVQSVISKVLISIKPGKKVASFGQRKIKKGGKKIIAQSGIIIPRGPLSEESVYGKIKVIEKEKPIKYLFENPHLIFKPYIKKLIEDRLYQFDNDPYEAIKSLKSNPIFLDPENKIKLMYASCFKDEIVIKKDLQTLTKPQIGKIVDPSIRKKLFDRLEQFNGNVKEALKDLENNPIYQNEEKKIPVKSVRCFTGSEVIEPIRKNEKGVDISFVKPGNNHHIALYYDENNKIQMHVCTFWHAVERKKYGLPIVIKNPSSVVDTVLEYPELYPESFLEKLPDGKWSFIQSFQQNEMFVLGLSKEAFEEALSSNDYQLISDNLFRVQKLSTTGYFVVFRHHLSVSADTPYEMIGFSSFQDFTGIKVSINNLGLIQ

SEQ ID NO: 6050 - protein, 1223 aa, synthetic construct
  REGION 1..1223: note = Synthetic
MNILGLDIGVSSIGWALINFTADKWMIRGMGTRIIPLNPDDKDEFTSGNTISKNQKRTQKRTQRKGYDRYQLRRKQLILLLQQYNMMPDNSLIRLSAERLYGLRTKALREQLTLEELGRVLLHLNQKRGYKSSRSDTNLDKKDTDYVTEVKNRHQQLKEKKETIGTHFHQALQANQHYRIKQQVFPREAYIEEFDAIIKTQQQFYSLLTPTLIEKIRNETVYYQRNLKSQKDLVSICELEGFATNNTTGKTVQAGPRVAPRSSPLAQACKIWETINTLSLQNKYGETYLPSQQQKLLLFNYLDNNELLTQKELFKLLGLKKEDGWYANKQITKGLQGNITKTLLLKQLKNNNRSAELLRFDLQIETGTTPAYLTDKKTGEVLATSVQKQITRHFENEPLYKLWHTTYAISDVKECTQTLIRQFAIDETTAKNIANIDFRKFSFANKSAKAMRKIIPHLIDGHVYSTACAFAGYNHSNSLTSDERLQQLLADKLDTLPKNSLRQPIVEKILNQLINLVNDIIAIHGRPDEIRIELARELKQSKEERNNTFMQIAKRERENKAIIDRIEKEYGSFGVRATRNTIIKWRLFHEINGQDVKTNATCIYCGKQFGITDALQGNSIDVEHIIPKSKLFDDSQSNKTLTHRRCNEDKDNRTAYDFMKSKGDSAFSSYLQTIDHLYNNKIINKTKRDKLLMPADKIPQDFIDRQLRETQYISRKAKELLEKVCYNVWTTSGSVTAYLRHIWGWDDVLVNLQLPKYRELGLTEYNNDKEIINGWSKRDDHRHHAIDALTIACTRQGFIHRINTLNAQSTRDNMYNDLQKNESTFNKRKPLLEAYLAAQRPFTTIQLENVVSSILISFKSGKKSATTGKRKVKIQGSKKVVQTGIIIPRGALSEDTVYGKIKVIEKEKPVKYLFENPDLIFKPYIRKLVEDRLKQHNNDTSKALLSLKKEAIYLDEAKTKILQYGTCFKEEYVVKYPIESIKIKDIPYIIDRHVQRIVQKRLEQFDNKEKDVLKDLQNNPIWHNEEKRIPVRSVRCLTGLSIVEPVKQDEKGNNIGFVKPGNNHHAAIYIDANGKKQEHICSFWHAVERKKYGIPVIITQPAEIWNIILSSGKEYPQSFLEKLPNDQWQFLQSLQQNEMFIIGLSQEDIVQALQKNDKKTLSPYLFRVRKLTAGSYWFLHHLETQPLESTQDKKAGRVVQASASTFKGYKVKITITGDITQPV

SEQ ID NO: 6051 - protein, 1161 aa, synthetic construct
  REGION 1..1161: note = Synthetic
MKKILGLDLGSASIGWALVEETEQMQYNIVSLGSRIIPYNGTEGQEFEKGTGESRNSLRTKARTARKGYDRYQLRRKNLEKILLQNGMYPNEQVRALQKLELWKLRADAPNVQISLPELGRLLFWLNQKRGYKSSRSDANLDKKDTEYVATVKSRHQKIKDAGQTVGQYFYGQILENEYHRIKEQVFPREAYIEEFDAIVARQKEYYPTILKQELIDKIRNEVIYFQRGLKSQKGLVSVCEFEGREFNGHFGGPKVAPKSSPIFQLGKIWENINNIKIADIELTAEQKLVFFNYLNCHERITEAKIRELLKLSKDSRLNGQLKNGLTGNKTYSQIASCFGNKIGEYERLFKFELEVIESEKLEYTYHPKSHIPVGEKRRKYISENVEKEPYYRLWHTIYSIKDKDECRAALIKNFGIEEEIAEKLASLDFSAGGFGNKCAKVIRKILPYLMEGDKYNVAMDYAGYNHSFSQTKDENLQRVLLDSINHLPKNSLRQPIVEKILNQMINLVNEVIKQWGRPDEIRVELARKLKQSKTERNDDDNFMRKRERENEIIKADLAKYGLKATRNNVIKWRLYHEIDDKDKKLNARCIYCGQPISLTEAILGNNVDVEHIIPKDKLFDDSQSNKTLAHRSCNSGKGNKTAYDFMKDKPQFEEYVARVEELYKKHLISLTKKRKFLMSEDKIPSDFIDRQLRESQYIARKSREILQTVCRNVWSTDGGVTAHLRKLWGWDDVTMNLQMPKYKGIGMTEIVEWESNHGKNQHTQEVIKDWSKRDDHRHHAIDALVVACTRQGYIQRINTLNSSETKDEMHRKVAGSLVEFNQKHTLLNKYLITEKPFTTSEVEDVVSKILVSFKAGKKAATPGKRKVGKRGNKQVVQDGIIIPRGALHADSVSGSIKQYDPTGNFENHNVIKYKVGVGKGYLFDGKDDKKKIDKTIDCIVDKKIRDLIKQRAEESNYSLKKMFETPILFNQRAVFSVRCKTGNKAVVPIRNGYVVPDNNHHTAIYKYDGGLKEQCVSLMQAIERKRYNLPIIIKNPKEIYDKITEIANINQLLFDSLPKLDWEFVTTLQKNDMFILGMDYSATEEALADGNYRLLSEYLYKVQNISDGIYRLCHHTITKFDLSKANKPDKRFYNIQSLKAWNTLNPQKVKINILGQIERQ

SEQ ID NO: 6052 - protein, 1248 aa, synthetic construct
  REGION 1..1248: note = Synthetic
MKKILGLDLGSASIGWAIVSENTTNNKTDYQIIGLGSRIIPYEGTEGKDFAKGTGESRNSLRTIARTSRKGYDRYQLRRKYLVEILIKNNMMPDENLKQLPKMQLWELRNKAVSSEISLKELGRLLLWLNQKRGYKSSRSDANLDKKETLYVANVKSRHEKINELNLTIGQFFYEQLKKDDFFQVKENIFPREAYIEEYNAICKTQQKFHPELTEVLIEKIKTEIIYFQRPLKSQKGLVSICDFEGFWTKKDNKEYFVGPRVAPKSTPLFQLVKIWENINNIKLNSRTGEEIEITKDQKIALFNHLDNNEKLTQSDLLKILNLKKENCYVNNQLSKGLKGNITKIKIKQCFDSNENATKHLRLDLNIKNGSGEGYLYDKKTGEIFNSKPAVFIDPLVETEPLFQLWHTIYSIKNQEECSSVIQRKFNIEKSTAVKLANIDFSKEGFGNKSTKVIRNILPYLMDGDGYSEAMSYAGYDHSNSLTKEQNFDRKLLDKLKPIPKNSLRQPIVEKILNQTVNVVNAIIDEYGKPDEIRIELARELKQSKEERIDTEKSMNRRERENEQIIKSLSEYGLRATRNNIIKWRLYEEIDNYEKKLNAVCIYCGQPISLIEAIKGNDVDIEHIIPKSKLFDDSQSNKTLAHRHCNRNKNDMTAYDFMKSKSDQSLSEYVERVNTLYTNRIIGKTKRDKLLMSEKDIPDNFIDRQLRESQYIAKKAREILQTICHEVWSTSGTVTSELRHLWGWDDVTMNLQLEKYKELGLTEIKEWESENGKNKHTKEVIKGWSKRDDHRHHAVDALTIACTKQAFIQRFNTLNSGKTREDMQFEVENRSVHFKEKMSLLEKYIVSQQPISVNEVENAVSKILISFKAGKKVAVKGTRKIGKRGNKKVVQTGIIIPRGSLSEESVYGKIKTIEEKKPVKYLFENPHLIYKAYIKELVKNRLTEFNGDTAKALNSLKKNPIYLDNDKKEIILEFATCYKDEYVIKYPVNTDFKKTDKVIDKRIKEILITRLNKFGGNPKEAFKDVQRNDTILKWYEDEELKHPIKTVRCFTGLSAIVPVKKDENGKDIGYVKPGNNHHIAIYTDADGKNIEHVCTFWHAVERKKYGIPVIIQDSNVLWDKILEDPEGTYPESFLDKLPKANLSIKLSMQQNEMFILGLTQNEFESAIVQKDEKLLSKFLYIVWSTSSSDYWFRHHLETKNSEIKNIIGAKESKRYYRIKSVSAFFELNPVKIKINCLGHISKELTFTK

SEQ ID NO: 6053 - protein, 1235 aa, synthetic construct
  REGION 1..1235: note = Synthetic
MKKVLGLDLGSSSIGWALIDKDTNKILGLGSRIIPYNGAESQDFAKGTGESRNSLRTKARTARKGYDRYQLRRKYLVDVLIENNMMPDDNLKKLPKMQLWELRNKAVISNISKQELGRLLLWLNQKRGYKSSRSDANLGKKDTEYVKDVKNRFDKIKDLGFTIGQYFHSELKKDEYFRVKENIFPREAYIEEYDIICARQKDNLGLTDELIAKIRNEVIYYQRPLKSQKGLVSVCEFEGFWTKDKNNKEVFVGPKAAPKSSPLFQIAKIWENINNIKLSSKLGETLELTLEEKQKIFEYLDNNPKLTATDLFKILGKRRNEFTVTKQIEKGIQGNITKNEILRILDKNEAYNSLLRFDLNIIETDKFGYLYSRKTGEVLGEKSVKYIDPIVENEPFYQLWHTIYSINDVQECSNALQKRFGIDLDTANKLSTIDFNKYAFGNKSAKAIRNILPYLMEGDKYSDAMSYAGYDHSNSLTKDENLERKLLDKLKPIEKNSLRQPIVEKILNQMVNVVNAIIEKYGKPDEIRIELARELKQGKEERSNTDNAIRKRQRENESIKKRLSEYGLRATRNNIIKWRLYEEIDNHDKKLNAICIYCGQPISITEAINGNEVDIEHIIPKSKLFDDSQSNKTLAHRRCNSKKNDMTAYDFMKTKSQEEFDAYVDRVNSLFANKIISKTKRDKLLMSEDKIPDNFIERQLRESQYIARKAREILQTICYDVWSTSGIVTAELRRLWGWDDVTMKLQMPKYKELGLTEMKEWESEHGKRKHTKEIIKDWTKRDDHRHHAVDALVIACTDQGFIQRFNTLNSSKTREDMYKEVEQRSGQYKEKLSLLEKYIISKCPIAIVDIEKAVANILISFKSGKKVAVFGKRKIGKQGNKKVVQAGIVVPRGALSEDSIYGKIKTIERNKTLKYLFENTQLIVDSHIRHLVEQRLEEFGKDQKKALASLKKDPIYLDVEKSKSLEYAACFKDEYVIKYTVDINFNKVDKVIDGKIKEILQNRLNKFGGKAKEAFKDVQHGEDSLRWYEDEGLERPIHSVRCFTGLSAVVPVKKDEDGNEIGFVKPGNNHHIAIYSDKEGNKSEHVCTFWHAVERKKYGIPIIIEGTNEIWDKILSAKEGFYPQSFLEQLPPPNLDLSLSMQQNEMFILGMAEEDIKNTIEKADYGQISKYLYRVQKLSTANYMFRHHLETQIIDDENSKKSKRFQNVRSIGALFLLNPFKVKIDCLGNVKPPLP

SEQ ID NO: 6054 - protein, 1274 aa, synthetic construct
  REGION 1..1274: note = Synthetic
MTKHILGLDLGTNSIGWAIIQVDNNNNVPIQIIAMGSRIIPLDSNDRDQFQKGQAISKNKDRTTARTQRKGYDRKQLKKSDDFKYSLKKILEKLDIFPTEELMKLPTLDLWKLRSDAVSNIEDITPKQLGRILYMLNQKRGYKSARSEANADKKDTDYVAEVKGRYTQLKDKGQTLGQYFYKELSDANQNNTYYRVKEKVYPREAYIEEFDAIINVQKSKHSFLTDEVIHSLRNEIIYYQRKLKSQKGLVSICEFEGFETTYFDKKTQQDKTIFTGPKVAPRTSPLFQFCKIWEVVNNISLKTKNPEGSKYKWSDRIPTIEEKQTIANYLQENENLSFIELLKILQLKKEQVYANKQILKGIQGNTTFSAIHKIIGNSEHLKFDIETIPSKHFAVLVDKKTGEILDERDSLELNSALEQEPFYQLWHTIYSIKDLDECKKALIKRFNFEEEIAEKLSKIDFNKQAFGNKSNKAMRKMLPYLMLGYNQSEAESFAGYNRRLTKEEKSKNVSDEPLQLLAKNSLRQPVVEKILNQMINVVNAIIEKYGKPEEIRVELARELKQSKDEREDADKQNGFNKKLNELVATKLTELGLPTTKHYIQKYKFIFPAKDKNWKEAQVANQCIYCGDTFNLTEALSGDNFDVDHIVPKALLFDDSQANKVLVHRSCNSTKTNNTAYDYITKKGSQALNDYVARVDDWFKRGIISYGKMQRLKVSFEEYQERKKIGKETEADKRIWENFIDRQLRETAYIAKKAKEILEKVCHNVTSTEGNVTAKLRQLWGWDNVLMNLQLPKYKELEKKTKQTFTQLKEWTSDHGNRKHQKEEIINWTKRDDHRHHAIDALVIACTQQGFIQRINTLSSSDVKDEMKKELEEDKTVYNERLTLLENYLLEKKPFSTEEIEKEADKILVSFKAGKKVATLSKYKATGINEIKGVLVPRGPLHEQSVYGKIKVIEKDKPLKYLFENSDKIVNPLIKHLVKTRLLENENNAQAALVTLKNKPILLNNKQTEILEKASCYNEATVLKYKLQSLKASQIDDIVDEKIKFLIKERLSKFGNKEKEAFKDILWFNEKKQIPITSIRLFARPDANNLQVIKKHEKGKNIGFVLSGNNHHIAIYEDKNNKLIQHICDFWHAVERKRNNIPVLIEDTSTIWNHLINEDFSESFLNKLPNDSLKLKFSLQQNEMFILGLPKEQSEEAIKSNNKSLLSKHLYLVWSITDGDYFFRHHLETKNTELKKIDGSKESKRYLRLSTKSLVDLNPIKVRLNHLGEITKIGE

SEQ ID NO: 6055 - protein, 1287 aa, synthetic construct
  REGION 1..1287: note = Synthetic
MKTVLGLDLGTNSIGWALIELDENNIPIRIVAMGSRIIPLSTSDKEEFQRGLSITKNQSRTVSRTQRKGYDRKQLKKSYLKKILNKYNIFPSDELLKLPMLDLWKLRSDSANPNENISAEQLGRILYMLNQKRGYKSARSEANADKKDTDYIQAVKGRYAQLKDRNQTIGQYFYGELNDANENNSYFRIKEEVYPREAYTEEFDTIINAQKDKHDFLTDEVIHQLRNEIIYFQRKLKSQKGLVSICEFEGFEKTVFDKEKNKDKVVFVGPKVAPKTSPLFQLCRIWEVVNTITLKIKNPEGSKYKWGEKIPDVKEKEILADYLFKNESLSFTKLLEILKLNKNNVYFNKQILKGIKGNETYSILHSILGDSELLNFDVSIIPSNHTSMLIDKKTGEILEERAGLELDTSLEKEPLNQLWHTIYSIKDLDECKSALIKRFGFDDETADKLSRIDFNKQAFGNKSNKSMRKILPFLMEGYDYSQSCSLAGYNHSNSFTKDEREQQITLDKLELLPKNSLRQPIVEKILNQMINVVNAILERYGKPSEIRVELARELKQSKDERNDTDLQNSKNKKLNEEIGKRLAELGLPLTKRYIQKYKFIFPSLSKNLKDAHVNNQCIYCGETFNLTEALSGDAFDVDHIVPKALLFDDSQTNKVLVHRKCNSTKTNQTAYDYIATKGDEQVRVYSERVDDWFKRGIISYSKMQRLKVSHKEYLERKKLGKETETDKKLWENFIDRQLRDTQYISRKSREILQKVCNNVATTEGGVTAKLRNLWGWDDVLMNLQMPKYKELGQTVVKEWTSEHGKRKHQKEEIENWTKRDDHRHHAIDALVVACTKQGFIQRINTLNSSETKDLMQQEIKEAKKLLGENYNEKEFENNNESVKNHKERLSQLDDYLRLQKPVKFDTKYVEQEADKVLVSFKSGKKVATITKFKATGKNKDTGVIVPRGALHEQNVYGKIKVIEKDKSLKYLFENSEKIVNPKIKNIVEIILSENENNSKMALSTLKKNPIFLNEEKTDLLEKASCYEYVTVRKYPLNTIKASQADDIVDERVKFLVKERLTQFGNKEKEAFKDTLWFNEEKQIPIITVRLFARPDANNLQAIKKDESGKEIGFVVMGNNHHIAIYEDKDGKLVQHSCTFWHAVERKKYNISTVIKNSSDAWNQFLDNELPEPFLNKLPADNLNLKFSLQQNEMFILGLSQEEFDKALKSNDKSLLSKHLYLVWSISENNYWFRHHLETKNSDLKKTNGVKESKRLYNIRSLGSLFSLNPIKIRLNHLGEITKIGEYS

SEQ ID NO: 6056 - protein, 1265 aa, synthetic construct
  REGION 1..1265: note = Synthetic
MKRILGLDLGTNSIGWALVEKDEKKKEIIGMGSRIVPLSPDDKDEFSKGNTISKNHRRTVKRTQRKLYDRYQLRRNALIEELKNKNMMPDEDLIHVSKFRLWELRSKAVETKLTLPEIGRILLHLNQKRGYKSARSEENLDKKDTEYVEKVKNRHEELRDAGLTIGQYLLKELKKSENFRTKDLVYPREAYIEEFDRIISIQKGYYPEELSEDFIQRIRNEIIFYQRALKSQKGLVSICEFEGFWMEKEGKNLYVGPKVAPKSSPLFQIEKIWETINNIRLKDKYGQPIVLGIREKEKLFKVLNIPGAGSEDFDNFSKYSLDRNGKLSYSKLLNLLGLSKDDVYANKQLENGIQGNILRQKILNCFNNPDEFSELLRFDISFIKTDKKVHLYDRKTGEVIHEEKESIIANKAEDIEKEPLYRLWHVLYSIKDREECENILKKKFNIPPDSAEKLSALDFTLMAFGNKSVRAIRRILPYLAEGYDYSESCMLAGYNHSNSLTKDQNRDRQIAERLSLLEKNSLRQPVVEKILNQMINLVNAVIEEYGHPDEIRIELARELKQSRQERFDADKAIRKIERDNQSIRKELVENYALRASRNNVIKWRLYHEMNNQKLNAICVYCGQPISFTDAIKGNDVDIEHIIPKAKLFDDSQSNKTLSHRSCNRQKDKQTAFDYMKTKKEDEFHEYIERVNYLYKNRLIGKAKRDKLLMSEDKIPQDFIQRQLRESQYIARKSREILMEVCHDVWTTSGTVTAELRHIWGWDDVLMNLQMPKYKKYDLTEEIEFENNGQKHKKERITDWNKRNDHRHHAIDALTVACTEQGFIQRLNTLNSGKTRNEMLRAINEFQKNASEVDNKRSEFEIEKRKLYQDYLFVNKPFSTNEVEQAASKIMISFKPGKKVATWGKRKVKRNGRKVTVQSDILVPRGALSEEQVYGRIKVLKRENPVKFLFHNPHLIVKERIRKKVQKRLSEYDDNPDKALKSLENEPIYIKDDILLEWASCYSEEYVYKYKVDVDFKKADKIIDDRVREIVKQRLSEFDNNPKEAFKDLDGNPIWFNEEKNIPIKSVRCFTGLSSIEPLKKNANNEVTGFVKPGNNHHIALYLDENGKLQEHICTFWHAVERKKYDIPVIIKNTDEIWEKVLSEGEDYFPDDFLEKLPDIKWQFVTSLQQNEMFLLGLPEENVRQINVNQKDNYSFLSDYLYRVQKITSGDYVFRHHLETQIVDTTDSKLCKRWYRVQSLKAFAGLNPVKIRVDVLGRMVWYQKCF

SEQ ID NO: 6057 - protein, 1302 aa, synthetic construct
  REGION 1..1302: note = Synthetic
MKKILGLDLGTNSIGWALVSENENKKEIIGMGSRIIPLSSDDKTEFSSGNTISKNQKRTEKRGQRRGYDRYQLRREALTAELKKNNMLPDENLIKLKPLELWGLREKAVNEQITLNEFGRVLYHLNQKRGYKSSRSDANLDKKDTDYVKEVKGRFEDINEQGITIGQKFYAELQKNEYYRIKQQVFPREAYIKEFEKICEQQQIYYPYIITNEFVRHLKDDVIYYQRKLKSQKGLVSICEFEGFYTKTKEGKEIFAGPKVAPKSSPLFQVCKIWETINTITLKNKKGEIFFISIEKKNEIFEYLDNNEKLTQVRLFEILELDKNDGWSGNKQTAKGLQGNITKALILNAIKSSKFDEQHIQFNLTVDDLDKECYLVDRKTGEILETKVKKTIKPNIEELPLYKLWHTIYSISDDLDCVNTLIEKFKINKETAENLAKIDFVKFGFGNKSVKSMRKILPYLMDGYVYSDACSFAGYNHSNSITNDENLKRKLLNAIPNLSKNSLRQPVVEKILNQTINLVNEIIDEKRGWITRQERLNNKFEIRVELSRELKQSKDERNDTSIAMEANKKINEEVTNRLKGLNIRTSKRNIEKYKFIFPIRTLYNKDGRFDKKSFENAQAFKQCIYCGESFSITEAINGDNFDVDHIIPKSLLFDDSQTNRVLVHRKCNADDKKNKTAYDFIRAKGDEELNKYLERLENWYKKGILSYSKLERLKVSNEDYVDRKRKGKETDSDKKLWENFTERQLRETQYISRKSKEILEQVCYNVWSTSGSVTEHLRRIWGWDDVLMNLQLSKYRDLSDMIYTDEWETNDGQIHKKEKIKNWSKRDDHRHHAIDALAIACTQQGFVQRINTLSSQQNRDEMYAEIEKQGKEFKEKLNLLDKYLILQKPFTTNQIEKNASEILVSFKAGKRVATIGKRKVKKNGKKEVVQTGIIIPRGQLSEESVYGKVKTIATDLKTNKIIKYTPKYLFENSHLIFNPKIKELVEKRLTRFENDSKKAISSLKNEPIYLDENKTIVLQYGTCFRDEIVIKYPLGTGQGMLFNGKENELTANKVLESIVDKGVRDKIKARIFINGTFIGTKEAFKDLEKNPVLHNDEKRIPIKSVRCLTGLSAVASIKKDENGKEIGFVKPGNNHHIAIYIDENGKKQEHSCSFWHAVERKKYGIPVIIKNPKDIWDKILLNKNEYPNSFLEKIPNDKWLFNMSLQQNEMFILEMKDDDFEKAIKENDKKTINQYLYLVWSIAENDYWFRHHLETKNSELKKIEGAVQSKRYYRKSLVALEKLNPKKIRINNLGEITSIGEY

SEQ ID NO: 6058 - protein, 1262 aa, synthetic construct
  REGION 1..1262: note = Synthetic
MKKILGLDLGSASIGWALINEKEENNKTTSSIIALGSRIIPYEGTEGKDFAKGTGESRNSLRTQARTTRKGYDRYQLRRKYLEDILIKNNMMPTDELKKLPKMELWALRAKAVTQEISLQELGRLLLWLNQKRGYKSSRSDANKDKKDTAYVAEVKSRHEIIKEQNITIGQYFYNELVKDNFYKVKENIFPREAYIEEFDAIWKCQERFHQVLNNCPSESLARFGKSMFPSTNQEHLRNEIIKMGLYNLIKNFIIYNQRPLKSQKGLVSVCEFEGFTVKKGEKEYFVGPKVAPKSSPLFQIVKIWEIINNIKINNRKGEEIIITTEQKKAIFEHLDNNEKLTPTDLIKILGLKKDDCYINKQLAKGLNGNVTKNAIKQYLGKDYDNLLTFELHTVIEEGEVYLYSKKTGEVLNAKQKMHIAPNVEKEPLYQLWHTIYSISDQEECSNALQTKFKIDTDTANKLASIDFTKHAFGNKSAKVIRKILPYLMEGDGYSEAMCYAGYDHSNSFTKEQNLDRKLLDSLKPIAKNSLRQPIVEKILNQMVNVVNAIIEKYGKPDEIRIELARELKQSKEERNDADKSMSKRQRENETIIKRLEEYGLRATRNNIIKWRLYEEIDNEDKKLNAMCIYCGQPISLTQAIQGTDVDIEHIIPKSKLFDDSQSNKTLAHRHCNRNKNDMTAYDFMKSKPDEELQKYIERVNLLYSNHIINKAKRNKLLMTESKIPDNFIDRQLRESQYIAKKAREILQTICHSVWTTSGTVTSELRHLWGWDDVTMNLQFPKYKAIPEMTEIKEWESDHGKNKHKKEVIKDWSKRDDHRHHAVDALTIACTKQGFIQRFNTLNSNKTREDMSHIVDECSVEYKEKMSLLEKYIVSQQPISVSEVQKAVGNILISFKSGKKVAVPGTRKIGKRGNKRVVQTGIIVPRGSLHEDGVYGSIKQYQKDSNANEVRFTNNIVKKYKLGIGAQGFVFTGKETYEVKEKLNKKTNIIESVTTDKIKNTLDSIVDKGIRNAVLKRLNRGFEKDKTYKDDVKKALENLKNLDKDPIYLNEEKKIPIKTVRCFTGLSAVVPVKKDEQGNDIGFVKPGNNHHIAIYIDKDGNKQEYVCTFWHAVERKKYGIPVIINNTNEVWDKILLQADGTYPNSFLEKLPKPNLSLELSMQQNQMFILGMNKEEIELSISNNDYKAISDKLYRVQKMSIIPSSGQLDLTFRHHLETQLSDDNNSKICKRFIKAQSLNSLFNLQPYKVSIDCLGNIVDVKEK

SEQ ID NO: 6059 - protein, 1287 aa, synthetic construct
  REGION 1..1287: note = Synthetic
MISQRKNPYCDLLRCKVRTFIKKNIMDKKILGLDLGVSSIGWALICEGENNRSILGLGSRIIPLNTDEKEEFSTGNAISKNQKRTLKRTQRKGYDRYQLRRKKLVELLTEFRMMPEKELMNISSLGLYGLRNKAVKEKVELKELGRIFYHLNQKRGYKSSRSDANLDKKDTEYVAAVKSRHQQIKEAGFTIGQYFYNKLLDDKYYRIKEQVFPREAYIEEFDAICTQQKKYHPVLTDEVIHKLRNEIIYYQRKLKSQKELLSICEFEGQERNDEKGNIIFTGPKVAPRSSPLFQFCRIWETVNNISLKVKNPEGSKYKWADFIPSLEQKNEIVKYLNTHATLSNAELLKILNLKKENVYLNKQLVKGIKGNSTYTEIDAVLSNKKLLQFTVTTKELPSKAYLTDKKTGEMLMETSGCVVDASIEKEPFYQLWHTIYSIKDMDECKRALMTRFDIPEDEAEALAKIDFTKQSFGDKSAKAIRKILPYLMQGHHYADACSLAGYNHSNSLTKEEQQKRNTGDLLENLPKNSLRQPVAEKILNQMINLVNAIIDKYGKPDEIRVELARELKQSKDERNEADKQNSLNKKLNEEIAKRLRELGLPETKRFIQKYKFIFPAKDKKWNEAQAINQCIYCGETFNLTEALAGDNFDVDHIIPQALLFDDSQTNKVLVHRKCNKDKTNTTAYDYIASKGDQALADYIARVDDWFSRGVISFSKMQRLKTSYNDYLERKKQKKETQADKRLWENFIDRQLRESAYISRKARQILKKVCNQVHTTEGTVTAKLRQLWGWEDVLLQLQLPKYKELQLTEIKEWQSDHGKRKHQKEEIKEWSKRDDHRHHALDALTIACTKQGFIQRINTLNASDVRNEMNKEVEGASLEYNDRLTLLEKYLLLQRPFTTDQVKEELAKVLISFKPGKKVASSGSRKMKVNGKKQVVQKNIIVPRGPLSEESVYGKIKITEPHKPVKYLFENPHLIFKPYIKEKVEQRLAEYNGDVKKAIASLKKTPLYLDNENTKILEYGTCYKEEVVIKYPVASLKVKDIEFIVDRKVREVITQRLEQFDNKEKEAFKNLEENPIWYNKEKKIPIKTVRCFTRLAAVEPVKKDPDGNIIGFVKPGNNHHIAIYTDEHGKKQEHLCSFWHAVERKKYRLPVIIKNPKEVWDKILSQKENYPDSFLEKLPGDKWIYEVSLQQNEMFILGMTREDFEKAIKENNKAELSRYLYRVQKLTVIGKGQINIWFRHHLETELNDSGAAKISRRYINIQSIGAFLKENPMKIKVDRLGDISPVKK

SEQ ID NO: 6060 - protein, 1252 aa, synthetic construct
  REGION 1..1252: note = Synthetic
MKTILGLDLGSASIGWALINENNNKTSIIDLGCRIIPYEGTEGKDFAKGTGESKNALRTKARTARRGYDRYQLRRKYLVNALVKVNMYPDEALRNLPKNELWALRSKAVHSQITLKELGRLLLWLNQKRGYKSSRSDANLGKKDTEYVSLVKSRHEKIKELNLTIGQFFYNELSKNPYFRVKDNIFPREAYIEEFDTICNTQKSFYPDVLTENFISRLRNEIIYYQRPLKSQKGLVSVCEFEGFWKVGQDGKEYFVGPKVAPKSSPIYQLSKMWENINNIKIGTRNGQNIELTIEQKQAIFHHLDNNEKLTVTDLLKILHLNRKDCFINKQIEKGILGNITKHAIQQCFDKTEEYNHLLSLNLNIIETERQGYLIDKKTGEILNEKPIRYIDSNIEKEPFYQLWHTIYSIQDTQECSSALQTRFNIEPDVADKLAKIDFNKQGFGNKSTKVIRKILPYLMEGNKYNEAMSYVGYEHSNSLTKDENLKRKLLDLLKPIEKNSLRQPVVEKILNQMVNVVNVIIEKHSEKDENGNIIKYFKFDEIRVELARELKQSKEERNETDKAMSKRQRENENIAKRLAEYGLRATRNNIIKWRLYEEINNEEKKLNAICIYCGQPISLTEAIKGDNIDIEHIIPKSKLFDDSQSNKTLAHRHCNATKSDRTSYDFMKSKPAEVFEAYVERVNSLYSNFIINKAKRDKLLMPEEKIPYNFIDRQLRESQYIARKSREILQTICHNVWATSGSVTAELRHLWGWDDVTMNLQFDKYKELGLTEIVEWESEHGKNKHQKEVISGWSKRDDHRHHAVDALTIACTKQGYIQRFNTLNAEKTREDMKSAIEERSVVFNEKRSLLEKYIISEQPITVSEVENAVSNILVSFKPGKKVASTGKRKIGKRGNKKVVQTGIIIPRGALHEESVYGKIKTIDEKKPIKYIFENSHLILKPYIKQLVEDRIEKHNGDVKKAIASLKKEPIFLDDNNEVELKYASCYKSEYVIKYPVDTSFNKTDKVVDKKIKAILLQRLNKFDNKHKEAFKDVLLEDKLIIPWYEDEGLERPIKTVRCFTGLSAVIPIKKDKNGQDISFVKPGNNHHIAIYTDRDGNKIEHVCTFWHAVERKKYGIPIVIKDSSEVWDKIQMLPENSFPESFLEKLPEVHLRLELSMQQNEMFVLGMKKEEINTAIASNDKTAISDNLYRVQKLSEKNYMFRHHLETQIIDDENSKTSKRYINVRSLGALFNLNPYKIKINILGDIQTEEI

SEQ ID NO: 6061 - protein, 1245 aa, synthetic construct
  REGION 1..1245: note = Synthetic
MKNKILGLDLGSASIGWALVSEDSENESEKTTIIDMGSRIIPYDGTEGQDFVKGTGESKNSIRTSYRRARRNYDRYQMRREALVKILSQNNMMPDERLKTLQKLDLWNLRARAAIEQISLPELGRILLLLNQKRGYKSSRADVNIDKKDTEYVATVKSRHDTIKELNYTIGQYFHEKLAQDEFFRIKENVFPREAYIEEFNQICYIQQQFHSMLSNELISKIRDEIIYYQRPLKSQKGLVATCEFEGFTVTKDGKEYFTGPKVAHKSSPLFQVSKIWESINNLRIKTKHGDKIIFSEEERKKIFEHLDNNEKLTFKNLCIILGKKEDELYADRKLYKTGLQGNVTKFIFNKILKDNPIKESLFKMDYKIIEDYDHQTYLICRKTGEIIPNSEHNKQYIDQSIEFEPLYRLWHTIYSISDVEVCTKTLIKNFGLDQESALKLANIDLNKYGYSNKSVKVLRKILPYLTLGYSYSQAMELAGYNHSGSLTKDENLSRYLLDKLKPLPKNSLRQPVVEKILNQMINLVNEIIYRYGKPDEIRVELARELKQSRQERNDTESFINKRKRENDKIIEELEEFGLRATKNNILKARLYKEMEDGEKKLNAICVYCGKNISFAEAIRGDNVDIEHIIPKSKLFDDSQSNKTLAHRKCNSTKGNLTAFDFMKGSKSDQEFNAYVERVNTLFKNHVISKTKRDKLLMPESEIPDNFIERQLRESQYISRKAREILNTICNKVWSTSGTVTAELRHLWGWDEVTMKLQLPKYKQVGLTETVIWESNHGKNIHEKEIIKDWSKRDDHRHHAVDALTIACTKQGFIQRFNSQNSKTNNPIIVEDIKQSNVEYTEKLSNLEKYIISKQPIPVYEVEKAVSKILISYKSGKKVISKGTRKVGQKGNKKVVQRDIIIPRGALSEESIYGKIRLLEKNKPLKYLFENPDLIVKQYIRDLIMDRIASNNNDVKKAYSQTRKDPIYLDENKTIALEYASCYEEKFVIKYPVNSSFNKVDKVIDNKIRQILTDRLKKYNNNPKEAYKDIITEDKSTIPWFKDEGLSRPIYSVRCLTGLSAVVPARKNNDGNNIGYVKPGNNHHIAIYSDNQGKLVEHTCTFWHAVERRKYGLPSIIKNSDELWDYIQLKITHELPESFLNQLPPPGYELKHSLQQNEMFILGIPKEEVETLLERGDFSTLSNNLYRVQSISSNDYYLRHHLETQIVNTKESTIAIRFYRIRSIKAFNEIHPYKIKIDILGKPLI

SEQ ID NO: 6062 - protein, 1272 aa, synthetic construct
  REGION 1..1272: note = Synthetic
MNKYILGLDLGVTSIGWALVAVDENNIPVRIIAMGSRIIPLSSDDRDQFQKGQSITKNQDRTNNRTQRKGYDRKQLQKNELKKILKQYNIFPTEELLKLPMLDLWKLRSDSVNPDAAISGAQLGRILYMLNQKRGYKSARSEANADKKDTDYVQAVKGRYAELKERNQTIGQYFYEALNTAKNTNSYFRIKEAVYPREAYIEEFDTLIEIQKNQHDFLTDKVIEQLRNEIIYFQRKLKSQKGLVSICELEGFEKKVLDKEKNKEKLVFVGPKVAPRTAPLFQLCRIWEVVNTLSLKIKNPENSKYKWSDRVISLDEKQKIAEYLFSNGNLSFSELLKILKLKKEDVYTNKQILKGIKGNEVYESIRTIIGDNDLLQFNAAVVSSNYIAMLVDKKTGEVLEEKEGLEIDKKVEQEPLHQLWHTIYSIKELEECKNALIKRFGFDSDTAEKLSHLDFNKQAFGNKSAKAMRKILPYLMQGYDYSKACSLAGYNHSNSLTKEEKEQQPLADRLELLSKNDLRQPVVEKIINQMIHVVNAILEQYGRPVEIRVELARELKQSKDERNDMDVWNSKNQKLNTEIGRRLSELGLPTTKRYIQKYKFIFPSLSKNIKEARVNNQCIYCGETFNLTEALKGDAFDVDHIVPKALLFDDSQTNKILVHRKCNANKTNQTAYDYMASKGKNELESYLERVDDWYNRGIVSYGKVQRLKASYNEYLERKKQKKETELDRKLWENFIDRQLRETQYIARKARMILQKVCSNVTATEGGVTAKLRDLWGWDDVLMNLQMPKYMSAEEATGKTFIGIKEWTSDHGKRKHQKKEIINWSKRDDHRHHAIDALVIACTKQGFIQRINTLNASETRDEMNRKVEEAQIVFKEKATLLEKYLIMQQPFTTEQVMKEADKILISFKAGKKVATITKYKATGKNKQTGVIVPRGALHEQSVYGKIKVIEKEKPVKYLFENANKIVNPKIKEQVYERLSEYKNEVRAALSSLKKEPIYLNKEKTEILNKASCYNEATVLKYKLVGLKSQQVKDIVDEKVKKLVAERLALHGNNEKEAFKDTLWFNEEKQIPIRTVRLLARPDANNLQVIKKDANGKEIGFVLTGSNHHIAIYEDKKGNMSQYGCTFWHAIERKKYQIPYIFKETSEIWNAILNKDYPESFLNKLPADGLRLKFSMQQNEMFVLGLSQEELNAALKNNDTSILSKHLYLVWSISDNNYWFRHHLETKNSELKKTEGAKESKRFYNIRSVGALMALNPIKVRINHLGTINRIGEF

SEQ ID NO: 6063 - protein, 1231 aa, synthetic construct
  REGION 1..1231: note = Synthetic
MKKILGLDLGVSSIGWALVLENDDIREILGLGCRIIPLNPDDKQEFSTGNSISKNKKRTTDRTQRKGYDRYQLRRKNLTQELLEKNMFDESILNLKPLELWGLRAKAVNDKITLKELGRVLYHLNQKRGYKSGRSEANLDKKDTEYVSEVKNRHQEIKELGITIGQKFYNELLKNEHYRIKKQVFPREAYIEEFDAIMREQQTHYKEILTDKFILKLRNEIIYFQRKLKSQKGLVNVCDFEGFWFKTEEGKEIFVGPRVAQRSSPLFQVCKIWETINHISLRSKKGEEFKIPLEKKIELFKYLDTHEKLSQAELFKILNLKKDDYYGNKLIAKGIQGNITKSLILKSVKNLIFDESLLNFNLEIQEKTDEEIYLTDMKTGEIIDSNIKKVISDNFEKQPFYQLWHTIYSISEKNECIKVLMNKFNIEQTSAEKLASLDLTNYAYGNKSSKAIRKILPYLMDGFVYSDASSFAGYNHSNSLTKDENLKRKLIDKIPLLSKNSLRQPIVEKILNQLINIVNAIIEKYGKPDEIRIELARELKQSREERNETYKNINKIENENEIIRKRLQNDYGIRPTRNNIIKWRLFHEINNEESIVNANCIYCGKQFGITEALKGSNVDVEHIIPKSLLFDDSQSNKTLSHRNCNEEKGKDTAFDYMQKKGEELFNQYLNRVEDLYKRRIIGKSKRDKLLTPINKIPQDFIERQLRETQYISRKAKEILQQVCRNVWSTSGNITAHLRNLWGWDDVLMNLQLPKFRELGLTEFIEWETKDGQKHKKEIIKDWTKRDDHRHHAIDALTIACTKQGFIQRINTLSSKHTRSEMFAELSKQNTEFKEKLNLLDSYLILQKPFTTKQVADKAEEILISFKSGKKVATIGTRKIKKRGKKVEVQKNIIIPRGALSEEQVYGKIRIIQRKKPIKYLFENSSLIYKPYIKKLVEERISKFEGDIKKSISSLKKEPIYLDEEMKIKLEYGSCFKEEIVIKYPLESIKAKDAEFIVDKKIKELVMERLSKFGNKEKGAFDEPLYFDEKSKIQIKSVRMLTGLSAVEPIKKDENGNDIGFVKPGNNHHIAFYSDENGKTIEHICTFWNAVERKKFGLPVIINNPNEIWESILNEENDDKYSNSFLEKLPKNNWTFKYSMQQNEMFIIGLSPEILIKALKEKNKKLLSNYIFRVQKIASNDYWLRLHSETKVGDTTNVKESKRYYRIKSIGAFEKLNPQKIRINKLGEIIID

SEQ ID NO: 6064 - protein, 1266 aa, synthetic construct
  REGION 1..1266: note = Synthetic
MTKNILGLDLGTNSIGWALVEVDGNNIPIRIIAMGSRIIPLTASDKEEFQRGLSITKNQSRTVSRTQRKGYDRKQLKKSDLKKLLIKYDIFPSEELLKLPMLDLWKLRSDAANPNENISAEQLGRIFYMLNQKRGYKSARSEANADKKDTDYVQAVKGRYAQLKDKNQTIGQFFYEGLNNANLNNSYFRIKEEVYPREAYIEEFDTIINAQKGKHDFLTDEIIHQLRNEIIYYQRKLKSQKGLVSVCEFEGFEKTVFDKEKNKEKTIFVGPKVAPKTSPLFQLCRIWEVVNTITLKIKNPEESKYKWGEKIPTLEEKELIAEYLFKNDNLSFTKLIEILNLKKDDVYVNKQILKGIKGNETYASIHKILGDNDLLNFDVSIIPTEKTSILVDKQTGEIFEERAGLELDASLEKEPLYQLWHTIYSLKDLDECKNALIKRFGFEEEIAEKLSKIDFNKQAFGNKSNKAMRKILPFLMEGYDYSESCSLAGYNHSNSLTKDEREQQKTIDRLELLTKNSLRQPIVEKILNQMINIVNAIIEQYGKPSEIRVELARELKQSKDERNDADLQNSKNKKLNEEIGKRLTELGLPATKRYIQKYKFIFPSLSKNLKEAKVNNQCIYCGESFNLTEALSGDAYDVDHIVPKALLFDDSQNNKVLVHRKCNATKTNQTAYDYMATKGDEAVRIYAERVDDWFNRGIISYSKMQRLKVSHKEYLGRKKLGKETETDKKLWENFIDRQLKDTQYISRKAREILQKVCNNVTTTEGGVTAKLRNLWGWDDVLMNLQMPKYKELGQTVTKEWTSEHGKRKHQKEEIENWTKRDDHRHHAIDALVVACTKQGFIQRINTLNSSETKDLMNKEIEEAKIEFNEKTTLLEKYLKTQKPFTTEQVMNEADKVLVSFKAGKKVATVTKFKATGKNKITGVIVPRGALHEQSVYGKIKVIEKDKPLKYLFENSNKIVDTKIKNLVETRLSENENSSKMALSSLKKNPIYLNEEKTEILEKASCYNDATVLKYKLQNLKASQADDIVDERVKILVKERLAQFNNKEKEAFKDTLWFNQEKQIPIKTVRLFARPDANNLQAIKKDENGKEIGFVVMGNNHHIAIYEDKDQKLIQHSCTFWHAVERKKHKISTVIKNSSDVWNELLNKELPESFLNKLPADNLNLKFSMQQNEMFILGLSKEEFDEAIQKSDKPLLSKHLYLVWSISENNYWFRHHLETKNSDLKKTDGVKESKRLYNIRSLGSLFSLNPIKVRLNHLGEITKIGEY

SEQ ID NO: 6065 - protein, 1231 aa, synthetic construct
  REGION 1..1231: note = Synthetic
MKKVLGLDLGVTSIGWALISENDNEVDNKILGIGCRIIPYSSTEDNDFTKGSGESKCQKRTIHRTQRKMFDRYQLRRTDLVSKLRELKMLPSATLFTLDSIGLYSLRDKALQEKLSLEEIGRIFFHLNQKRGYKHARSDESEDKKETQYVLEVNSRYDELRELKMTVGQLFYQGLKSDRHYRIKNKVYPRKAYEEEFDKIWVKQKEFYPETLTDEVYQAIRNEIIFYQRKLKSCKHLINICEFEGKFYRNTEGKEIFSGPRVAPKTSPLFQITKIWESINNIKLKNRRGIEYIISPAQKEQLFKFLDNNKTMTSTDLRKQLGIEVSEGYSGGQMLSKGIQGNTTKFALKKAFEGVEFSENLFDFNVKKETYEKVDILSGEIISRERITASFENQNLYKLWHIAYSLKEKAEIAAALKNQFGIENEEVTNAIYKLDFVKPGFGNKSSRAMRKILPYLEQGFNYADACVWAGYNHSDSMTTEENLRRRLLNQLPNLSKNSLRQPVVEKILNQLINLVNAIINEYGRPDEIRVELARELKHSKDERSDSYRYINNREKENNKIADRLRNEYGLPATRKQIEKWRLFEEIDGDNTRINGCCLYCGKNFGMSKALNGEDVEVEHIIPRSLFFDDSLSNKTLSHRSCNLSKGSMTAYDFMKTKSDRELTDYIERIDKLFSNRTISKTKRERLLTTLDKIPTDFISRQLRETQYIARKSREILMQVCHDVHSTSGSVTESLRRIWGWDKILMQLHIDKYREAGLTEWVTIEKDGQIHQEERIKLWTKRDDQRHHAIDALTIACTRQGYIQRLNTLASQHTRDIMFAEVQNQSESYKERLRLYEQWMQKQFHFPTHVVKESVSNILISFKPGKKVATSGKRVDHKKGKTIVLQKGIIVPRGALSEESVYGKIKTLVKGVPVKKLFEDPTIIVNKKIKNLIEERLESLGGDARNAAQSISKQPIYLDKERSILLTHASVFKQEIVIKYPVNTIKAKDLEYVVDKQIQSVLRNRIEKFGEKDAFKDLEKNPVFADDSQKVRINSVRCFAKLDLDKIAAVKFNQDNEPIGYAKPGNNHHIAIYKDETGKLIEHIVTFWHAVERKKYGITVIIKNPETIWQNISGKNLPESFLAALPDPTWIFVESMQQNEIFMFGITQDSLEEIIRNGDLSKISPNLFRVQKIATKDYYFRHHLETTVDDKTVGGEETATKLNKLRRVCSLSKMTGIKVNVNQLGIIKLAYQ

SEQ ID NO: 6066 - protein, 1252 aa, synthetic construct
  REGION 1..1252: note = Synthetic
MIFYMSKKILGLDLGVTSIGWALIEELESNKKILGMGSRIVPLNTDEKTEFSTGNKISKNQTRTIKRTQRKGYDRYQQRRANLTRVLLERKMFDEQLFKLSSLELWGLRAKAVKEKISLTEIGRVLYHLNQKRGYKSSRTDANMDKKDTDYVATVKGRYQTLKDLGFTIGEKFYQELKANEYYRIKEQVFPREAYIEEYDSIMLEQSHHYPEIITKDLIHKIKFEIIYYQRPLKSQKALVSKCELVGFWTKDKTGKQIFVGPKVAPKSSPLFQLCKILETINNLSLKVKNPEISKHKWLDFYPSQEQKNTISKYLNENENLTYAELLKILGLRKEDVYANKQIINGLQGNTTVTILKKLIDKKHLQFDLKIITKEDAKQLVDRKTGEVLCEELYAEVSSSFEVEPLYQLWHTIYSIKEEKECQEVLIKKLGVDNEIALQLSKIDFTKQGFGNKSSKAIRKILPYLMRGHVYSDACEFAGYNHSKSLTKEENQKRVIAEKLELLPKNSLRQPVVEKILNQSINIVNAIINRFGKPDEIRVELARELKQSKDERNQAEQRNKANERLNAEIANRLSEFGLPGTKRYIQKYKFIFPSQSRNLKDAHVENTCIYCGKSFSIAEALTGDNFDVDHIVPKSLLFDDSQTNKVLVHRSCNASKTNQTAYDFIAKKGESELNGYIERVDEWFKRGILSYSKMQRLKVSYQEYLERKSKKKQTDSDIKLWESFIERQLRETQYISRKARYIFENICNKVSTTEGTVTAELRRLWGWDDVLMNLQLPKYKELGLTQIKEWTSDHGRKKHKKEEIIEWTKRDDHRHHAIDALVVACTKQGYIQRINTLSSSDAKDAMRKEILESALVFDEKRNLLEQYLIKESPFSTSEVEKEASKIIISFKSGKKVATKGIRKVKINGIKQVVQKNIIVPRGALSEEFVYGKIKKIEKNKPLKYLFENPSKIVELETKKLIIDRLNEFNQDTKKAIQSTKKNPLLTTKGIAIEFGNCFKDEYVIKYPLQSLKAKDIDFIVDKGVRDIIQKHLAKFDGKEKEAFKEPVWFNEEKKNQIRTVRSFTGLSAVEPVSKDKKGNDIGFVKPGNNHHIAIYKNGSGEFSEHSCTFWHAVERLKFKIAVIIKDSNQIWTDIINKELPDSFIEKLPEDNLKLEYVLQQNEMFILGMHNEELETAIINNDYSLLSNFIYLVWSIADNDYWFRHHLETKNSDLKKVTTAKDSKRYYRTSLNGFLKLNPVKIKVDCLGRIIRL

SEQ ID NO: 6067 - protein, 1231 aa, synthetic construct
  REGION 1..1231: note = Synthetic
MNKRILGLDLGITSIGWTMIEEDGELRKIIDMGCRIVPLSKDDNDEFTKGNAISKNQNRTAKRTQRKGYDRYQLRRTLLKNILAENTMMPGDDLFKLSATDLFGLRDKALSERVTPQELGRILYHLNQKRGFKSSRLDAGANKNETDYVAEVKSRYAKIQDAGQTVGQWLHNELKSEAHFRVKDNIFPRDAYTSEFDAIINAQKKYHTEILNDELVEKVRNKIIFYQRRLKSQKNLVSVCEFAGFKTTVRGAEKLVGPKVAPRSSPLAQVCKIWETINNIRLKNKRGEILNISPEFKQEIYAYLDDNEKMTQTKLFEILKLKKNDGWSGNKQIEKGISGNQTKAPLTQILKGFEHLLEFELEINKTDDKVFLVDKKTGEQKGEHTKQELTANIEHQPLYKLWHVIYSIDDVADCRNALQTKFDLPPDIAEKLANIDFKKGGFGNKSVKAMRRILPYLMDGYGYSEACEFAGYSHSDSLTSDEKSKVTTKDKLELLPKNSLRQPVVEKILNQLINLINALIDKYGAFEPDDEIRVELARELKQSIDERNQTYNAISKKERENNAITKRIEEEYASLGIRATRNTITKWRLFHEINNDESKANATCIYCGQPFGITDSLRGSNVEIEHIIPKSLLFDDSQSNKTLVHSKCNSDKGNRTAYDFMTSKGEDTLNEYIERVDNLYRNQIIRKSKRDKLLMPADKIPTDFIDRQLRATQYITRKATELLADICKNVWCTSGSITSYLRKIWGWDDVLMNLQLPKYQDLNLTEIVEWKTNDGQIHRKLVIKDWTKRKDHRHHAIDALTIACTQQRFIQKINTLSAKKTRDEMYASVEDQNNASRDRLSLLDRYFIKQRPFVTAEVENAAAKIIVSYKAGKRVAKRDFYKATGINKEKGVLVPRGPLSEKSVYGKINTIEKNKPIKYLFENPELIYKKRIKLLIKERLSVHDSDVKKAMASIKKEPIYFDANKTVALEYGSCYAEKYVIKYPIESLKPADAQYIVDEKIKAIVEERFKQFENKPKEAFKEKLWLNRERNIEIKSVRCYTGLSAVEPVKRNETGEPIGFVKPGSNHHIAFYTDENGMMQEHICTFWHAVERKKYNIPVLVKKPKEIWNKILTDGTNYLPEFIEKLPKDNWCFCFSMEQNEMFLLGLSNERVNDLIISNNTEIISQHLYRVQKIAATYYVFRHHLETELDDSKDAAAALRYYSVRSIKSLLSLQPQKVIISNIGTIQKSTH

SEQ ID NO: 6068 - protein, 1266 aa, synthetic construct
  REGION 1..1266: note = Synthetic
MAKYILGLDLGTNSIGWALIEVDENNIPIRIIVMGSRIIPLSSNDREEFQRGLSITKNQNRTISRTQRKGYDRKQLKRNDLNKVLNKYNIFPSKMLLNLPMLDLWKLRSDSANSNKDISAEQLGRILYMLNQKRGYKSVRSEANSDKKDTDYVQAVKGRYAQLKDRNQTIGQYFYEELYNANVNNSYFKIKEEVYPREAYIEEFDTIINSQKTKHEFLTDQFVHQLRNEIIYFQRKLKSQKGLISICEFEGFEKTVFDKEKNKHKIVFVGPKVAPRSAPLFQLCRVWEVINTISIKVKNPEGSKYKWGERIPSIKEKEILADYLFKNEVLSFTKLLEILGLNKNDVYVNKQILKGIKGNETYATLYNILGENEFLNFDVSIIPSNHTSMLVDKKTGEILEERAGLELDVSLEKQPFYQLWHTIYSLKDLDECKNALIKRFDFDDETAENLSRIDFNKQAFGNKSNKSMRKILPFLMEGYDYSQSCSLAGYNHSNSLTKDEREQQVTLDRLELLPKNSLRQPIVEKILNQMINLVNAILDQYGELSEIRVELARELKQSKDERNDADLQNTKNKKLNDEIGKRLAELGLPITKRYIQKYKFIFPSLSKNLKDAHVNNQCIYCGETFNLSEALSGDAYDVDHIVPKALLFDDSQTNKVLVHRKCNSTKTNQTAYDYISTKGDEQVRIYFERVDDWFKSGIISYSKMQRLKVSHKEYLERKKIGKETETDKKLWENFIDRQLRDTQYISRKSREILQKVCNNVTTTEGGVTAKLRNLWGWDDVLMNLQMPKYRELGQTVIKEWTSEHGKRKHQKEEVENWTKRDDHRHHAIDALVIACTKQGFIQRINTLNSSDTKDLMLKEVEEAKVKFSEKTTLLEKYLRTQEPFSTQEVMREADKVLVSFKAGKKVATITKFKAIGKNKDSGVIVPRGALHEQSVYGKIKVIEKDKPLKYLFENSDRIVDPKVKKLVEVRLSENENNSKTAISTLKKAPIFLNEEKTEVLEKASCYNDATVLKYKLQSIKASQADDIVDERVKFLVKERLAQFGNKEKEAFKDILWFNEEKQIPIISVRLFARPDANNLQVIKKDENGKSIGFVLTGNNHHIAIYEDKDNKLIQHSCTFWHAVERKKYNIPVVIKNSSDVWSQLLDKQLPESLLNKLPTDKLNLKFSMQQNEMFILGLSQKEFDEAIKNNHKSFLSKYLYLVWSISNNDYYFRHHLETKNTELKNISTAKESKRYFRFKSVGALVGTNPIKIRLNHLGEINKVGEY

SEQ ID NO: 6069 - protein, 1246 aa, synthetic construct
  REGION 1..1246: note = Synthetic
MKKILGLDLGSASVGWAVILEDDENEKTKNEILGLGSRIIPYEGTEGKDFAKGTGESRNSERTKARTARKGYDRYQLRRKLLIDILVKNSMHPDAILKALPKNKLWELRNKAVNHPISLPELGRLLLWLNQKRGYKSSRSDANLDKKDTEYVATVKSRHEKIKENNLTIGQFFYNELVENEFFKVKENIFPREAYIEEFNTICKRQQLEYQETLTDELIDKIRSEIIYYQRPLKSQKGLVSVCEFEGFWTKGSDGKEYFVGPKVAPKSSPLFQLSKIWENINNIKLGSRNGGEFVLTVEQKHEIFQHLDNNEKLTQTDLLKILDLKKENCFVNKQLVKGINGNITKHAIRQCLGNTLKYEHLFELKLNVIQTEDEGFLYDAKTGEVLGSKPSRIIDPLIEKQIFYQLWHTIYSIQDQIECSKILQYKFKIDKDVADKIAAIDFGKHAFGNKSAKVIRKILPYLIEGDLYSQAMSYAGYNHSNSLTKDENLKRKLSDQLKPIAKNSLRQPIVEKILNQMVNVVNAIIDKYGKPDEIRVELARELKQSKDERNETDKFMGKRQRENEQIAKRLAEYGLRSTRNNIIKWRLYEEIDNEEKKLNAVCVYCGQPISLLEAIKGNDVDIEHIIPKSKLFDDSQSNKTLAHRHCNKDKNDRTAFDFMASKPSYVFNEYVERVNNLYSNHIINRAKRDKLLMTESKIPDNFIDRQLRESQYIATKAREILQTICHNVWSTSGTVTAELRHLWGWDDVTMNLQMPKYKEINLTEFVEWESDHGRSKHKKEIITGWTKRDDHRHHAVDALTIACTKQGFIQRFNTLAASKTREDMKFVVDSRSIQFKEKLSLLEKYIVGEQPLSVNEVECAVSSILISYKAGKKVAVVGTRKIGRRGNKKVVQTGIIIPRGQLSEESVYGKIRSIEEKKPPYLFENPHLIVKPYIKKLVEERILKCDGDFKAALSSLKKQPIYLDLKENIILDYATCFREEYVIKYNVDINFSKVEKVIDGAIKQILQARLDKFNGKAKDAFKDVQRLDKTIMKWYEDEGLARPIKSVRCFTGLSAVVPVKKDQLGNDIGFVKPGNNHHIAIYSDEEGNKFEHVCTFWHAVERKKYGIPVIIKNVAEVWDKIQLQPEGIYPESFLERLPNMNWNLILSMQQNEMFVLGLEKDEITKAISNNDYRTISDKLYRVQKMSIKPSSGQIDIVFRHHLETQIIDDTNTKTSKRFINVQSLGAIFNLYPFKLKIDRLGNISN

SEQ ID NO: 6070 - protein, 1273 aa, synthetic construct
  REGION 1..1273: note = Synthetic
MKKILGLDLGTNSIGWALIEVDENNFPIRIIAMGSRIIPLSSNDKDEFQRGLSITKNQSRTVSRTQRKGYDRKQLKKSDDFKYSLRRILNKYNIFPSEELLKLPMLDLWKLRSDAVNPNENISAEQLGRILYMLNQKRGYKSARSEANADKKDTDYVLAVKGRYAQLKDRNQTIGQYFYEELHNAKTTNSYFRTKEEVYPREAYIEEFDTIINAQKSKHDFLTDEVVHQLRNEIIYFQRKLKSQKGLVSICEFEGFEKTIFDKEKDKNKVVFVGPKVAPKTSPLFQLCRIWEVVNTITLKIKNPEGSKYKWGEKIPNIKEKEALADYLFKNETLSFNKLLDILELKKENVYVNKQIIKGIKGNETYSALHRILGDNELLKFDVSIIPSNHTSMLVDKKTGEILEERAGLELDVSLEKEPLYQLWHTIYSIKDLDECKNALIKRFGFDDEIAEKLSHLDFNKQAFGNKSNKSMRKILPFLMEGYNYSQSCTLAGYNHSNSLTKDEREQQVTLDKLELLPKNSLRQPIVEKILNQMINVVNAILEEYGKPSEIRIELARELKQSKDERHDADLQNSKNKKLNEEIGKRLTELGLPVTKRYIQKYKFIFPSLSKSLKDAQVNNQCIYCGETFNLTEALSGDAYDVDHIVPKSLLFDDSQTNKVLVHRKCNSTKTNQTAYDYIASKGEEEVQIYSARVDDWFKRGIISYSKMQRLKVSHKEYLERKSLNKETETDKKLWENFIDRQLRDTQYISRKSKEILQKVCNNVTTTEGGVTAKLRDLWGWDDILMNLQMPKYKELRQTVIKEWTSEHGKRKHQKEEIENWTKRDDHRHHAIDALVIACTKQGFIQRINTLNSSETKDLMQQEINEAKKLLGENYKDKEFENSNELVKNHKGRLSKLDDYLRLQKPIKFNTKYVEKEADKILISFKAGKKVATITKFKATGKNKDTGVIVPRGALHEAGLYGVRTIYSKGGIAEKHIIKKYKVGVSAQDHIFTGKESYSVKKDKNGNEKVDDKIKVVLDSIVDSKVKEIVLNRLNFGFSDGEDYKNNVKKALNNFKNLDEYPLWYNENKGIKILSIKLKTGLKDSVVPLRLNESNEVITLVKTGNNHHIAIYEDKNSKPVQHSCTFWHAVERKKYNIPAVIKKSSDVWNQLLDKELPESFLNNLPEDNLNLKFSMQQNEMFVLGLSQEEFKEAIENNDKSLLSKYLYLVWSVSENNYWFRHHLETKNSDLKKTEGAKESKRLYNIRSVSSLFSLNPVKVRLNHLGEITKIGEY

SEQ ID NO: 6071 - protein, 1234 aa, synthetic construct
  REGION 1..1234: note = Synthetic
MSGKKILGLDLGTNSIGWALIEVANNERKIIAMGTRIIPLSTDEKDEFDSGNSISKNQKRRQRRAQRRGYDRYQLRRKALTEVLMQNKMFDPQLFNLDKLTLWGIRAKACTEKIELTELGRILYHLNQKRGYKSVSKNENKKETEYVSEVKNRYQLLKESNLTIGQKFYQELSANPFYRIKEQVFPREAYMEEYDKIMACQKQFYPEILTDELITKIRDEIIYYQRGLKSQKDLVSVCDFEGKWIKHNNKEIFIGPKVAPRTSPLFQVAKIWETINNLEIKNKKGDKLFLTIEQKQKIFEYLDNNEKLTQTELFKILGIKKEEGWYGSRQLTNGLQGNITKTKILKILNNHKEYAHLIRFALNIDENEQKTYLYDRKTGEVLDERPQKVINASFEKEPFYQLWHTIYSIKDEKECAEALVKRFAIDENTAFELAAIDFVTPGFGNKSARAIRKILPYLMEGYKYSDACQLAGYNHSFSLTNSEIYQKQLKDKLELLPKNSLRQPVVEKILNQLINLINAIIDEKQGWVTREERLNNQFEIRIELARELKQSKDERYETYIRQRRRERENAEIVKELETSYGLRPTRNNIIKWRLFHEINNEDKKINAVCLYCGKTFGINDALSGEMVDVDHIIPRTLFFDDSQNNKILVHRACNASKGNLTAYDFMKLKGEQAFKEYTDRVEFLHNQKIISKVKRDRLLTPGNEIPDDFIERQLRETQYISRKSREILNQICYNVWSTSGGVTEKLRKLWGWDDILMQLQLPKYRELGLTEEIVIENSDGTLQKKEVIKGWTKRNDQRHHAIDALTIACTEQGFIQRINTLSSEKTRNELYNEVKDIKFNEKLTLLEKYLIAQRPFTTEYVKDKVSQILVSYKSGKRVATKGRRIIQINDRKIVAQDNILVPRGPLSEESVYGRIKIIEKDKPISYLFENPHLIVDLRIKELVETRLQQYQNDVKQALKSVKKEPIFIDDEKSKVLEKAHCYVEKYVIKYPVESIKQKEVDDIVDEKIRQIIRQRFLSVSKESDAFKEPVYFDEQKKIPIRSVRMFTGLTSVEPIRWDENNNPIAFVKPGNNHHIAIYMDENGNYQEHACTFWHAVERKKYGFPVIIENTAEIWNRILANPDKYPTSFVEKLPADKLQLVYSMQQNEMFIMGMQSDDFHMALQKKDYRLLSNHLYRVQKLSASYYVFRHHLETEIDDSKEALTSKRYIRIQSLKAYFEYNPYKVRINYLGQIVI

SEQ ID NO: 6072 - protein, 1235 aa, synthetic construct
  REGION 1..1235: note = Synthetic
MKKILGLDLGVASIGWALVEEGDSIVTIVALGSRIIPYDSTEGQDFVKGTGESRNAQRTKARTIRKGYDRYQLRRKFLVEMLVKNKMMPDEALKNAPKMHLWELRSKAVTENISKQELGRLLLWFNQKRGYKSGRRDINLDKKDTDYVKEVKSRFDKIKDLKVTIGQYFYEELKKNEYFRVKENVFPREAYMEEFDVICARQKEHLGLTDELISKIRNEIIYYQRPLKSQKGLVAICEFEGFWVKKDGKEFFVGPKVAPKSSPLFQLSKMWENINNIKLSSKFGEIVELTQEEKQKVFEHLDNNEKLTATDLFRILKKSKREYTITKQLEKGIQGNITKNAITKILDKNGKYKDLLRFDLNTVETDKLCYLYARDTGEILGEKRLKYTDAVVEYEPFYQLWHTIYSIDDLQECSAALQKRFGIDVETADKLAAIDFNKYAFGNKSVKAIRKILPYLMEGDRYSEAMSYAGYNHSNSLTKDENFDRKLLDKLKPIDKNSLRQPIVEKILNQMIHVVNAVIDEYGRPDEIRIELARELKQGKEERNDADKAMSKRQRENENIKKRLAEYGLRATRNNIIKWRLYEEINNQDKKLNAICIYCGQPISVTEAIKGEDVDVEHIIPKAKLFDDSQSNKTLAHRHCNSNKRDMTAYDFMKTKTQQEFSAYVERVNKLFADKIISKTKRDKLLMSEDKIPSDFIDRQLRESQYIAKKAREILQTICYNVWSTTGTITAELRHLWGWDDVIMNLQMPKYKDLGLTKIVEWVSEHGKRIHSKEVITDWTKRDDHRHHAVDALTIACTKQIFIQRFNTLSASKTREDMQWEIEKRSKQYKEKLSLLEKYIISQCPIAVSDVEKAVAEVLVSFKSGKKVAVIGKRKVGKRGNKQVVQKGIVVPRGALSEASVYGKIRMIEKNKSVKYLFENSSLIFKPYIKKLVEQRLAKFEGDSKKALASLKKEPIYLDAERSKILEYGTCFKEEVVIKYSVDTNFNKTDDVIDGKTREILQNRLNKFGGKPKEAFKDVQRGEKTLKWYEDEELEHPIHSVRCSTGLVAVVPVRKDENGNEIGFVKPGNNHHVAIYVDKEGNRLETVCTFWHAVERKKYGFPTIIKNTNEVWDKVTSMKDDTYPQSFLDQLPSYNLELELSMQQNEMFILEMEEDDIKIAIESRDYRTISEHLYRVQKLGSNDYTFRHHLETNLINSDISKMSKRYFRVQSLKTLFSLKPFKVKIDYLGNIRTLQ

SEQ ID NO: 6073 - protein, 1242 aa, synthetic construct
  REGION 1..1242: note = Synthetic
MKNKVLGLDLGSASIGWALISEDKVKESTEIIDLGCRIIPYEGTEGQEFEKGTGESANAKRTAYRRARRNFDRYQLRREFLVKTLVKHKMMPGEDLIKLPKMDLWELRSKAVTEKITLQELGRLLLLLNQKRGYKSARSDSNLDKKDTEYVATVKGRHEFIKEQGVTIGQYFYNELKNDEFFRIKENVFPREAYQEEYDAICKTQQGFHPELTDELINTIRNKIIYYQRELKSQKGLVATCEFEGFQVTRDGKEYFAGPKVAHRSSPLFQVTKIWESINNLRIRTKTGDEIYLTPTERQQLFDYLNENEKLTFKKMCSLLSWDESNLYVDRKLYTTGLQGNTTKTVIGKLLKGSPDKEQLLKFDLKVIEDLEKQTFLVDKNTGEILEGSETNVKHIDKAIEHEPLFRLWHTIYSIPNAQDCIKTLIKNFHIDKTTAEALTSLDFNKYGYSNKSSKVLRKTLPYLMEGYGYSEAMALAGYNHSGSLTKDENLARLLLDKIPLLPKNSLRQPVVEKILNQMIHLINAIIEEYGKPDEIRVELARELKQSKEERRDTESFIRRRTRENDIISKELEEFGLRATRNNIIKWRLYHEIKNEEKKLNAVCIYCGQPISYTEAIRGANIDVDHIIPKSRLFDDSQSNKTLVHRFCNSTKGNLTAYDFMKGKSEKEFLTYVERVNSLFQNHLISKTKRDKLLMSADKIPQDFIERQLRETQYIAKKAREILSEICRNVWSTSGSVTSTLRYLWGWDDITMDLQLPRYREVNQTELVSWESNHGKHTHTKEVIAGWTKRDDHRHHAIDALTIACTKQGFVQRINTLNSSQTRRKLQEEVADFIPDEKERFTLLEKYLISKQPIPVKDVQDAVADILISFKRGKKVTTPGTRKDKLKGKKQVVQKNILVPRGPLSEESVYGKIQVLQKEKPIKYLFENPDTILKDYIKQLIMDRLKGHDNDAKKAVAYTRKHPIYLDKDKKQVLEYATCLQHEYVIKYPVDTTFNKVEKVIDEKIKELLLTRLEKHNNNPKEAFKDVVKEDKTVLKWYQDEGLPTPIHSVRCSTGLSAIVPIRRNSDGKDIGFVKPGNNHHIAIYQDANGNYMEHVCTFWHAVERKQYNIPVIVKNSTVVWNKINSLEQSNLPLSFIQNLPPDGLNLQYCIQQNEMFVLGLTREEVNTLIDTQNYNTLSNCLYRVQKISTRDYYFRHHLETQVIDTKEGHKANRFIRTQSIKAFLALNPINIKVNLLGKPYL

SEQ ID NO: 6074 - protein, 1239 aa, synthetic construct
  REGION 1..1239: note = Synthetic
MKKILGLDLGVSSIGWAITDEDYTKILGWGSRIVPQSTDEKEEFTRGNAISKNQKRTLRRTQRKGYDRYQLRRKVLIDLLKKNNMLPDESLIHTNKIALWKLRADGVNEKLSLMEIGRVLLHLNQKRGYKSSRSEANLDKKETEYVAAVKSRHDKLKESGLTIGQKFYNELLNNQFYKIKEQVYPRDAYIEEFMKIMRTQQTFYPDLITDDLIKKISSETIYYQRNLKSQKSLVSVCEFEGFWTKVNSTSKEKELFVGPRVAHRSSPLFQVCKIWENINNISLKRKNGAQLIIPIEKKQEIFEHLDKNEKLTLTDLLKILELKKNDVYGNKQLTNGLQGNKTKVEILKCFENNSDYKNLFQFDLSIIQTDEEVFLIDKKTGEITNTKFKKIISPQVEEAPFYKLWHTIYSVPEKEDCKNALIKKFNLPEAIASKLAALDFTKQDFGNKSHRAIRKILPYLMEGDFYSDASSYAGYSHSFSLTKSENLERKLLEKLKPIEKNSLRQPVVEKILNQMVNVVNAVIDKHGKPDEIRIELARELKQSKEERNETFTYMNLRTKENEEIAKRLEEYGLRATRNNIIKWRLYHELNNEKKQINAICVYCGKVISFSAAIRGEEVDIEHIIPKSRLFDDSQSNKTLAHKNCNTNKNNLTAFDFMHSKSEGEFNDYIERVNLLYKNQLIGKAKRDKLLTPGDKIPTDFIDRQLRETQYISRKAREILHSICHNVWCTSGNVTSELRHIWGWDDVLSNIQLPKYRDLGLTTFEEIKVGEQLIKKEKIIGWSKRDDHRHHAIDALTIACTKQGFIQRLNNLNSSTVRDEMMREIKEAKIKFGEERNLVEKNILTNKPFLTSHLEEEAKKILVSFKAGKKVATIGKRKIKKGGKKVVVQSGIIVPRGALSEESVYGKISTLEKEKSLKFLFSNPTLILKPYIKQLVEERLYKHNNDPREAFKSLKKDPIFLDKEKTIELTHATCFKEEVVIKKQLQTLNEKQVLDIVDPIIKQKVIERLEKFGGIAKEAFKNLENDPVWYDEEKKIPINSVRCFTGLSAIEPIKKDTAGKEIAFVKPGNNHHLALYLDENGNKQFQICSFWHAVERKKYGFPVIIKNPLEIIDAILGAETEVEKYPDSFLEKLPNAKWKYLESFQQNEMFLLGATKEKIEEALANKNYSFLSEYLYRVQKVTYIGKTLDIFFRHHLETLLHDNENSKHSKRYHRISSLGALELLNPCKVKINCIGEIVMS

SEQ ID NO: 6075 - protein, 1266 aa, synthetic construct
  REGION 1..1266: note = Synthetic
MKTILGLDLGSTSIGWALIEAEKDEKQTPVRIISMGSRIIPLSSDDRDQFQKGQAITKNQDRTRARTQRKGYDRKQLKKRWLNKVLKEHDIFPSDALMKLPMLDLWKLRSDAADPGKDISAEQLGRILYMLNQKRGYKSARSEANADKKDTDYVQAVKGRYKQLKDRNQTIGQYFYEQLASAHNNNTYFRIKEKVYPREAYMEEFDTIINAQKAKHDFLTEETISRLRDEIIYFQRKLKSQKGLVSICELAGLEKTVFDKEKNCEKTVFIGPRVAPKTSPIFQLCKIWETVNNLSLKVKNPEGSKYKWRDYIPTIEEKEAIASHLSQNLILTYSDLLKILKLRKDDVFANKQVQKGIQGNITYHEIHKILGDSELLQFEISVIESDEQALLADKKTGEILYERQRLIVDKSFESEPLYQLWHTIYSIKDLDECKKALIKRFELNEEVADKLSKIDFNKQAFGNKSAKAIRKILPYLMQGFDYSQACSLAGYNHSNSLTKDEQEQRETKDRLTLLAKNSLRQPIVEKIINQMINVVNAIIDEYGKPDEIRLELARELKQSKDERDEADKMNSNNKKLNEMISKRLEVMGIPATRKYIQKYKFIFPAKDKKWREANVVNQCIYCGEHFNLAEALTGDNFDVDHIVPKALLFDDSQTNKVLVHRHCNSNKLDKTAYDYISKQGDLKLEEYIQRIDDWFAKGILSYGKMQRLKVSFEEYLDRKKQKKETEADKKLWESFIDRQLRESQYIARKSRQILEQICKKVTVTEGTVTAKLRKVWGWDDVLMNLQLSKYREIGQTQIKEWTSDHGKRKHQKEEISNWTKRDDHRHHAIDALVIACTKQGYIQRINTLNASDVRNEMLKEIEDSKIKYNEKLSLLDKYLVAEKPFTTSQVASEADKILVSFKPGKKVATITKFKATGKNKEKGVIVPRGALHEQSVYGKIKVIEQDKPLKYLLEHTDKIIDPRVKALVTARIAEHGNNIRLALSSLKKSPIYLDEQKTEILEKASCYNDATVLKYKLQSLKASQVDDIVDERVKALVKERLNEYGGKEKEAFKDVLWFNEEKQIPIRTVRLFAKPDANNLQPIAKDANGKDIGFVLTGNNHHIAIYEDKDGKLMQHRCTFWHAVERKKYKLPVVITDTSELWNNLLGENYPETFLSKLPADNLKLKFSMQQNEMFILGLSQEEFEDALSTNNKPLLSKCLYLVWRLADNDYYFRHHLETKNSELEKIKEAKESKRYYRVQSLKVLTSLNPIKVQLNHLGEIINVWR

SEQ ID NO: 6076 - protein, 1238 aa, synthetic construct
  REGION 1..1238: note = Synthetic
MTKVLGLDLGAASVGWAMIEEEEKSHKILGLGSRIIPYEGTEGNDFAKGTGESRNALRTKARTARKGYDRYQLRRKYLVDTLVKNEMMPDEYLRKLPKMQLWELRSKAVTTEITKQELGRLFLWLNQKRGYKSSRSDANLDKKDTEYVVEVKSRHEKIKESGFTIGQYFYSELKSNEYFRVKENIFPREAYIEEFDAICKQQKRHLTDKLISRIRNEIIYYQRPLKSQKGLVSVCRFEGFFKKGINGKEYFVGPKVAPKSSPLFQTVKIWENINSIRLSDRNGKEIMLSLEQKKCIFNHLDNNEKLTPKDLFIIIGVKKENCFVNKQLEKGIQGNVTKSTILKCFGENNDYDKWLKLDLNIIVKKDTFGYLYDKKTGEIIGEKLIKHVDSAVEREPLYQLWHTIYSINNTDECSAALQNKFGFDSETADKLSNIDFGKAGFGNKSAKVIRKILPYLMEGDDYSQSMSYAGFNHSDSLTKDENLKRKLLDKLRPIEKNSLRQPIVEKILNQMVNVVNAIIDKYGKPDEIRIELARELKQNKEERNKTDKDMSKRQRENGEISKRLAEYGLRATRNNIIKWRLYEEIDNQDKKLNAICVYCGQPISLTEAIKGNEVDVEHIIPKSKLFDDSQSNKTLAHRRCNSTKGDMTAYDFMENKPAQVFNAYIERVNMLYDNKIIRKVKRDKLLMPESKIPDNFIDRQLRESQYIASKAREILQTICYNVWSTSGTVTARLRHLWGWDDATMSLQLPKYRELGLTEMVEWESEHGKQKHSKEVISDWSKRDDHRHHAVDALTIACTKQGFIQRFNTLNSSKTKEDMEFEIAKCSIEYRENLSKLEKYIIALRPIPVSEVEDAVANILISFKSGKKVAVKGKRKIGKRGNKKIIQTDIIIPHGSLSEESVYGKIKTIEREKPLKYLFQNSQLIFNNKIKILVEERLATFENDTKKALASLKKVPVYLDEEKTIVLEYATCFKEEYVKKYDVDTNFSKTDKVIDDKIKEILQHRLGKFGGKAKEKEAFKDVQQGDKTIKWYEDEGLERPIHSVRCFTGLSAIVPVKKDENGIDIGFVKPGNNHHIAIYSDKDGNRYEHICTFWHAVERKKYDIPVVIKDSNEIWNKIWSKPEGSYPQSFLDKLPQENLTLDLSMQQNEMLILGMSYEDIKTAIDNSDYKQLSSNLYRLQKLANANYMFRHHLETQIIDDNNSKASRRFINIHSLKALFAWNPYKVNINCLGDIQTNSR

SEQ ID NO: 6077 - protein, 1228 aa, synthetic construct
  REGION 1..1228: note = Synthetic
MKRILGLDLGSASIGWALIEEDEKGIRIIALGSRIIPYNGTEGQDFAKGAGESRNSLRTQARTTRKGYDRYQLRRKYLINVLEKNLMMPSEDLRKMPKMNLWQLRSKAVTEYISRQELGRLLLWLNQKRGYKSSRSDANLDKKDTDYVKEVKSRFDKIKEKNQTIGQYFYEELQRDEYFRVKENVFPREAYIAEFDAICSRQKDHLGLSEELIAEIRNEIIYYQRPLKSQKGLVSVCDFEGKWMNQNGKELFIGPKVAHKSSPLFQLAKIWEGVNNIKLSTKYGDTIELTLEEKKQLVEFLDNNEKLTTAALFKILRKDKKEYILPKQLEKGLQGNITKCKIADILGSKYNQLLQLNLEKQEVGTPCYLYTKSTGEVLGEKPLQYIDKSVEKELFYQLWHTIYSISDEDECCKALQKRFDIDAETACRLAQIDFSKYGFGNKSAKAIRKILPYLMEGDKYSDAMCYAGYNHSNSLTKEENHERKLNDKLKLLAKNSLRQPIVEKIMNQMIQVVNTIIDKYGKPDEIRLELARELKQSKEERNDADKAMSKRQRENKEAEKKLEEHGIRATRNNILKYRLFEEMGEKKHEAICIYCGNPISFSAAMNGDEVDVEHIIPRSKLFDDSQSNKTLAHRKCNANKNDMTAYDFMKTKSKQDFDKYVERVNQLYADRIISRSKYNKLLMSEDDIPSNFIDRQLRESQYIATKAREILQTICYNVWSTSGTVTAELRHLWGWDDITMNLQMPKYKELGLTEMVEWTSDHGKNVHSKEVITGWTKRDDHRHHAIDALTIACTKQGFIQRFNTLSSSKTRDDMQKELEKCSIQFREKRSLLEKYIISQRPISVSDVAEAVSRILISFKAGKKVATIGKRKVNGKVVQQGIVVPRGALSEDSVYGKIRTIVRKMPVKYLFENPDLIFKPYIKALVKERLAEFDNDKKQALASLKKNPVYLDKQKTKLLEYGTCFKDEYVKKYDVNPNFTKIADVIDGKVKQILEDRLGKFGGKPKEAFKDVVKGDKTLKWYEDEGLERPIRSVRCLTGLSAVVPVRKDENGTDIGFVKPGNNHHVAIYVDADGKGQEHVCTFWNAVERKKYGLPIIIKDANDVWDKITMAGDDVYPQSFLSLLPKPDWTLKLSLQQNEMLILGMEEDEVKYAIESKDYKLLSDHLYRVQKLSSSNYVFRHHLETQIVDNDESKMSKRFFNTRSLNALFALKPFKVRIDCLGNIIPSSL

SEQ ID NO: 6078 - protein, 1222 aa, synthetic construct
  REGION 1..1222: note = Synthetic
MSKILGLDLGVSSIGWAVIEETESKNSILGMGVRIIPLSTDDADEFTKGNAISKNQKRTQRRTQRKGYDRYQLRRYTLTSLLKEKGMLPDESLIKLPQLELWQLRAKARTQQISLPELGRVLYHLNQKRGYKSSRADENQDKKQTDYVQEIINRDGSLKANNLTIGEYFYQKLQANTNTRVKDEIFSRATYIYEFDQIIAKQKEYYPNLLTEQTIHRLRNEIIYFQRKLKSQKGLVSICEFEGKYITKENKKILAGPKVAPKSSPLSQVCKIWETINNITLKNKRGETKEITLAQKQALFQKLDNAEKLSETELFKILELDKKEYSGNQHTEKGLQGNTTKAKLIKTIGKHPQLNELLQFNLHSAEYEFTNKNTGEFFNRLKVDASFEQEPLYKLWHIIYSINDIEECKNTLIQNFGFENELAGNLAKIDFALQGFGNKSARYMRKIIPYLSAGYMYSDAAQMAGFNHSNSLTTEDNLQRKLLDKLPLLEKNSLRQPIVEKILNQAIHVVNAVFEKYGKMDEIRVELARDLKQSKEERNKTTANITKRERENEKHAKLIAELGIRTTKNNIQKYRFYKEINNDESKLGALCIYCGNHIGISEALSGDQVDIEHIIPKSMLFDDSQNNKTLSHRKCNQEKNNRTAFDYMSQKPKEVFEAYLDRVNHLYNTKVINKTKKDNLLTPANKISTNFIERQLRETQYIAKKAKQLLEQVCFNVYSTSGSVTAHLRNVWGWNDVLMNLNLPKFKEAGLTVIEERVDKSGVVHKKEVIQNWSKRDDHRHHAIDALTIACTKQGFIQKLNKLSSEHTQKEMYEAVKNSGTPYNKKLSNLDNYLVKNKPFTTHEIEKEAAKIMISFKSGKKVATIGSRKVKINGKKTVVQNGIVIPRGALSEESVYGKIKVMNKNMPLNELFKDPENIVSPKIKALVLARIQELNGDTKKAIASLKKEPIYLDNEKTQELSYGSLFSIETVLKYPIASIKEKDLKDVVDDHIRKILQARINEKGEKEAFKEPLFIDANKQIQIKSVRIKTGLDSVVPVRKNEQNEAIAFVKPGNNHHMAFYKDTDGKDEVHICSFWHAVERKKYKLPVVIQEPKAAWDSVFQNPEKYPAEFTEKLPKDNWQFVLSMQQNELFVLGLEQAAFDEYVASKNFEEIAKHLYRTQKMSIISSGAIDFWFRQIYETNLIDDKAAKDLKRFYRIQSIKSFMAINPIKVKINTLGKLLL

SEQ ID NO: 6079 - protein, 1248 aa, synthetic construct
  REGION 1..1248: note = Synthetic
MKRILGLDLGSASIGWALVEVNCNVVKIIALGSRVIPYNGTEGQDFVKGAGETRNALRTKARTGRKGYDRYQLRRKHLVDVLVKNDMMPNEKLKCLPKMQLWELRNKAVTQYISKQELGRILLWLNQKRGYKSNRSEANLDKKDTEYVAAVKCNYEKIREKNLTIGQYFYNELRSDEYFRIKANVFPREAYLEEFDKICEKQKKHLGLTDELVAQIRNEIIYYQRSLKSQKGLVAVCDFEGFWKTIDGKERLVGPKVAPKSSPLFQFAKIWESVNNIKLSTIYGKTIELTLEEKRKIVHYLDNNSKLTSVELFKILHKNKKDFIVSKQLEKGIQGNIVKTEIIKALDKEYDELLSFDLAIIEEIDKYGYLYDKKTGEVLNEKILKCVDSKIEEEPFYQLWHTIYSINDIQECSNALQKGIIIAKKTETNDEVRIKIDKKTADKLAAIDFNKLGFGNKSAKAIRKILPYLMEGDKYSEAMSYAGYDHSTSWTKDENLKRDLLDKLKPIEKNSLRQPIVEKILNQMVNLVNTIIEKYGKLDEIRIELARELKQSKDERNDADLKMNKRQRENEVIADRLKEYDLRATKNNILKWRLYEEIENKDGRLNAICVYCGQPISLTEAILGREVDVEHIIPKSKLFDDSQSNKTLAHRRCNSSKNDMTAYDFMKNKSEQEFDAYVERVGLLYAKKIISKAKRDKLLMSEDEIPDNFIDRQLRESQYIARKAREILQTVCYNVWATSGTVTAELRRLWGWNDITMNLQIHKYKKFGLTETIEWESEHGKRKHSKEIIKDWSKRDDHRHHAIDALTIACTKQGFIQRFNTLNASKTREDMQSEIEKCSVEYKEKLTLLEKYIISQCPLSVAEVEKAVSQILVSFKSGKKVAVWGQRRVYKDGKSKVVQNRILVPRGALSEQFVYGRIRTVGKEKKTLKYLFNNSHLISKPYIKMLVEERLSQYENDIEKALTSLKDNPIYLNADKIKILEFGTCFEEKYVMKYNVDVNFTKTEKVVDKKIRNILQTRLQKFGGKPKEAFKDVQQGEKTLRWYEDEKLERPIYSVRCFTGLSAVVPIKKDESGNEVGFVKPGNNHHIAIYVDKDGNKIEHVCTFWHAVERKKYGIPVIIKNTNDVWDKICQQPDGTYPQSFLEQLPTVNLEIKLSMQQNEMFILEMAQEDVKVAIENNDYKKVSEHLYRVNSLSSFDYYFYHHLETKKDIKNADAKKCKRYFRVRSVKALFLLNPVKVKIDYLGNIMQ

SEQ ID NO: 6080 - protein, 1244 aa, synthetic construct
  REGION 1..1244: note = Synthetic
MKKILGLDLGSASIGWALVKEIREADNHKTEIIDLGCRIIPYEGTEGKDFAKGTGESRNAVRTAARTIRRGYDRYQMRRRFLTDILVKHSMMPDETIIALPKMQLWALRSKAANSEISLQEFGRILLLLNQKRGYKSSRSEANLDKKDTDYVSEVKNRHEMIREQGLTVGQYFFRELQKDEYYRVKEKVFPREAYMEEFDRICKTQQVFHPEIAQELIDKIRNEIIYFQRPLKSQKGLVSVCEFAGKWIKKNGKDYFIGPKVAPKSSPLFQIEKVWETINNIKLTTRSGSDLELTHENKLAIFLHLDNNEKLTATDLSKILNLKKGSIILNKQFSKGLQGNLTKHLIWKCLGSTDNYTDLLKLDLKIMKADGEAYLYDRRTGEVLTSKPVHVIDPCVEKEPLYRLWHTIYSISDREKCKKVLQKNFNIAEPVSERLAGIDFSRQGFGNKSVKVIRKILPYLMEGDGYTEAMSYAGYNHSRSVTKVENLGRILESKLKLLPKNSLRQPVVEKILNQMVNVVNTIIEKYGKPDEIRIELARELKQSREERNETDKSMRKRERENESISKRLAEYGLRTTRNNIIKWRLYEEISSQESKLNAMCIYCGSAISLTEAILGNDVDVEHIIPKSKLFDDSQSNKTLAHRHCNRDKNEQTAFDFMKSKSEQAFNDYVDRVNLLYANRIIGKAKKDKLLMPESKIPDDFIDRQLRESQYISRKAREILQTVCHEVWATSGKVTSELRHLWGWDDVTMNLQLPKYKDIGLTEYREWESNFGEHKHRKEVIKDWSKRDDQRHHAVDALTIACTKQGYIQRFNTLNAQKTRDELQSAVNMSNLLTREKLSLLEKYIVSQKPIPVKEVEKAVSNILISYKPGKRVAVRGTRKTGRRGDKKVVQADILIPKGALSEESVYGKIKTVDRNKPLKYLFENSNLIINPRIKEMVENRISQYEGDTKKAITSLKSDPLYFDKEKGILLEYASCFKEEYVIRYKVDINFNKIDKVIDNSVRSILQKRLDKFAGKAKEAFKDITIGENKSVKWYEDEDLSIPIDSVRCFTGLSAVVPVRKDENGRDSGFVKPGNNHHIAIYVDSEGNKTEHVCTFWHAVERKKFGIPIIIKDSSKVWDSIFEAPEGTYPDSFLEKLPQPGLVLDLSMQQNEMFILDMPSEEVNQYLLSNDYKTIGEKLYRVQKLAERNYVFRHHLETQILDDKNAQASKRFLLIQSIGTLYSHSPFKVKIDCLGNISSTVPHD

SEQ ID NO: 6081 - protein, 1302 aa, synthetic construct
  REGION 1..1302: note = Synthetic
LPRLKCLHNGIILIVICFQHKIIKKNHMNKKILGLDLGTNSIGWSLIEVNETNKPIGIIAMGSRIIPLSSDDRDEFQKGQAISKNQKRTTARTQRKGYNRLQLRKDNLKSLLKRLNIFPSGELMNLPSLDLWKLRSEAASSKTNITPEQLGRIFYMLNQKRGYKSARSEANLDKKDTDYVAEVKGRYATLKENNQTIGIHFYDELLNANQEDKYFRTKEKVYPREAYIEEFDTIINFQKQKHSFLTDDVIANLRNEIIFYQRNLKSQKGLVNICEFEGFNVSYIDKETNKGKITFTGPKVAPKTSPLYQLCKIWENVNNISLKVKNLDGSKYKWGDKIPTLDEKKQIVMHLSKNATLSFTDLLNILQLKKENVFANKQILKGIQGNITYSEIQGVLKENKQLQFNINIIPTKKPAILVDKKSGEILEEREGLQIESKLELEPLYQLWHTIYSIKDLQECKNALIKRFGFSESIAEKLSKLDFNKQAFGNKSNKAMRKILPYLMQGYDYSKASSFAGYNHSNSNTKEEQAEKHTAERLELLPKNTLRQPIVEKIINQMINVVNAILETYGKPDEIRVELARELKQSKEERNDTDLQNTNNKKLNEEVANRLTSLGLPTTKRYIQKYKFIFPIKDRKIKDAQVFNQCIYCGEHFNLSEALSGDNFDVDHIVPQSLLFDDSQTNKVLVHRSCNANKTDKTAFDYIKTKGEDALQQYTDRVDIWFKRGILSYGKMQRLKVSYLDYLERKRSNKETEADKKLWESFIDRQLRETQYIARKSKEILQEICNNITSTEGTVTAKLRGLWGWDDVLMNLQLPKYKELGKTVIKEWTSDHGNRKHYKEEIENWGKRDDHRHHAIDALIIACTQQGFIQRINTLSSSDVKDEMKREIISSAIKFNANLDTLEKYLITKRPFSTAEVEKEADKILVSFKAGKKVATIGVRKEKKDGKKQIVQSNIIVPRGALHEQFVYGRIKTVAKDFKTGTILKFPVKHLFENSDLIADKVIKQKVSERLLAFENDAKKAIESLKKFPIYLDIDKTIPLLNAPCYKDEYVIKYKITDIKKEDVKYIVDKKVKLLVNERLEQFHGKEKEAFKNTLWFNESKQIPIRTVRCFTGLSNVEVIKKDEFGNEIGFAKPGSNHHIAIYKDPNGSLTQHLCTFWHAVERKKINIPYIIKNTKSLWESILVKDFPQPILDKLPEDNLMLQISLQENEMFILGLSNELAQEAIKNNDKLLISKHLYLVWSISINKYWFRHHLETKNSELKKLEGARESKRFHEISSVKGLIDLNPIKVRLNHLGEITKIGE

SEQ ID NO: 6082 - protein, 1244 aa, synthetic construct
  REGION 1..1244: note = Synthetic
MKKILGLDLGSASIGWALIKENGNTDNPKTEIIDLGCRIIPYDRTEGRDFSKGTGETRNAIRTRARTIRRGYDRYQMRRKYLTDILVKHSMMPDETLKALPKMQLWELRSKAVNEEISLQELGRILLFLNQKRGYKSSRSEANLDKKETEYVSAVKNRHELIKEQDLTIGQYFFQELKKDEFYRTKEKVFPREAYMEEFDRICKTQQAFHPELSQALVDKIRNEIIYYQRPLKSQKGLVSVCEFAGTWIKKDGKDYFIGPKVAPKSSPLFQVEKIWETINNIKLTSRSGIDLQLTHEQKAAVFKHLDNNEKLTVTDLFKILNLKKGSYVPNTQISKGLQGNLTKHLIRECLESKDVYSDLLRMNLNLKKVNSETYLYDRKTGEVTNSKPILEIDPCVEKEPLYKLWHTIYSINDRQECANALLKNFGIEEPVASKLASIDFSRQGFGNKSAKVIRKILPYLMEGDGYPEAMSYAGYSHSGTLSKEDNLTRKLENELKPIPKNSLRQPVVEKILNQMVNLVNAVIEKYGKPDEIRIELARELKQSREERNKTERSIRERERENETISKKLAEYGLRGTRNNIIKWRLYEEINSQGNKLNAICIYCGKPISLTEAILGNDIDVEHIIPKSKLFDDSQSNKTLAHRHCNRDKNEQTAYDFMKSKSEQAFNDYIERVNMLYANGVIGEAKRDKLLMTETKIPTDFIDRQLRESQYISRKAREILQTVCHNVWATSGKVTSELRYLWGWDDVTMNLQLPKYREIGLTEFQEWESDFGNHKHKKEVIKDWSKRDDQRHHAIDALTIACTKQGYIQRFNTLNSQKTKEELQSIVSKNKIIAREKLSLLEKYIISQRPIPVNEVENAVSRILISYKSGKRVAVKGKRKMGKRGDKRVVQSNIIVPRGALSEESVYGKINTIDRNKPLKYLFENSNLIVNPRVKEVIENRISQNGGNIKNAISSLRAEPLYIDKEKDLLLEKASCFKQEYVIRYKIDVNFNKVDKVIDDSIRYILQKRLNKFGGKPKEAFKDVSIEGNKSVKWYEDEGLPYPINSVRCFTGLSAVVPARKDEEGRDIGFVKPGNNHHIAIYEDSDGNKTEHVCTFWHAVERKRYNLPVKIKDSSIVWDKILDAPEGKYPNSFLERLPKPGLKLNLSIQQNEMFILDLPYEEAIRAITLKDNNIISDNLYRVQKIAEKNYVFRHHLETQIIDDKNAQANKRFVIIQSLGALYSHFPIKVKVDCLGNITNTLAND

SEQ ID NO: 6083 - protein, 1237 aa, synthetic construct
  REGION 1..1237: note = Synthetic
MKKILGLDLGSASIGWALIEEDKENKRKILGIGSRIIPYEGTEGKDFAKGTGESRNSLRTFARTARKGYDRYQLRRKFLVEILIKNNMMPDDILKNLPKMQLWELRSKAINQQISLSELGRLLLWLNQKRGYKSGRSDANFDKKDTEYVATVKSRHEKIKEENLTIGQYFYHELEKEEFFKVKENIFPREAYIEEFDALCKKQQQYYPNELSNDLIKKIRNEIIYYQRPLKSQKGLVSICEFEGFWAKKDNKEYFVGPKVAPKSSPLFQLVKMWENVNNIKINTRRGEEILITTERKLALFNHLDNNEKLTQTDLLKILGLKKEDCYVNKQLAKGIIGNITKNAIRQCFPNSETYEHLLDLNLDIIQTKEEGYLYDKQTGEILNAKPIQFITPKVEKDTFYQLWHIIYSINEIEECSNVLQSKFKIDKQTADKLASIDFTKHGFGNKSAKVIRNILPYLMEGDDYSEAMSYAGYDHSNSLTKDQNLERKLLDVLKPIAKNSLRQPIVEKILNQMVNVINAIIEKHGKPDEIRVELARELKQSKEERNDTDKAMSKRERENEIIAKQLAEYGLRATRNNIIKWRLYQELDNEDKKLNAMCVYCGQPISLTEAIKGNDVDIEHIIPKSKLFDDSQSNKTLAHRHCNTNKNDRTAYDFMRSKSEQALNEYVERVNMLYANHIIGKAKRDKLLMTESKIPDNFIDRQLRESQYIAKKAREILQSICYNVWSTSGTVTAELRHLWGWDDVTMNLQLPKYKELGLTEIKEWESEHGKHTHSKEIIKDWSKRDDHRHHALDALTIACTKQGFIQRFNTLSSNKTREDMYQEVATRSVEYKEKLSLLEKYIIGEQPFMVNEVEDAISNVLISFKSGKKVAVWGTRKVGKHGNKKVVQTGIIVPRGQLHQEFVYGKIKAIEEKKPLKYIFENPQLIIKPYIKTLVETRINDYDSDFKKALISLKKDPIYLDKEKTIILEHATCYKDEFVIKYTVNTDFNKIDKVIDSKIRNILQTRLDKFGGKAKEAFKDVQGENKTLIKWYDDEGLERPIKSVRCFTGLSAVVPVKKDENGKDIGFVKPGNNHHIAIYTDVDGKNTEHICTFWNAVERKKYGVPVIIKDTNEVWDKIQLKTDNNYPESFLEMLPQPNLTLKFSMQQNEMFILGITHDQIYQAIEGGDFKKISDKLFRVQKLAERNYMMRHHLETQLIDDSNAKSSNRFILLQSLGALFALNPLKVKIDLLGNIIV

SEQ ID NO: 6084 - protein, 1262 aa, synthetic construct
  REGION 1..1262: note = Synthetic
MGKTILGLDLGTNSIGWALIDIDENSTPTRIIAMGSRIIPLSSNERDQFQKGQAISKNQDRTTARTQRKGYDRKQLKKSDDFKYSLKRALELHNIYPSRELFNLPMLDLWKLRSDAVSKPIKPEQLGRILYMLNQKRGYKSARSEANADKKDTDYVQAVKGRFAQLKDNNKTIGQFFYEGLKNAVEQSQYFRIKEEVYPREAYIEEFDTIINTQKQHHSFLTDDLIHSLRNEIIYYQRKLKSQKGLLSVCEFEGFEKAITDKSGKEKVVFVGPKVAAKSNPLFQLCRIWEVVNNISLKVKNPPDAKYKWGDRIPTVDEKRQIANHLWRSEQLTQADLLKILNLKKDEVYSNKQVSKGIKGNSTYSEIDKIIKDSPLLQFDVDVVPNGKDAYIFDRKTGEILEERQGAIIDKEMEIQPFYQLWHTIYSIKDLEECKKALIKRFAFTEDVAEKLSRIDFDKQGYGNKSVKAIRKTLPYLMQGYNLYESESLAGYVSSSLTKEELTETGKEEKLSLLPKNSLRQPVVEKILNQMINVVNAIIEKHGKPTEIVIEMARELKQSKDERDAADRQNSFNRKVNDKVAAVLRELRLPATKRFIDKYKFISPTRDKSWDTTQIVNQCIYCGESFSLTEALSGDAFDVDHIVPKALLFDDSQTNKVLVHRKCNGNKTNQTAYDYISKKGEAQLNSYLLRVDDWFRRGIISYSKMNRLKVSFEQYQERKKAKKETEADKKLWESFIDRNLRETQYITRKSKEILGKICNKVRVTEGNVTAKLRRLWGWEDILLDLQLPRFQELEQTEVKEWSSEHGRRKHQKEEIANWSKRDDHRHHALDALAIACTAQGFIQRINTLNASDVRNEMNQEVEDARIEFNEKMTLLEKYLVMKKPFETTEVSKAVDEILISFKPGKKVASISKFKAIGKNEDVGVLTPRGALHEQSVYGKIKVKEKNKALKHLFENPGRIIDEGIQKKILDRIALFDGDVKKAVSSLKKSPVYIDEANKVALEVADCFKEEVVIKYKLDSLKAKDVPYIVDEKVRELVQQRLDAHGGKEKEAFKTTLWYNEAKQIPIRTVRCFTGLSAVEGIKKDENGNDIGFVVLGNNHHIALYEDEEGKLVQHSCTFWHAVERKKFKFPVVINDTSVIWSNIIGDELLQSFIDKLPADNLKLKHSLQQNEMFILGLNKEDADKAIAENNKRLISKHLYLVWSIGENQYWFRHHLETKNSELKQTWGAKESKRYYLFKSVGAFLAQNPVKVKVNCLGDISAI

SEQ ID NO: 6085 - protein, 1037 aa, synthetic construct
  REGION 1..1037: note = Synthetic
MRYVLGLDIGIASVGWAVLNQDDKRVEALGVRAFNRAEHPKNGASLAAPRRLARSVRRRLRRRAGRLQRAKTLFVDYGLIAPQALDTAFDTAKGKPSPWELRAEGLDRMLNGEEFARALFHIVKRRGFKSNRKNVKDAEDGPVLDNIEANRKRMDEAGYRTPGEMYARDERFATRDERFPARKRNTTDSYLNTVSRDLLEQEIHTLFQRQRELGSAFASPELEHGIVQVFAWQKPFASGDDIIRLVGTCTFEDGEIRAPKHAYHAERCSLLQAVNKLTYSTNGDKARLDERQRKTVVDMAYARPKVTYAQIRKAIGLPEDARFSGLTYLSRQSKAGELTEDPKCESATFFELKGYHTLRKAFSGDGLWERVSNNHDLMDDLAYALTFYKTDEDIQAYLAGRAAPELLEPAQTCAFTKTANLSLVAIKNILPHLENGMLYNEACAAAGYNHTGKGGGHKTEKLPPIPTDLIRNPVVLRALTQTRKVVNGVISRYGSPYEIHIELARDVGRSYEDRRKTEKQQQENRKQREERERRFREEFNREPVSADLLKWRLYAEQSGRCAYSLKPLDLDRLFEPDYAEVDHIIPRSRSFDDSLSNKALVLTDANRNKKNRTPHEWFGHDAARWAEYEAWVRGAIRDPRKRGNLLKENYDARQEEERKERCLVDTRYASSAFASFVRDNLLFADPSHKLPVRCLNGQVTAWVRALWGLHKDRQDSDLHHAQDAAVIAAVMPHQVEMLTRYAQVVETREPVVDTETGEIIEWKENQRPRLPYPWKGFRREVLDKTGEVVVSRMPLRKTGGALHKDTLRSSKHQAENRTKVRKPLAELSAADLPNLVALDEDRKLYAAIERRMAEFDNDAAKAFAQPLYKPLKDGSNGPVVKTVKVWQTLGVGVPVRKGMADNASMIRIDVFRKQNNKGKWQYYVVPIYVAHVMSGKLPDMSADHEFLFSIHPYDLVRVAGADWSMLGYFRGYNVNTNSLELCEPNNVRSCKGSIGARNLLCFEKFEMGVLGDYYPVRKETRRGLANDSDLEPGEAEG

SEQ ID NO: 6086 - protein, 1046 aa, synthetic construct
  REGION 1..1046: note = Synthetic
MKYSLGLDIGITSVGWAVLNLDKKRVEALGVRGFNAAEDPKTWASLALPRRLARSARRRLRRRAGRLRRARDLFIKYELIQAQEIKSAFETVLGQPSPWELRAEGLDRLLTGQEFARALFHIIKRRGFKSNRKAAKSSEDGKMIAGIEANRERMREKGFRTAGEMYWSDPFFDLRKRNTTDSYINTVDRGLLEEEIKTLFKRQRELGSVFTKHEFENAILEVFSWQKPYVSGDDIIRMVGTCTFEPNELRAPRYSYHAERFLLLQKINSTTYSTNGDKERFTPEQRKVIEGLAYKNVRVTYAQIRKALDLPEEARFAGLTYLRRPEKKAELVESLECENTVFFELKGYHSIQNACSVDGMWDRVKQNPELMDNLATALTFYKTDEDIEEWLTERGVEKEIINAVSGCEFTKTANLSLVAIKKILPHLEEGLHYSEACAKAGYNHTGLSGEKKKDKLPSIPVDMIRNPVVLRALSQARKVVNAVINRYGSPYAIHIEFARDMGKSADKRKEEERRQRENLKEREELEEQFRETFDGREPNGTDMLKWRLYREQRGCCAYSLQPIDLNRLCEPGYVEVDHILPYSRSFDNSRANKVLVLISENRNKLNRTPYEYFGHNEKRWSEYEGWVRTTIRDPRKRGNLLRESFEERQEVEWKDRNLNDTRYVAREFAGFIRANLLFADPDNKLPLVCINGQVVAQARWLWGLYKDRDENDLHHAQDAAVIAALLPYQIKMITEYSKVVETRRNHIDPETGEIIEWKENERPRLPEPWKGFRKEVVEKLGSILVSRMPQRKVSGAIHADTIRSAKHISTDRVSVVKKPLNSLSENDLKNLFDTEHNKLLYSAIRQRMAEFDNKAQKAFAEPLFKPLRDGSPGPMVRSVKVCQAQYTGVNVRGGIADNGDMVRTDVFRKQNKKGKWEYYLIPVYTVDMISGKLPDKAIAAHKPYNEWPVIDNEYEFLFTLYPYDLIRVETKDGGGLYYYRSSHRANGSLIVCNVNKADTTFGIGSRTAISIEKLEMGVLGDYFPVHKEIRRGLENGSHLEPDKIES

SEQ ID NO: 6087 - protein, 1068 aa, synthetic construct
  REGION 1..1068: note = Synthetic
MKYSLGIDIGISSVGWAVLNLDEKRVEDLGVRAFHEAENPKTKAPLAEPRRIARGLRRRLRRKRGRLRTARELFIEYGLIAHNSDDTVFGDTHGKLTPWQIRAEGLDRLLTGEEFARALLHIIKRRGFKSNRKSTRDTEEGKMLAGITRNKNLMTDKGYRTAGEMYHLDEAFDSVKRNRMGSYLNTIDRDTLKEEINVLFEAQRKHQSSFASDDFQAKIIETFQWQKPFASGDDILKNVGLCTLLGDEGELRAPKNSYYIERFNLLSKINNTSYVINGDRIRFDETQRKQIAEEAYNKAKLTYGQIRKLLGLPDEARFTGLEYMQRPKKGQPREHSMKCEDAAISKMDGYNAVRKAFQKAGVWDDIKNDSDIIDKITFALTFYKTDEDIANYLREQGLVESVVNAALGCDTFAGVGHISTKAAKLLIPHLEQGYLYSEACTLAGFDHSNPQDCTLQRKLPLITRELVNNPVVLRSLCQARRVINAVIGRYGSPYAIHIEFARDVGKSREQRDEIRSRQDENAKDRERCAEEFREAYGTIPNSTDLLKWRLYREQDGKCAYSQRQFDIERLCEPGYVEIDHILPYSRSFSDAQSNKVLVFTSENRNKSNRTPHEAFGSDTMRWDRFCGWVKATIKNPHKRANLLRTRYDASDEKEQKDRNLNDTRYAARELAGFIRANLQFADPEYKRNVFCISGFITAQARWHWGLHKDREENDLHHALDAAAIAALLPYQVKMITEWAKVGETGETYIDRETGEVIEVSKRRLPRPWPNFAKEVTARLAEDPVQAIEQLALPSYSNNPPTIRPVVVSRMIRRKKTGQIHEETIRSVKRMESHGQTTVRKPLTELTADSIKKLICEEADPPLYKAIVERMQQFNNKGKDAFAEPLRKPTKDGSEGPIVRSVKMWQTQNTGIELRGGIADNGDMVRTDVFCKNGKYYLVPVYVSDILRKRLPNRAIVSGKPESEWPEMDEDYEFLFTLHPYDLLWMEADKREGRLYYYRGSHRGTGQLKLSLPNGEQVGNDDEVRIGARNAKLIKKYIIDVLGEISPAPAENRIGLEDDSGIESGEVEA

SEQ ID NO: 6088 - protein, 1073 aa, synthetic construct
  REGION 1..1073: note = Synthetic
MHFRGFAMKYTLGLDIGIASVGWAVLNYDQKRIEDLGVRAFAAAESPRKMAPLAEPRRLARGARRRLRRKAERLRRARSLFVMHQLVDEQAIETVLADTNGNPSPWQLRAEGLDRLLTGEELARALYHIIKHRGFKSNRKDGKDKEAGKMLEGIAANRATLRDGGYRTAGEMYWRDERFKLRKRNSHESYINTIDRDTLEAEIGILLEAQRALGSKHASMELQEAVTDIFKWQKPFASGDAILKLVGPCTFLGHEGEIRAPKCGYHAERFRLLQDINKLSYSVNGSRPRLTPEQAKLVENAAYSYKKVTYKQLRKLLGLPEEARFTGLEYMRRPAKGEPPEFSLKCEDATAFQVRGYHALQDVCTKAGVWDQVKSDTNLMDEMAFALTFYKTNDDISAHLSRCGAPQAVIDAALTCESFSGVLHISTAAAKRIIPHLEEGLVYSDACAKAGFNHSTPLEHERSLKLPLITRDMVSNPVVHRALCQARRVINAVVRRYGPPYSIHVELARDVGHSAEKRKEIRKQQDENRRERERQEAHFKEAFPGTQPKSSDLLKWRLYKEQNGQCAYSQRAIDLSRLMEPGYVEIDHILPYSRSFDDSRSNKVLVLAAENQNKRNATPYEAFGHQKARWDAFEAWVKANIHDHRKRENLLRQEYNAETEEAWKDRHLNDTRYASRFLAAFLRDHLLFADPENKQPVVCLSGGVTANARWLWGLTKCREENDLHHAMDAAVVAALLPHQVRLITEYAKVTETGKSYIDLETGEVIEAEQPRLPQPWPNFGEEIVARLSDDPQQAVSGLSLGSYDGLELRPIIVSRMVRRRHMGQIHKEKIRSARRLQTEGVSTLREPLTSLDRNSITCLVCEEADPPLYAAICARMAEFDNDGKKAFETPLRKPAKDGKEGPVVRSVKVWQRQNTGINVRGGIADNGDMVRTDVFRKDGKYYLVPVYVSHVLSGVLPNRAIAAGKAEDLWPGMDEHYEFLFCLHPYDLIRLESGNFAGLCNYRGTHRGDGRLKVSLPNGGTSQADDIIAVGSRNATLIEKYEIDVLGDYRLAPKEKRSGLEDNRDLEAGEAEC

SEQ ID NO: 6089 - protein, 1132 aa, synthetic construct
  REGION 1..1132: note = Synthetic
MATRIPAGGAEVILGLDLGVGSIGWCLIEHSISHRDVGEEGGAKIIDMGVRIFPAGSEGSERDWASGKEKSLAEPRRMARSMRRQRERRRRRLIALAHDLQRLGLFPTEPVETPVERDEFFKKLDATLRPPAVAPTVEHHTWLHRLFAAGIEGTKLTPHQLGRVLYYAAQLRGFQSNAKERGKAKQDPKNASVVYTGISKTRALRTSPDEALVATLARLNPEADGQRIRGRYTAREDRRSDVERLLAAQAVHYADVLTDATREKLLKRIFDQRPLKNNSHLVGRCALYPDEPRGELALPSLQRLRILQKVTDLEVIPPDGDRMPRPLDAVQRALVRDHLYSHESISFTQLRKLLGFPAKKPKAKADNPSLPPIQPPFHEFNLEREDSDEKLIGDRTHCALAPLLGEKWNDLDLAGRDELVATILEAEDEETAKEALIARYGVDNELAQAVVERALETDRGRFCARAARELCTRLDTSEDKPTRLATALESLRGGTSPQERAAEEGLDFLPPYLPSHPGVEAFHDSPHALRNPSVLRVLRELRLVVNALIRKHGKPARIRIEFARELKNPPKKRQEIARRQKERESEREKARKMLVELGLRSNIVAVTPTDIEKWLLGEECAWHCPYSGTPIPPALVFGDTGAVQIEHIIPRSISFDNSFANKTLALAEWNIRKNNRTPYTAFSASPEWPEILRRVAGFVGSGARGKLARFQWDEREIEVRYGDFTSRHLQETAWAARLAKDYLAVLFGAEKTDAIDATGTRRIETISGVATGLLRQAWCFSEALLQSPQLPKLPPDSEDRPKSGAADKLRIDHRHHAIDALVVALTTPSAIAALSSALASEQDLRRVRLPLPSANFENQLREKAESIIVSHRVNRRVAGPLHKAIYYQAPRPNGRRFQRKELKDLKTGDFDYIVDARIRTAVLDAWAKRPANQNDPANLFGTPENLPRLADGTTVKRVTLPIKEVTTVALGSPETPARQLHVLTGGNFCVVIVECPSKNAKGKPHWEFRPITLLDAARAIANRSNEDRRTPLSPAQMLLGDDALKPGEKVVFTVRSSEALRLRKGPKKGIIVVGTASKDGIEGAYHHDSRGDAIRKRLGASERIRLSPTALKEADTQKVVIGPLGEIYPARD

SEQ ID NO: 6090 - protein, 1071 aa, synthetic construct
  REGION 1..1071: note = Synthetic
MSNKITSLKKYSNQTKNTRLALDIGTNSIGWAIYKLDKKKKPCSIIKTGVRIFSSGRNEKDYTTLNATRRQKRLERRQRDRTLQRKKFLLHLLKKYGFFPKDKDLAKELQKLNPYELRAKGLDEELELSHFGRALFHLNQRRGFKSNRKSSNDKESGVIDSSIKAVEELMEEKKVRTYGEFLWKRFQKMEESRKTPGSQQENWILARRPINFKTKDNYVVYSKRAMIKDEFNKLWNAQAKFHEKLKDEKIKEKFFKAIFFQRPLKQVIVGKCFYTGKDRIPKVSPYFQKFRILKELNNLRWINQRGESFSINKDNTEFRDHLISRLFSKKKEVKFTDIKKAFKKFFPNIEDFPRFNLDTDNRNKLEGDIASNILRKEISEWDNWSLEQQDKFVELLDGKNNHALKKGEEVLFMKEDEEVLNDLIKFSKDNNFKLNEEQLKKCIKKNLPDGHGTYSKEFIEKILPFLEKGELEHKAIQSAGFGHHSDRKYKGELANALPKYQEILKNQCVEMSLKPNKKNPFNTFRIPNPTVHVAFNQLRLLVNDIIRLYGKPSEAVIETARDLPLGVKTKNQLQSKQKENTLRNEEARKIIEDFGQENNRSNRIRYQLWKEQKYKCIYSGDPISKTALYTAQLEIDHILPYSQTLDDSYMNKVLVYKKANQGKGNQTPYEYFSSHVKQWENVLSRTKELPKGKQWRFEKEAMDLVKNDNNFLERQLNDTRYISKYAKQYMEHICPQVWTVRGQTTAIIISLIQFEEKNREDYRHHAKDALAIGLIDRSFVKKVSDIAKKIEGQDKSRLKNIRKELAKNNAILPWSEFKEDAKSSLEEIIVSHRQKTKKEGELHEETAYGGIKEIQNFSQPIDVVLYKNIIEITKEKLKNIISPKIRKDFENEFKKSNKITKEFLQDYHKKTGIRRVRLKSKETIIPIKDQFGHNYKAFMPGSNYVIKLFQDKKGKWDGKIITTFDANQNKIFLPKKNSSLMKGNLLFFEGDFWKLVKFDRNKILIFVRHFVSGNPDELRKEEKTKHLMSQKNISSLGKTKPKKVDISPAGKYKLIDFQIEKEELIKQKVTL

SEQ ID NO: 6091 - protein, 1049 aa, synthetic construct
  REGION 1..1049: note = Synthetic
MKRYRLGIDLGATSLGWSMIELNEDNTPKDLLDLGVRIFPDGRDAKTNEPLNVQRREHRSMRRNRDRYLQRRTYLLDTLVKYVLMPQNEHERKQLEYLDPYVLRAKALDEEITLYELGRVIFHINQRRGFKSSRKMDSAEKETSRMKEAIKELKQRLDNVGARTLGEYLFNLNKDIPQKNQNKLRPLRIRDYGKEYNLYTDRKMYENEFDMIWNKQSTYHSELTEDVKEHLKQIIFFQRDLKPQPKGKCRFEIGEPRCPVAFPVYQQFRIYQEVNNLILLDYDRKEHELTKAQREMITQTLLKQKSATFKSLRKKIGKEYAGDYVFNLESEKRKDMKGDETSFILRKIENFGIKWNELSEDEQDEIITRIINEDNDIEIEKNLITWLCKSFGLKNENAENISNVRLPRGIGSVSKKAIRKILPYLKEGFLYHEACQKAGYHHSDFRTGEIYDEGNLPYYGKIMQHHAAFGSDDPNDIEEIQYGKIANPTVHIALNQLRKFINALAEKYGAPTQIVVELARELKLGQKRLREIEKEQTHNRKHNEEIAEELKKVGIENKYQNRLKYKLWEELDGDPAKRCCPYTGKQISISDLFSNKFEIEHILPKSKTFDDRPTNKTVSYYIANKFKGERSPFEAFGESPENYNWDKILERCENFPPNKRWRFYPDAMKNFEDQGELISRMLTDTQYMSRIAKEYMSYVCGPNNVWAIPGKLTSKFRAKWGLNELLSEDSKKNRADNRHHAIDAFVVACTDRAMLQKVARATESTRERFIEKMPPPFEVFCHDEMQEKVNNIVVSYKPDHGNAKAAILRNQTVGQLHEETAYGFVSEDEEKGKITLSVRKPLISLESVKNINEIASSKIRNELLTLAEGVPKNEIKAILANYSERTGIKRVKLHVEKDKKTVIPIKNKNGEIYKYYLSGNNYCADIYCPNKGEKDGKWQIEIIPMFKAHKQDFEPEWHKKYPTAKKIMRLFINDYVAYDDEGKRKIKRVKKMSVDGRLFFIDPKIAKTEKEPNATSVKQLQERNARKIGVDILGKIYDSQKKNENSRDK

SEQ ID NO: 6092 - protein, 1124 aa, synthetic construct
  REGION 1..1124: note = Synthetic
MPLTLSFDIGYASIGWCVLSADQPAPAEPEFLGTGVVTFPTDDCLASTRRDLRRSRRHIRSTRYRIERLKKWLLHRGVLTRPDLDKPGHPAPFLLAAAALQGHKTLNAWELWTVLRWYAHNRGYDGNSKWSREEAADDDTKKEIAARALMEKYDTGTMCETVTACLGLDPAQHHKTISSHLPYKTLDAAYPRGVVEKEVAKLISIHTGKIPGFDPETVRLILKSNDLTPAERDLLTTADIRLPKRHHGGLLFGQLIPRFDNRIISRCPITWAEVYDNEITAGKTEAQARKQAEKFAKVPTAKSKEFLEYRFARILANIKANGEPLDKELRATLFQLAEKQGRLTHKDLEREIKSHCGPVPTNIDAYFKIHPDSEEALVLDPVMDEVRKAENSPTARLYPFWKHLTESIRGEIIQLWLAGKSASLAFILQKSGDNPELLSALEKSFATLKPKKGQLPFRDFDTYLIQTKVAPKIPSGRAPYARPILRQVRDEVLAGYDPTKPAKSPAHPEGEEKAADGILYSLLDPNSRTRELQNDRPLDKLTNNHLVRHRLLILDRLLDDILAEFCTRETTIPRVIVEVGRDLKEFSGKTAKQITAELNSRLRDFKSAVKYLEENASHLPLTGSLIRKCRIAMDLDWQCPFTGEKYDAADLPSLEREHIIPYATRNTNALHALVLTWPEVNRWKNKRTARQFIIDEEGKTVPGLTRLCLFTLRQYDAFVTALDTKGHFDDYKRKTNRKALLATTALDDKDLGFTDGMMTQTSHLMKLAMRSIKNRLPDTTCDTIPGAVTAEVRKSWNLLGTLAYACPEIIDPANHLPRPKDEIRGLTHLHHALDAATLALISHYFPFTRHGENQSGKLWAAMTKRNRKPEEQTILLQTGRYKSRPARPSADGSRSTGKTELQMVDLDPSLKQKLSLSLSECRVMQHVPADRSGTKAELTTWGITKTEGEGENTRVTLHQQTTTVDNGKRLITVKTREERAGKLLGPHPKNDTGKLADIKGAMIIGENYGLALDPTPTVIPFHDVSARLKELQHQNRNKPIRVLRNGMLIRLKTNPARSQQDYTGIWRIASIKNNKGKFLIDMIRPSYITPQNGVAWSGMNKTLGPLLECGLEILPQVYSGHSVR

SEQ ID NO: 6093 - protein, 1113 aa, synthetic construct
  REGION 1..1113: note = Synthetic
MAVTLTFDIGYASIGWCVLSAEPETQHPEFLGTGVVTFPTDDCLASQRRNLRRTRRHIRSTRHRIERMKRWLVHRGFIGREEADLPGDASPFFLVAHALQGGRILSALELWSVLRWYAHNRGYDGNSRWSREEADPDDTEKERNAMALMEQAPATSTMAETVCKILNIDPANPKKRSSEKPYKTLNAAFPRSVVVGEVKELLRFHLDKLEGLDAKTVRFLMAESPLTKEDRAELEAADIRLPKRYHGGLLFGQLVPRFDNRIISRCPIMWADEYGKAKDAGKSDEEARKLADKFAKVPAAKCPEFLEYRFARVLANLKADGEPLSKELRRHLFDRAKERGRFTEAELRKEIEAQLGKIGTNLEAYFKIHPDAEKQLVIDPAVVLPHSSRVLKPIWPLLGEPARNSALRLWSRGKAVCPAQLLELAHNGGDPEQAETVLREHFAKLPKKEANAASFDAFLLKPMRADYGSGRAPYSRVVLKRVVEEVLEGCDPTKPARSDAKLDGEDKSADGVLYPLMDPSSRVRELMAERPLDQLTNNHLVRHRLLILGRLLDDLLHEFEIGAEDETQVVVEVARELKEFSGMTVKQITTEMNSRLKNFKDAVAYLEDNAPNLLQESSGRGGIIRKCRIAMDLDWRCPFTGEKYDAQDLPKMEREHIIPYATRNTNALHALVLTWPEVNRMKGKRTAKQFILESAELPSREVPNSKRRLTLFTPKQYETFVEGLETRGHPDDARRKRARKALLDTAEFEDKDLGFTEGQLTQSSQLMKLAMGEIKRKFPQALVDPVPGPVTAEIRKAWKLTGTLALACPEVLDENGNVRPKDEIRGLTHLHHALDAAILALAAHYLPFRSRGKDQKGKIWQALLKRNQNDEEKRFLMKFECCVEIPKTGKNAGTVVGLRDLDANVKNALGRSLAEGRVMQHVPADRSGAKAELTTWRVLEIEGEGEEARVKLRQRSSEVKEGVRKVSIKTPPPKRAGKLIGLNPKGGHGKLKSIKGAVVIEENYGLALDPKPTIIPFFNVSARLRDQFESNGCNPFRILRSGIQIILQGQGERNGIWTIATVQASLKIDLVRPGTVGCPKKGNSVWREVAVKGLLAKGIEILPLKYTAYPSER

SEQ ID NO: 6094 - protein, 1109 aa, synthetic construct
  REGION 1..1109: note = Synthetic
MPLTLAFDIGYASIGWCVLSSEKLSKQPPEFLGTGVVTFPTDDCLASQRRDLRRTRRHIRSTRMRIERMKRFLVHGGVLTRSDLDKPGHPAPFLLAAAALQGHRTLTAWELWTVLRWYAHNRGYDGNSLWSRGEEESEDTEKVSNAWTLMETHKTKTMCETVCGCLSLNPKEHDQRISSALPYKTLNAAYPRKVVSDEVGRLLSLHFGKIPGLDAAVVRMLMSVSDLGEETRKQLESANVRLPKRYYGGLLFGQLVPRFDNRIIARCPVTWAKTYDEGIDAGKTDKEARHLADKFAKVPAAKCREYLEYRFARVIANLRADGEPLSPELRRRIWNLASERGSISPAVLEKEIKAALGKVSTNIEAYFNLHPDSVKQLVLDPAQDEFRKAGGRVSKLAPIWEKLPDSTRKYALDIWNRNGSVSLACLLEHAGATPELVKSLDSAFAAPKKGKKDGGGFRSFDDYLLRTRVTPDFPSGRAPYARPVLKQVVTEVLAGLDPTKPARSTSKPDGENKPADGILYSTLDPTSRVRQLQNERPLDQLTNNHLVRHRMLILDRLLDDILAEFSNKDLEVERVIVEVARDLKEFSGMTAKQIASELNSRLKDFKVAVAYLEKHAPQLEQNGGIIRKCRIAMDLNWQCPFTGEKYDAYDLPKLEREHIIPYATRNTNALHALVLTYPEVNRMKGKRTARQFIADNEGKQVDGKANLSLFTLRRYDEFVEKLDTRGHPDDARRKRARKALLATTDFEDKELGFTEGQLTQSSHLMKLAMGALKLKLPKAAIDPIPGPVTSEIRKAWKLVGTLSQACPEVIDSNGDVLPKNDIRGLTHLHHALDAATLALASHYFPLQSRGQDQKGKIWQALLKRQRTEEEKKFLRELGIFVTYGRLRRDKDGNPYEEKDVRLADLKPEVKNALAHSLAECRVMQHLPADRSGAKAELTTWGVVGTEGEGEDARVTLRQRTSKVEDGKRVLEMKSREERAGKLLGTNPKNGNGKLKDVKGAMIIGENYGLALDPEPVVIPFHDVQQRLLEIRAANGGRPVRVLRNGMMIRVSNWPGKNGIWRILSCKASMKLDLAKPQEIKASWREVLIPSLLVRGLDILPRCYTGYSTT

SEQ ID NO: 6095 - protein, 1126 aa, synthetic construct
  REGION 1..1126: note = Synthetic
MAITLSFDIGYASIGWCVLNAEPSQSSEPEILGTGVVTFPTDDCLASKRRDLRRTRRHIRSTRVRIERMKRWLAHRGVLTRGDLDRPGHPAPFLLAAAALQGHKTLTSYELWTVLRWYAHNRGYDGNSLWSNEQSTDDDTEKETNAKGLMEKHSTATMCETVCACLELAPAKYADRISSALPYKTLNAAYPREVVYQEVGKLLCKHCGVLPGLDTEAVRYLLKNCVLTTEERSKLAAAGIKLPRRYHGGLLFGQLVPRFDNRIISRCPITWAPTYDAAIAEGKTDSQARQLAEKFAKVPAKKCVEFLEYRLARILANLKANSAPIAKELRQTLIALAREKGSLTAKDLTRETKAFYGNVPTNIDSYFKLHPDSKDALLLDPVADEVRKASESSAKLSPIWKLLSQESQSEIIATWRKGKAVSLAEIIHRESAKRVELLTALQPAFEKANKPKQGKTKYANIDHYLHKTTITPDVPSGRAPYARPVLRQVVAEVLAGFDPTKPAHKTSASEGEDKPQDGILYQLNDKNSRARILQDQRPLDHLTNNHLVRHRMLILDRLVEAIVSEFITSERQVTQVVVEVARELKEFSGKTAKEISVELKNRLKDFTSTISYLEKNAPDMPLNGSLIRKARIAMDMGWKCPFTGKDYDPTTLKSLERAHIIPYASRNSNALHALVLTWPEINSKQGKRTCKQFIMEEEANRESGKSNLNLFTLKQYESFVENLDTKGHPDDIRRKKARKALLLTLEMDDQDLGFTDGQLTQTSHLAKLAMRGLTKRFPSAAVDPIPGAVTAEIRKAWKLAGTLSLVCPEVIDPQTHEPRPKDEIRSLTHMHHALDAATLAFIAHYFPLRRHGEDQKGKLWKALLKRSRTPEEQKILQQTGLFQTYPKSHRDPLGRVIGTRPELKLADLPKPLKQSLRLSLAEARVMQHLPADRSGTKAELTTWGIVSIDGEGEEGRITLRQNATTVDENGCRKRLTKTREERAGKLLGPNPKHGIGKLINVKGAMIIGENYGLALDPIPRVLPFHDVTACLAKLRQENGDRPVRVLRNGMLIHLEKNPARSQQDYTGIWRITSIKNNKGTFLLNMIRPAYVTPQNGVKWSGMNKTLEPLLECGLTILPQDYSSCPS

SEQ ID NO: 6096 - protein, 1092 aa, synthetic construct
  REGION 1..1092: note = Synthetic
MAYTMGIDVGIASCGWAIVDLERQRIIDIGVRTFEKAENPKNGEALAVPRREARSSRRRLRRKKHRIERLKYMFVRNGLAVDIQHLEQTLRSQNEIDVWQLRVDGLDRMLTQKEWLRVLIHLAQRRGFQSNRKTDGSSEDGQVLVNVTENDRLMEEKDYRTVAEMMVKDEKFSDHKRNKNGNYHGVVSRASLLVEIHTLFESQRQHHNFLASKDFELEYINIWSSQRPVATKDQIEKMIGTCTFLPKEKRAPKASWHFQYFMLLQTINHIRITNAQGTRPLNKEEIEQVVNMALTKSKVSYHDIRKVLDLSEEYQFVGLDYGKEDEKKKVESKETIIKLDDYHKLNKIFNEVELAKGETWEAVDYDTVAYALTFFKDDEDIRDYLQNKYKDSKNRLVKNVANKEYTNELIEKVSTLSFRKVGHLSLKALRKIIPFLEQGMTYDKACQAAGFNFQGISKKKRSVVLPVIDQISNPVVNRALTQTRKVINALIKKYGSPETIHIETARELSKRFDERKNITKDYKENRDKNERAKKHLSELGIINPTGLDIVKYKLWCEQQGRCMYSNQPISFERLRESGYTEVDHIIPYSRSMNDSYNNRVLVMTRENREKSNQTPYEYMGNDTQRWDEFEQRVTTNPQIKKEKRQNLLLKGFTNRRELEMLERNLNDTRHITKYLSHFISTNLEFSPSDKKKKVVNTSGRITSHLRSRWGLEKNREQNDLHHAMDAVVIAVTSDSFIQQVTNYYKRKERRELNGDDKFPLPWKFFREEVIARLSPNPKEQIEALPNHFYSEDELADLQPIFVSRMPKRSITGEAHQAQFRRVVGKTKEGKNITAKKTALVDISYDKNGDFNMYGRETDPATYEAIKERYLEFGGNAKKAFSTDLHKPKKDGTKGPLIKSVRIMENKTLVHPVNKGKGVVYNSSIVRTDVFQRKEKYYLLPVYVTDVTKGKLPNKVIAAKKGYDDWIEVDDSFTFLYSLYPNDLIFIRQNPKKKISLKKRIESHSISDSKEVQEILTYYKGVDSSTAAIEFITHDGSYYAKGVGVQNLDCFEKYQVDILGNYSKVKGEKRLELETSDNNHKGKDVNSIKSTSR

SEQ ID NO: 6097 - protein, 1087 aa, synthetic construct
  REGION 1..1087: note = Synthetic
MRYKIGLDIGITSVGWAVINLDIPRIEDLGVRIFDSAENPKTGESLALPRRLARSARRRLRRRKHRLERIRRLLIREGVLTKEELDKLFEEKHEIDVWQLRVEALDRKLNNDELVRVLLHLAKRRGFKSNRQSERSNKENSTMLKHIEENRAILSGYRTVGEMIVKDPKFALHKRNKGENYTNTIARDDLEREIRLIFSKQREFGNMSCTEEFENEYIAIWASQRPVASKDDIEKKVGFCTFEPKEKRAPKATYTFQSFIAWEHINKLRLVSPSGTRGLTDKERRLLYEQAFQKNKITYHDIRTLLHLPDDTYFKGIVYDWGESLKQNENIRFLELDAYHQIRKAIDKVYGKGKSSSFLPIDFDTFGYALTLFKDDADIRSYLRNEYEQNGKRIANLANKVYDNELIEELLNLSFTKFGHLSLKALRNILPYMEQGEVYSSACEKAGYTFTGPKKKQKTVLLPTIPPIVNPVVMRALTQARKVVNAIIKKYGSPVSIHIELARDLSQTFDERRKTKREQDENRKRNETAIRQLMEYGLTLNPTGLDIVKFKLWSEQNGRCAYSLQPIEIERLLEPGYVEVDHVIPYSRSLDDSYTNKVLVLTKENREKGNRIPAEYLGVGTERWQQFETFVLTNKQFSKKKRDRLLRLHYDENEEMEFKSRNLNDTRYISRFFANFIREHLKFAESDDKQKVYTVNGRVTSHLRSRWDFNKNREESDLHHAVDAAIVACTTPSDIAKVTAFYQRREQNKELAKKTEPQFPQPWPHFADELRARLSKHPKESIKALNLGNYDDQKLESLQPVFVSRMPKRSVTGAAHQETLRRYIGIDERSGKIQTVVKTKLSEIKLDASGHFPMYGKESDPRTYEAIRQRLLEHNNDPKKAFQEPLYKPKKNGEPGPIIRTVKIIDTKNQVIPLNDGKTVAYNSNIVRIDVFEKDGKYYCVPVYTMDIMKGVLPNKAIEPNKPYSEWKEMTEDYTFRFSLYPNDLIRIELPREKTVKTAAGEEINIKDMFVYYKTIDSANGGLELISHDNSFSLRGVGSRTLKRFEKYQVDVLGNIYKVRGEKRVGLASSAHSKTGETIRPLQSTRD

SEQ ID NO: 6098 - protein, 1087 aa, synthetic construct
  REGION 1..1087: note = Synthetic
VRYKIGLDIGITSVGWAIINLDKIRIEDLGVRIFDKAEQPQGEPLSLPRRVARSTRRRLRRRKHRLERIRRLLVREGVLTKNEMNNLFKNRHLVDVWQLRVDALERKLNNDELARVLLHLAKRRGFRSNRKSEHNTNEDSIIFKQIEHNQSILSHYRTVADMIVHDEKFKNHKRNKSEDYSNMIARHSLEQEIQCIFSKQREFHNPVCSEQFEKQYLRIWSSQRPFASKDDIEKKVGFCTFESEERRAPKATYTFQSFVAWEHINKLRLVSLEGIRALTDEERRLIYRQAFLKNKVTYYDIRKLLQLQDDIKFKGLVYDANQPLKKIENVRFLELDAYHKIRKCVEQVYGKEASTMFSSDDFDTFGYALTIFKNDEDIYSYLQNVYVRADGKVIHNLTNKIYEEPLIEQLLQLSFSKFGHLSLKAMRNILPHMENGELYSKACELAGYNFNGPRKKEKTVLLPNIPDITNPVVMRALTQARKVVNAIIKKYGSPVSIHIELARDLSHSYDERRKIQKAQDDNRKKNETAIKQLVEYGLTKNPSGLDIVKFKLWSEQNGQCMYSLERIELERLLEDGYVEVDHILPYSRSLDDGYANKALVLTRENRQKGNRTPVEYLGFGTDRWQRFENFVLTNKQFSKAKKRNLLRLHYQETEEKEFKERNLNDTRYISRFFANFIKEHLKFADGGKEQKVYTVNGKITAHLRSRWDFNKNREQSDLHHAVDAVIVACASPDIIQKVTNFYKNREQNKELAKKKESFFPQPWPSFSDELKARLSKFPKESIKSLKIGNYDNNKLESLKPVFVSRMPKRSITGSAHQETLRRYVGVDKKSGKIQTAVKTKLTDIKLDSNGHFPMYGKESDPRTYEAIRQRLLEHGNDPKKAFQQPLYKPKKNGEPGPIIRTVKIVDVKNLVVHLDDGKTVAYNSNIVRTDVFERDGKFYCVPVYTMDIMRGVLPNKAIEANKPYSEWREMTEEYTFRFSLYPNDLIRVELPKEKTIKDSLGKELKIKDIFVYFKTIDSANGGLDLISHDQSFSLRGVGSKTLKRFEKYQVDVLGNVYKVKGEKRVGLASHHDQKGKQIVHSLQSVSD

SEQ ID NO: 6099 - protein, 1082 aa, synthetic construct
  REGION 1..1082: note = Synthetic
MKYKIGLDIGITSIGWAVINLDIPRIEDLGVRIFDRAENPKTGESLALPRRLARSARRRLRRRKHRLERIRRLFVREGILTKEELNKLFEKKHEIDVWQLRVEALDRKLNNDELARILLHLAKRRGFRSNRKSERTNKENSTMLKHIEENQSILSSYRTVAEMVVKDQKFSLHKRNKEDNYTNTVARDDLEREIKLIFAKQREYGNIVCTEAFEHEYISIWASQRPFASKDDIEKKVGFCTFEPKEKRAPKATYTFQSFTVWEHINKLRLVSPGGIRALTDDERRLIYKQAFHKNKITFHDVRTLLNLPDDTRFKGLLYDRNTTLKENEKVRFLELGAYHKIRKAIDSVYGKGAAKSFRPIDFDTFGYALTMFKDDTDIRSYLRNEYEQNGKRMENLADKVYDEELIEELLNLSFSKFGHLSLKALRNILPYMEQGEVYSTACERAGYTFTGPKKKQKTVLLPNIPPIANPVVMRALTQARKVVNAIIKKYGSPVSIHIELARELSQSFDERRKMQKEQEGNRKKNETAIRQLVEYGLTLNPTGLDIVKFKLWSEQNGKCAYSLQPIEIERLLEPGYTEVDHVIPYSRSLDDSYTNKVLVLTKENREKGNRTPAEYLGLGSERWQQFETFVLTNKQFSKKKRDRLLRLHYDENEENEFKNRNLNDTRYISRFLANFIREHLKFADSDDKQKVYTVNGRITAHLRSRWNFNKNREESNLHHAVDAAIVACTTPSDIARVTAFYQRREQNKELSKKTDPQFPQPWPHFADELQARLSKNPKESIKALNLGNYDNEKLESLQPVFVSRMPKRSITGAAHQETLRRYIGIDERSGKIQTVVKKKLSEIQLDKTGHFPMYGKESDPRTYEAIRQRLLEHNNDPKKAFQEPLYKPKKNGELGPIIRTIKIIDTTNQVIPLNDGKTVAYNSNIVRVDVFEKDGKYYCVPIYTIDMMKGILPNKAIEPNKPYSEWKEMTEDYTFRFSLYPNDLIRIEFPREKTIKTAVGEEIKIKDLFAYYQTIDSSNGGLSLVSHDNNFSLRSIGSRTLKRFEKYQVDVLGNIYKVRGEKRVGVASSSHSKAGETIRPL

SEQ ID NO: 6100 - protein, 1078 aa, synthetic construct
  REGION 1..1078: note = Synthetic
LRYVLGLDIGIASCGWAVINQEKERIEDLGVRIFDKAENPKDGKSLAAPRRDARSTRRTLRRKKHRMQRIKVLLVKHGLLSKTELDHLYESATEVDVWNLRLDALERKLYPKEFARILIHLAKRRGFKSNRKETTLSENGQILESISENQQIMEKQNYRTVGEMILKDKKFENHKRNKNGTYVGTVTRQQLQDEIQMIFHAQRLYKNDYATEEFESSYLEIWASQRPYASKDQIEKMIGYCTLEPKEKRAPKASWSFQYFVALQTINNLRLISKDRIEELSFEEKKQIMNLALEKSIVKYIDIRKLLSVPNEFQFNSLSYSADTVDTAVESRKCIELKEYHSINKVYKQIYGENALNLLPKYYDTIAYGLTIFKDDKDILEYLQNKYVNAKGKPISNFANKTYDDTFIQALLNLNFTKMGHLSFKALKNIIPFLEEGLSYDKACEKAGYNFKGTSYTEQTKYLPVIPQNTNPVVHRALSQTRKVINAIIKKYGSPNAIHIETARELSKTFQERKEIDSMYQDNSKKNEHAIHKLKELGNINPSGINIVKFKLWNEQDGRCMYSGKYIEPHRLFEEGYTEVDHILPYSRSLDDSYNNKTLTLGTENQRKGNKIPYEYMGNTSIWNDFETRVQSNKKINKKKQQKLLLQHFSYAREQEFIERNLNDTRYATIYLSSLIQQHLIFSESSRKKKVHTVSGIITSHLRSRWGFNKDRKEGHIHHALDAVIVAVTSDHMIQRVTKYYKLKELNRNLQAKRMPFPEPWEGFRLELEARISPNTQQYLKGLRFKNYADVNLSEIKSIFVSRMPKHSITGELHQETIRKFIGYNEKGKVLTAIKTKLEDIPFDANGDFPMYGKESDLYTYNAIKERYLSHKKDKRKSFQEPLYKPTKSGGIGPLIKSIKIMDTRTIVNPVNQGKGVVYNSKIARTDVFKKEEKYYLIPIYTIDLMKNILPQKAITAGKGYEDWTTIDPSFTFLFSLFPNDLIQIVPSKNKTIKARTTVSKKEVLLPSLTGYFKGVHSGTAGITVETHDGSVIANVGSKQLLLIEKYQVDVLGNYTKIKEEKRIGLTTYNDNKKIAAC

SEQ ID NO: 6101 - protein, 1075 aa, synthetic construct
  REGION 1..1075: note = Synthetic
MKYRIGLDIGISSCGWAVINLDQERIEDLGVRIFDKAETGDGEPLAKPRRDARGARRRNRRKRHRIERIRELIVRSDLLTRTEMDHLYNDCFELDVWELRVDALQRKLSKKEWARVLIHLAQRRGFKSNRKSEESKKENGPLLSNINENRRIMDENGYQTIAELMVNHEKFKNHKRNKAGSYLSVVSRQDVHQEIVTLFESQRVHQNPWATSEFEEAYLEIWSSQRPYASKEQIEKMIGFCTLEEGEKRAPKASISFQKFMALQKINHLRFVGVDGGRMLTHEERNYILQIAFTKKTVKYHDIRKQLQLDDQIRFRDLYYEASKSVQEVEKAKFLELTDYHRLYSTLKKLVGKNLSDEVNDLDWDTFAYALTIFKDDQDIRDYLKNEYKDSKGRHQANLANQVYPDEWIDELIKLSFSKVGHLSFVAIRKVLPYLEQGYTYDKACELAGYQFQGNASSVKKRLLPAIPLIGNPVVQRALSQTRKVINAIIKRYGSPVSIHIETSRELPKRFDERKKIQKEHEENRKMNETARKRLKELGINDPRGQDIVKYKLWQQQNGWCMYSNKYIEPNILCEIGCTEVDHILPFSRSLDDSYNNKVLVLARENQNKGSKTPFEYLGGDESKWNEFVKRVENNSKINKVKKRNLLRKHFNEREQQEFRERNLIDTQYISRFMSNFIRQNLLFADDPIKKKVVTVNGKVTAHLRSRWGFNKNRAESDLHHAVDAVIVGVTSDHMIQLVNRYYQQCEEDKFYIKRNKIDFPEPWHNFRLELEARISQSPQMSIKSLNHGNYDEEMIKKVRPIFVSRMPRRSVTGEAHQKTIRKFVGYSENGLILTAIKTPLTKITLDKNGEFPMYGKESDPATYQAIKARLLEFNNDPKKAFEKPLHKPTKSGKLGPVIKSVKILDKQRVVRPINQKRGVVYNSKIIRTDVFFKDGKYYLIPIYTIDTTKDGLPNKAITAGKPYAEWVEIDDTFEFRFSLFPNDLVRVVPRINVKVKEIATGAKTKLKEFIGYYKSVDISTAGIYLISHDRVYESEKIGSKTLVEFEKYQVDILGNYTKVKGEKRLGLATRHDHQ

SEQ ID NO: 6102 - protein, 1088 aa, synthetic construct
  REGION 1..1088: note = Synthetic
MNYKMGLDIGIASVGWAVINLDLKRIEDLGVRIFDKAEHPQNGESLALPRRIARSARRRLRRRKHRLERIRRLLVSENVLTKEEMNLLFKQKKQIDVWQLRVDALERKLNNDELARVLLHLAKRRGFKSNRKSERNSKESSEFLKNIEENQSILAQYRSVGEMIVKDSKFAYHKRNKLDSYSNMIARDDLEREIKLIFEKQREFNNPVCTERLEEKYLNIWSSQRPFASKEDIEKKVGFCTFEPKEKRAPKATYTFQSFIVWEHINKLRLVSPDETRALTEIERNLLYKQAFSKNKMTYYDIRKLLNLSDDIHFKGLLYDPKSSLKQIENIRFLELDSYHKIRKCIENVYGKDGIRMFNETDIDTFGYALTIFKDDEDIVAYLQNEYITKNGKRVSNLANKVYDKSLIDELLNLSFSKFAHLSMKAIRNILPYMEQGEIYSKACELAGYNFTGPKKKEKALLLPVIPNIANPVVMRALTQSRKVVNAIIKKYGSPVSIHIELARDLSHSFDERKKIQKDQTENRKKNETAIKQLIEYELTKNPTGLDIVKFKLWSEQQGRCMYSLKPIELERLLEPGYVEVDHILPYSRSLDDSYANKVLVLTKENREKGNHTPVEYLGLGSERWKKFEKFVLANKQFSKKKKQNLLRLRYEETEEKEFKERNLNDTRYISKFFANFIKEHLKFADGDGGQKVYTINGKITAHLRSRWDFNKNREESDLHHAVDAVIVACATQGMIKKITEFYKAREQNKESAKKKEPIFPQPWPHFADELKARLSKFPQESIEAFALGNYDRKKLESLRPVFVSRMPKRSVTGAAHQETLRRCVGIDEQSGKIQTAVKTKLSDIKLDKDGHFPMYQKESDPRTYEAIRQRLLEHNNDPKKAFQEPLYKPKKNGEPGPVIRTVKIIDTKNKVVHLDGSKTVAYNSNIVRTDVFEKDGKYYCVPVYTMDIMKGTLPNKAIEANKPYSEWKEMTEEYTFQFSLFPNDLVRIVLPREKTIKTSTNEEIIIKDIFAYYKTIDSATGGLELISHDRNFSLRGVGSKTLKRFEKYQVDVLGNIHKVKGEKRVGLAAPTNQKKGKTVDSLQSVSD

SEQ ID NO: 6103 - protein, 865 aa, synthetic construct
  REGION 1..865: note = Synthetic
VRHKIGLDIGITSVGWAVINLDIPRIEDLGVRIFDRAENPQTGESLALPRRLARSARRRLRRRKHRLERIRRLLIREGILTKEELDKLFEEKHEIDVWQLRVEALDRKLNNDELARVLLHLAKRRGFKSNRKSERNNKENSTMLKHIEENRALLSGYRTVAEMIVKDPKFAFHKRNKGENYTNTIARDDLEREIKLIFTKQREYGNIVCTETFENEYIMIWASQRPFASKNDIEKKVGFCTFEPKEKRAPKATYTFQSFVAWEHINKLRLVYPTGTRGLTDEERRLLYKQAFHKNKITYHDIRTLLHLPDDTYFKGIVYDRGAPLKQSETIRFLELDAYHQIRKAVDKVYGKGKSSSFLPIDFDTFGYALTLFKDDADIRSYLRNEYEQNGKRMPNLANKVYDNEPIEELLNLSFTKFGHLSLKALRNILPYMEQGEVYSVACERAGYTFTGPKKKQKTLLLPNIPPIANPVVMRALTQARKVVNAIIKKYGSPVSIHIELARDLSQTFDERRKTKREQDENRKKNETAIRQLMEYGLTINPTGHDIVKFKLWSEQNGRCAYSLQPIEIERLLEPGYVEVDHVIPYSRSLDDSYTNKVLVLTKENREKGNRIPAEYLGVGTERWQQFKTFVLTNKQFSKKKRDRLLRLHYDENEEAEWKNRNLNDTRYISRFFANFIREHLKFAESDDKQKVYTVNGRVTAHLRSRWDFNKNREESDLHHAVDAAIVACTSPSDIARVTAFYQRREQCKESAKKAEPHFPQPWPHFADELRARLSKNPKESIKALNLGNYDDQKLESLQPVFVSRMPKRSVTGAAHQETLRRYIGIDERSGKIQTVVKTKLSEIKLDETGHFPMYGKESDPPASA

SEQ ID NO: 6104 - protein, 664 aa, synthetic construct
  REGION 1..664: note = Synthetic
MRYKIGLDIGITSVGWAIINLDENRIEDLGVRIFDKAEQTDGKPLSLPRRIARSTRRRLRRRKHRLERIRRLLVREGVLTKNEIDNLFKNRHLVDVWQLRVDALERKLNNDELARVLLHLAKRRGFKSNRKSDRNTNENSVILKKVEENQSILSHYRTVADMIVHDEKFKFHKRNKSEDYSNMIARDNLEQEIQYIFSKQREFHNPVCTEQFEKKYLHIWSSQRPFASKDDIEKKVGFCTFESKEKRAPKATYTFQSFVAWEHINKLRLVSQEGIRMLTDEERHLVYKQAFSENKVTYCDIRKLLDLQDDVKFKGLMYDADQPLKKTENIRFLELDAYHKIRKCLEQVYGKEALTMFSDDDFDTFGYALTIFKSDEDIYSYLQNEYIRADGKRTCNLTNKVYDAALIEQLLHLSFSKFGHLSLKAIRNILPYMRDGEIYSKACELAGYNFTGPKRKEKTVLLPNIPNIANPVVMRALTQTRKVVNAIIKKYGSPVSIHIELARELSHSSDERQKIQTAQEKNRKKNETAIKQLVEYGLTRNPTGLDIVKFKLWSEQNGQCMYSLERIELDRLLENGYVEIDHILPYSRSLDDSYANKALVLTKENRQKGNRTPAEYLGFGTARWQKFENFVLTNKQFSKAKKKKFASLTLSRSRRTRIQRAKFK

SEQ ID NO: 6105 - protein, 546 aa, synthetic construct
  REGION 1..546: note = Synthetic
MLVDEERPYRNKDGDYSGVLLRSDIKKEIVAIFDKQRELGNPFARDEHRDQYVKIWESQRPFASKEDIFAKIGNCSLEKNEKRAPKATYSFSKFRALDKLNRLHIINDSVNKQKLSFEERELVMKKIFSKQKATYHDIRKTLKLSDDEKFSEVYYDEQETLAKNEKIDFISMKEQYEIRQVIKKEVGKQQLDELSPIDFDTFGYALTVFKNDEDIRDYLKNEFITSKKRPMKNLANNRYDDELIEALLKLSFSKFSHLSLKALDKILPFMEQGKYYTEAITNAGYNLQEKRDLPKQRLLPVIPEDEIRNPVVMRALTQTRKVLNSMIKKYGSPHHLYIELAREMGRNHKDRRDIEKAFNHNRAINEEAKKEISNLMPGKSDITGHDILKMKLWQEQRERCMYSRQPITTDRLLEPGYVQVDHIIPYSRSFNDSNHNKVLVLSDQNQGKKNKTPYEWFGYDEDRWNDFCTYVDNLPITRKKKQHLKNKSFTRTEEEFRDRHLNDTRYITRFLKNYIEETLHFDSKSKQNVYPVNGAYTAVLRKRWGF

SEQ ID NO: 6106 - protein, 1088 aa, synthetic construct
  REGION 1..1088: note = Synthetic
MRYKIGLDIGVTSVGWAIINLDETRIEDLGVRIFDKAEQPKGDPLSLPRRIARSTRRRLRRRKHRLERIRRLLVREGVLTKNEMDNLFKKHHLVDVWQLRVDALERKLNNDELARVLLHLAKRRGFKSNRKSDLNTNENSIILKKVEENQSILSRYRTVADMIVHDEKFKFHKRNKSEDYSNMIARDSLEQEIQYIFSKQREFHNPVCTEQFEKKYLHIWSSQRPFASKDDIEKKVGFCTFESKEKRAPKATYTFQSFVAWEHINKLRLVSQEGIRTLTDEERHLVYKQAFSKNKVTYYDIRKLLDLQDDVKFKGLMYDANQPLKKTENIRFLELDAYHKIRKCLEQVYGKEALTMFSDDDFDTFGYALTIFKSDEDIYSYLQNGYIRADGKRTCNLTNKVYDATLIEQLLHLSFSKFGHLSLKAIRNILPYMKDGEIYSRACELAGYNFTGPKRKEKTVLLPNIPNIANPVVMRALTQTRKIVNAIIKKYGSPVSIHIELARELSHSSDERQKIQKAQEKNRKKNEIAIKQLVEYGLTKNPTGLDIVKFKLWSEQNGQCMYSLESIELDRLLENGYVEIDHILPYSRSLDDSYANKALVLTRENRQKGNRTPAEYLGFGTARWQKFENFVLTNKQFSKAKKRNLLRLHYQEAEEQEFKERNLNDTRYISRFFANFVKEHLKFADEDKKQKVYTVNGKITAHLRSRWDFNKNREQSNLHHAADAVIVACASPSMIEKITNFYKDREQHKELAKKKEPFFPQPWPFFSDELKARLSKFPMESIKALNLGNYDSNKLESLKPVFVSRMPRRSVTGPAHEETLRRYVGVNEKSGKIQTVVKTKLTDIKLDADGHFPMYGKESDPRTYEAIRQRLLEHENDPKKAFQQPLYKPKKNGEPGPIIRTVKIVDIRNLVVHLDEGKTVAYNSNIVRTDVFEKDGKFYYVPVYTMDILKGVLPNKAIEANKPYSEWKEMTAEYSFQFSLYPNDLVRIELPKEKTIKDSLGKEIKIKDVFAYFKTIDSATGGLDLISHDQSFPPLRGVGSKTLKRFEKYQVDVLGNIYKVKGEKRVGLASRHDQKAEQVVHSLQSISH

SEQ ID NO: 6107 - protein, 1086 aa, synthetic construct
  REGION 1..1086: note = Synthetic
MNYKIGLDIGITSVGWAAINLDLRRIEDLGVRIFDKAEQPQGDPLALPRRLARSTRRRLRRRKHRLERIRRLLVRENVITKEEMDNLFTKRGLTDVWQLRVEALDRKLNNDELARVLLHLAKRRGFKSNRKSERNSNENSVLLKHVKENRSILDKYRTVAEMIVKDEKFQYHKRNKADDYSNMIARDDLQREIQLLFAKQREFNNPICTEHFEAAYLHIWSSQRPFASKDDIEKKVGFCTFEPNEKRAPKATYTFQSFVAWEHINKLRLVSLDGTRPLTEQERQLIYKQAFTKNKITYHDIRKLLDLPDDIKFKGLVYEVDQLLKKMENIRFLELDAYHKIRKCIEQVYSKKGVDQFSEADFDTFGYALTVFKNDEDIYAYLQNEYVRADGKKVCNLANRAYDSALIDELLNLSFSKFGHLSIKALRNILPYMEQGEVYSRACELANYDFTGPKKKEKTRLLPTIPDIANPVVMRALTQARKVVNAIIKKYGSPVSIHIELARDLSRSFDERKKVQKEQTENRKKNETAVKQLMEYGLTKNPTGLDIVKFKLWSEQQGRCMYSLEPISLEHLLDEGYTEVDHIFPYSRSLDDSYANKVLVLTKENRQKGNRTPAEYLGVGTERWNNFEAFVLTNKQFSKAKKNNLLRLHYGETEEKEFKERNLNDTRYISRFFVNFIKEHLKFADSNRNQKVYTVSGKITAHLRSRWDFNKNREESDLHHAVDAVIVACASPDIIEKITRFYQEREQNKELAKKKEPFFPQPWPHFSDELKARLSKFPQESIKVLNLGNYDNSKLESLKSVFVSRMPKRSVTGAAHQETLRRYIGEDEPSGKIQTIVKTKLSNIKLDADGHFPMYGKESDPRTYEVIRQRLLEHGNDPKKAFQQPLHKPKKNGEPGPIIRSVKIIDVKNRVVHLDEKTVAYNSNIVRTDVFEKDGKYYCVPVYTIDIMNGVLPNKAIEANKPYSEWKEMTEDYTFKFSLYPNDLVRVEFPREKVVKDSLGREVKVKDIFMYYKTIDSATGGLDLISHDQSFSLRGVGSKTLKRFEKYQVDVLGNIYQVKGEKRVGLASCHDQKTEQTVDSLQSASD

SEQ ID NO: 6108 - protein, 1088 aa, synthetic construct
  REGION 1..1088: note = Synthetic
MNYKIGLDIGIASVGWAVINLDQKRIEDLGVRIFDKAEHPQNGESLALPRRLARSARRRLRRRKHRLERIRRLLIRENILTKEEMEQLFQQKNLVDVWQLRVDALERKLNNEELARVLLHLAKWRGFKSNRKSERNSKESSELLKNIEENRSILAYYRTVAEMIVKDVKFAEHKRNKSDSYTNMIARDDLEQEIKIIFEKQREFNNPVCTKHLEKEYLKIWASQRPFASKDDIEKKVGFCTFEPKEKRTPKATYTFQSFIAWEHINKLRLVSQNDIRPLTESERHLLYEQAFLKNKITYHDIRKLLNLSDDTYFKGILYDPDTPLKQIENIRFLELDAYHKVRKCLENVYGKDAVKMFDETDFDTFGYALTIFKDDADIYAYLRNEYIQKDGKHIPNFANKVYEEQLIEELLNLSFSKFGHLSIKAIRKILPYLEQGEVYSRACELAGYDFTGPKKKEKTLLLPTIPNIANPVVMRALTQARKVVNAIIKKYGSPVSIHIELARDLSHSFDERKKIQKDQMENRKKNETAIRQLMEYGLTKNPTGLDIVKFKLWSEQQGRCMYSLDPIELERLLEPGYTEVDHILPYSRSLDDSYANKVLVLTRENRQKGNRIPAEYLGIGTERWNKYEAFVLTNKQFSKKKKQNLLRLHYKETEEKEFKERNLNDTRYISRFFANFIKEHLKFAESDDRKKVYTVSGKITAHLRSRWDFNKNREESDLHHALDAVIVACASPWMIEKITEFYKTREENKEVSKKKEPHFPQPWPNFADELKARLSKFPKESIKALNLGNYDSKKLESLQPIFVSRMPKRSVTGAAHQETLRTYVGIDERSGKIQTAVKTKLSDIKLDKDGHFPMYGKESDPRTYEAIRQRLLEHNNDPKKAFQEPLYKPKKNGEPGPIIRTVKIIDTKNQVIKLNDGKAAVYNSNIVRTDVFEKDGKYYCVPVYTMDIMKGILPNRAIEANKPYSEWKEMTEDYTFKFSLYPNDLVRIELPKEKTIKNTLGEEVKIKDIFVYYRTIHSSNGGLYLVSHDNSFLLEGIGSKTLKRFEKYQVDVLGNIYKVKGEKRVGLATPINQKAKQTINSLQSVSH

SEQ ID NO: 6109 - protein, 1042 aa, synthetic construct
  REGION 1..1042: note = Synthetic
MSDLVLGLDIGPTSLGWALFSKDTLIDCGVRIFPEGVDRDQQGGEKSKSQSRRVARGIRRQVRRRAQRMRQLKDALIKAGLFPADLEAQTEILATDPYELRAKALLEELTPHEIGRVLLHLAKRRGFLSNRTTDRGGGSELKGILAAMTQLQAEIAERGCETLGQYLHQLGVSDEDALPRLRGRHTLRAMYEDEFDKIWERQSSFHAELLTEALRYGSEGKKSYPLIPEARRKEETLLKRFGLHGLIFFQRKMYWPKSMIGRCDLEPKEKRCAKADRLAQRFRILQEVNNLRLFSPADRKEYSFVELVGADADKKLVAYLSEAKERTFPQIRKKFGLPESVAFNYERGERSKLKGHETDALFNGKNGLGKKRWNNIADDVKDEIIRIVLEEDREDVAIEKLTNQCGLTSDEAAIAIALHLPAGYSNYSRVAIRNLLPHLEAGMPLMGNDASDSALHAAGYLRPDEREVRQYEKLPEPPEVPNPLVRQALYEVRKVVNALIRVHGRLGTIRVELAREAKKSAEERTQIRIANAKRERENAAIAKTLQELKPPVRSTRRNIQRYLLWQEQGGVCIYTGKAISQAQLFDSGEVDVDHILPRWRSLDDSMANKVIAHRTANNEKGDKTPWEWLGHDKSRFDELLLRAQRLSYGKRQRFVQEHVELSEFVERQLRDTTYISRLVVQYLKGLGVPITTVKGPMTAELRHQWGLNALLNADGSQRKNRADHRHHAIDAVVVGLTDAKRLHALAKARGRDMEFPWPKFRSDVADALGRLKVSHRVRRRIQGALHEATIYGATQKAETPRPQADRPWAKGWVEDPQVVVRRKAVTDLTNTKHLEKVRDVTIRRILQDHLRQRQIDPTKPGAIPKDAFSGENAPQMPSGTPIKKVRMVEEGQTFRPLREGDRLQLTKPGSNHHISYFAVEEKGEEVWKGSVTVMWDAARRAKDAEACGNMVARDDGAEGRFVMSLSIGEMFEMTQDDGEIILCVVRKIDQRSKRVYYKRHTDARPVAEINKDNLYLTPKNLQQREARKVTATPLGQIRDAND

SEQ ID NO: 6110 - protein, 1042 aa, synthetic construct
  REGION 1..1042: note = Synthetic
MSDLILGLDIGPTSLGWALFSENTLVDCGVRIFPEGVDRDQQGGEKSKSQSRRVARGIRRQIRRRAQRIRQLTKALVDAGLFPVEPQEQEKVLSRNPYELRAKALREELSPHELGRVFLHLAKRRGFLSNRTTDRSGGSELKGIKADMAQLDADITSAGYETLGEYLYHLGSGNDAFPVRLRGRHTLRAMYEHEFEKIWNAQANYHPKLLTVKLRYGQEGKSSYPLTPVARRKDESLLERFGLHGLLFFQRKMYWPKSIIGRCDLEPREKRCPKADRLAQRFRILQEVNNLRLISPADRKEYTFAEFLGPDSDKKLVDYLCEAKERTFPQIRKKFKLPESIQFNYERGERSKLKGHETDALFNGKNGLGKKRWSEIADRVKDEIIRIVLEEDREDIALLKLTNECGLTSEEAQKAASLHLPSGYTNYSRLAISKLLPHLEIGMPLMGNDASDSALHAAGYLRPDEREVRQYDLLPEPPDVPNPLVRQALYEIRKVINSLIREYGNLGTIRVELAREAKKSAEERTQIRIANAKRERENAKIAKALQDMSPAIKPTRRNIQRYLLWQEQGGVCIYSGKSISQAQLFNSGEVDVDHILPRWRSLDDSMSNKVICHRSINNEKADRTPWEWLSHNKEHFDELLLRTQKLPYGKRQRFIKQDVELNEFVERQLRDTTYISRLLAQYLKGLGVPITTVKGSMTAELRHHWGLNALLNEDGSKKKNRSDHRHHAIDAIVIGLTDAKRLHALANARGKDVELPWKDLRHDVAKALGRMNVSHRVRRRIQGALHEATIYGPTQKKERPIPSEQRPWAKDWIEDQQVVVRRKSVSDLTNTKHLAKIRDKATRQILEDHLLRQKIDPAKPGAIPKEAFTGSNTPQMPSGVPIKKVRMVEEGQTFRPIREGDNRQLTKPGSNHHIAYFAVEENGEEVWKGEVTVMWDAARRAKDLDKCGSMVCRDDGHQGRFVMSLSIGEMFEMTQDDGEIVLCVVRKIDQRSRRVFYKKHTDARPVADLNYDNLYLTPKNMQLRDARKVTVTPLGQIRDASD

SEQ ID NO: 6111 - protein, 1027 aa, synthetic construct
  REGION 1..1027: note = Synthetic
LFSESGDQPSLVDCGVRIFPEGVERDQQGGEKSKSQSRRVARGIRRQVRRRAQRLRHLKHALITTGLFPADVVDQQEVLASNPYELRSRALSEKLEPYEIGRILLHLAKRRGFLSNRTTDRSGGNELKGILAEMTQLQGEIAAHGCQTLGQYLHQLGDDGETFAQRLRGRHTLRAMYEDEFEKIWERQASYYPALLTEELRGGEEGKQSYPLVPTARRKSESLLKRFGLHGLLFFQRKMYWPKSVIGRCDLEPKEKRCPKADRLAQRFRILQEVNNLRLISPADRKEYTFAEFVGAGADKKLVDYLCEAKERTFPQIRKKFKLPETISFNYERGERSKLQGHETDAHFNGKKGLGKRRWSEIAEDVKDHIIQIVLEEDREDVALRKLTQDCSLTVEEAHKAMALHLPAGYSQYSRVAISRLLPHLELGKLLMGNDASDSAMHAAGYLRPDEREVRQYDLLPEPPDIPNPLVRQALYEVRKVINAIIREYGALGTIRVELAREAKKSAEQRTQIRIANAKRERENAAIAKTLQEMSPAIRPTRRNIQRYLLWKDQGGVCIYTGKVISQAQLFDSGEVDVDHILPRWRSLDDSMANKVIAHRSANNEKGDRTPWEWLGHDKPRFDELLLRAQRLPYGKRQRFIQKEVELTNFVERQLRDTTYVSRLVVQYLKGLGVPITTVKGPMTAELRHHWGLNALLNEDGSQKKNRSDHRHHAIDAIVIGLTDAKRLHALANARGKDLQPPWSEFRSDVATALGRMAVSHRVRRRIQGALHEETIYGPTQKAAQPTSTDQRPWAKDWIEDSQIVVRRKSVSDLTNTKHLAKIRDVTIRKILEDHLRRQKVDPTKPGVIPKDAFAGSNAPQMPSGVPIKKVRLVERGETWRKIGSGEASKFIKPGSNHHISYFAISRKGRESWKAHVTIMLDAACIAKESINNGKIVNRSIGDQGRFLMSLSIGEMFEITNNGGEILLCVVRKIDQSGRIYYKIHDDARESMDLKKDNLYMSPSKMQQFDARKVTVTPLGKIRNAND

SEQ ID NO: 6112 - protein, 1041 aa, synthetic construct
  REGION 718..721: note = misc_feature - Xaa can be any naturally occurring amino acid
  REGION 1..1041: note = Synthetic
  SITE 378: note = misc_feature - Xaa can be any naturally occurring amino acid
  SITE 920: note = misc_feature - Xaa can be any naturally occurring amino acid
  SITE 724: note = misc_feature - Xaa can be any naturally occurring amino acid
MRTLGLDIGTTSIGWTLLEDQGDRGTIIATGVRIFPEGVDRDTQGGEKSKTQARREARGARRQVARRARRKRFLTRYLQAVGLLPTDEGGLETVIGMNPYPLRAKGLIEPLSAYEFGRVLVHLNQRRGFLSNRKTDKAKPSETKGMLVEIGTLAKRIEDTGCETLGEYLYKIGAGELVSIEDEPVGIRNRHTRRDMYEHEFEILFERQRAHHADLLTDDVQSRIHRRIFFQRKMYWPRSVIGSCDLERRLARCPVADRAAQRFRIVQEVNNLKLIDRSTGEERRLTPEERGILIAYLSIAKQRTFDQIRKKLGFTEEVRFNFENDDGTGRNKLQGHFTDATLSGKNALGKDYWKFDDQIKDRIVGILINEDREDVAIXALINECGLDQEQAERASAAHLPDSYASYCKFAIKKLLPHLEEGKFLMGNDETDSALHAAGYLRPDQRVVDQQPVLPESPDLPNPIVRQALVEVRKTVNAIIREHCKDRAEKAKIPFDRIHVELARDSKNSYEKRREIRFENAKRRKLREHAGDEIANVGDKVTRSKINKYLLWQEQDCTCVYSNKIISQDDFYSGAVDVDHILPHWRSLDDSMMNKVLVFRKENMDKGDKTPYEWLAESEPEKYDEVLQRAKKLPYSKYRRFIQKELDTDQFVARQLKDTQYISRCVTQYLHCLGAKMVMPRGSMTAELRRHWELNNILSDNGEKTREDHRHHAVDAITXXXXTQXRIQKFAESRGEGKQCPWDDLRTQAEQSVMDIRVSHRVLRRLSGALHEETFYGPTQKFVGDDPEQCIAPGSVGHGINRLHAKDWTEDSGTFVRRKVVADIKNEKHLGKIRDKGIRKILVEHLQKQGIDPDGKGDYPKGCFEGENAPFMSSGVPIKRVRLLENKSTLRQVSNRRDYHFAQPGNNHHITYRETTGKKGXTKWAGEVTTMWDAAVRGRTKVNGKSLPLVDQSDTEAGKFVMSLSIGELFEVDDPKGELGRILCVVRKIDQTGRLHYKQHIDARASGDLSPLNLYVSPKQMYEHSARKVTVTPVGQIRWAND

SEQ ID NO: 6113 - protein, 1244 aa, synthetic construct
  REGION 1..1244: note = Synthetic
MVRAACAWSFPARFLGRGALKMDGARGGTSSAKVAPPGRPGHIARWQTAKDPDSASGPPGPGLSGPLFSGNLAFRPGGQAARWGRGDAGAEREIQARLEGFPSPQRQRASRSGVRLRGKKHSSPVVRPSPTSASRASPVEALQNQKSAALLSHCGRSLRRAWPSNPSSCCRKTRGPGSDTHSQYGDSYGACQAARNPSSYRSMTQQKSEGLVLGLDVGSQSIGWALIDSDSGRIVATGVRIFPEGVDRDQTGGEKSKSQTRRTARGMRRQIARRRLRKRRLRLALQQRGLLPSGEADLQSLLSRDPIELRCRALDQPLTAHELGRVLLHLARRRGFQSNRKEGKSDSKLVEAIDTFEQEIKDSGCRTLGEYQHRRLAAFDPGADRPVRGSRTRRSMYREEFDLIWNAQRQHHPDMLTEDLRTLLDNAESDDVWMHQGLIFGQRRMYWPKSIVGRCELIPQRKRCERADRRAQSLRMLEEVNNLRLTDMGTGERRKLTDAERRKLLAELAGSKELTFDKMRELLDFGDGVQFNLERGDRKKLKGHETDYIMRGKAVLGKDWDKFDEGIKNEVIHVLLNVDVDALAKVKLERLGLTGKQADAALWATARLPQGRASYSIEAAERLLPHLERGLLLMANDPTDSAIHAAGFLRPDERVPGQRTELGPSPDIANPIVRQALVEVRRVVNAIVREYGRPTAIHIELARDSVKSFGERAKAQRDQRAREAARDEARAVIEQHGLAPRERLVRRYLLWQEQGGLCVYTGRQIGLAQLFDDAQVDVDHILPRWRSLDDSMMNKVVCFREANAEKADRTPAEWLESDPERFASVLGFVKAAKLPYPKRDRFLQKNIMLDDFVARQLTDTAYISRLVFQYLAQLGCDLVTPRGGMTAELRRAWGLNNILGETGEKNRADHRHHAVDAAVIALTSRSRLKALADGRGKQVAPPWPTLREDLDAAVKRINVSYRVQRKLSGALHEDTFYGRTQRLECGPDGVDTAARPHAKGWIEDKETFVRRKPVSDIKNAGHLEKVRDSTIRAILAEHVRRMGGDPEKGAFPKGCFEGANTPRMPNRANKEPKEGQPNTGVPIKRVRMLENSRTIRRVSERRRDQYVKPGNNHSIAYFAVPTPTGERWEAVVTPMIDAARRVRGLRLPPVAGQHPDKPEARFLFSLCIGEMFEMNDPDGNGGRVLCTVRKMDASGRVDYKTHTDARPAGEIVADNLYCSASKMQRLGARKLTVDPLGRTRWAND

SEQ ID NO: 6114 - protein, 1036 aa, synthetic construct
  REGION 1..1036: note = Synthetic
MRILGLDIGTTSIGWALVDDEQEEILGTGVRIFPEGVDRDQQGGEQAKTQTRREKRGQRRQIARRARRKRQLRELLGEHGLLPTDPDEADEVLIENPYPLRLRALDEKLTLYEIGRVFVHLNQRRGFKSNRKTDKKANEEKGMLAEISGLAKRIEETGSRTLGEYLARIGAGELLPAEGEIETVRNRHTRRDMYEVEFEAVWTAQARHHSDLLTNDFKEKIRRIIFFQRDLRRPKSVVGRCDLEPRLKRCPKAERIAQRFRIVQEVNNLKIIDRTTGEERRLSSEERETIIGELSKRKKVSFDSMRKKLKFTDEVRFNFETDDGSGRDHLKGHETDCALAAKSNKKNAGALGNDYWKLDERTRDRIVTILIDEDDEQRALELLQQRCGLTAEQAERVLGVDLPVGYASFSKYVIRKLLPHMERGLLVMGNDETDSAMHAAGFLRPDERAVNETIFLDQSPDLPNPIVRRALVEVRKVVNAITRELCDDRVKAGKRPYDAIHIELGREAKASFEQREKMRSENAKRRKMREQAAEEIEKTGEAVRRKKINKYLLWQEQDRTCPYTGKPISLAQLLSDAVDVDHILPRWRSLDDSMMNKVMVFREANAEKGDRTPAEWLEESDPKRYAEVLMRAKKLPYPKYRRFIQKDIQVDDFVARQLNDMRYISRLVTQYLRPLGADIVMPRGSMTAELRRRWELNNILSDDGEKTRADHRHHAVDAVAIALTNRSRLKALADGRGKVKPPWNGLRRQAEDSILGINVSHRVQRRLAGALHEETFYGPTQKHREDDTQLVAPGSVGGGRDRRHAKGWQEDSGAFVRRKNVEEIKTAKHLAKVRDAGIRTILADHLRRQGVDPMGKGKYPKDAFKGVNAPVMPSGVPIKKVRMIEESKTFRPVSNRRWYHNIKPGNNHHIVYREKDGKSGPTWNGEVITMMEAAKRGRSGRPLVDITPETENGRFVMSLALGELFEIDGENGQRLLCTVRKLDQRSKRLDYKLHTDARQSGEINKDNLYLSPKAMQARNARKVTVDPIGRIRRAGD

SEQ ID NO: 6115 - protein, 1016 aa, synthetic construct
  REGION 1..1016: note = Synthetic
MAGRVLGLDVGATSVGWALVQEDDGRIIAAGVRVFPEGVDRDQQGGEQSKTAARRTARGMRRQLARRARRKRQLQETLIASGLLPRETAELARVFALNPYELRCRSLDERLEPYEVGRVLVHLNQRRGFLSNRKTDKARAADTKGMLAEISKLSEAITANGCRTLGEYLALAARSFDRVRSAPEQRLRHRHTRRDMYEHEFDAIWVAQGRYHPLLLTDPLRERVRRIIFFQRRMYWPKSVVGRCELEPKEKRCPRADRAAQRFRMLCEVNNLRVLDTASRLERPLTAEERQAVLDYLATSKERKFQDMRKHLGFTDHVRFTLEGPERDKLKGHETDAALGSPKALGKRWKGLSEEAKDAIVSVLVHEDHEEEALRCLTGQSGLSALEAEHALAVNLPDGYIRFCRRAIDRLLPHLERGLHLMADDVSNSALHAAGYLRPDEREVRQRDFLPSAPDLPNPIVRQAMVEVRKVVNAIIREYGRPDRIHVELVREAKRSFDERREIRFENAKRRRAREDAARRIEEYGDKPTGGKIEKYLLWEEQGHECVYSGQPISLAQLLSDAVNVDHILPRWRSLDDSRANKVVALHEENAAKGDRTPREWLEDGDPQKYDAVLQRANKLPGNKRRKFIQKDIVLDDFVNRQLTDTAYISRLVSQYLRCLGAPIVTPRGQMTADLRHFWGLDKILDPDGRGEKNRADHRHHAIDALVIAMTNPQRLHALANERGHNVRPPWEGFWEDARRVVGAINVSHRVQRRLHGALHEDTFYGATQKRTGARVPSENVTRPWARSWIEDTQTYVRRKDVAELTDTKQLAKVRDAALRELLREHLRQRGVDPDKPGRIPGDAFRGVDAPRMASGVPVRRVRMVEESETFRPVSAHRAFQHVKPGRNHHVVYRAIGEGDASRWQAEVVTMWEAARRARAGERLVDRADGPNGRFVMSLSINEAFEVDSADGGRLLCVVRKLDQRSKRVNYKLHTDARKAGEINKENLYLSADGMHQRHAEKVVLDALGRIRRARD

SEQ ID NO: 6116 - protein, 1164 aa, synthetic construct
  REGION 1..1164: note = Synthetic
MTLNATQPDSTPIRYRLGLDIGANSVGWAALRIEDEEGGGERPSGLLGAGVRIFEAGVEGSIEQGKDGSRAVARRLARQQRRQTWRRQYRKHRLFRLLQRCGLLPAAADTSAAGRDAVLKTLDRELTARWCQVGDLDSHQKLPYLLRSAAAERSLEPFELGRALYHLGQRRGYKANRRTPEADAEQQGAVSGGISLLDEARRRDPDDPSSLRSLAQTVVDEFRFADGHFAIRSESRESSRRGRVRGHYTSRQMYLQEFEAIRRFQVANGGPLDNETWALLEKVLFRQRPLKSQSGRVGGCTLEKTPNDRNRRGGRRRCLMALPEFQEFRLLQSLNHLMILEEDGSSHPLMPGQRQVLYDHLMRDGDLKLRTRATRGKSAAPSVISLLGLAKNTQFSLRSPEESEEDDIRLIGHRTNARIRAVLGDEWDDLAEQQQEKLILQIVHASDPAMLAVWLQKHFAFSGSVAQQLAGIHLEDQHASLSRCAIRKLLPRLRAGETYAAARQAEYPDSFKATTPADSLPPVTLWNRQINNPAVIRALTEVRRVVNSIIGRFGKPDSIHVELARDLKRSRQERTKLWKQNEENRRQRDKAKLEIVRQLGYANPSRADVEKWLLAEECNWQCPYTGRHISAAALKNFDVEHIYPRQYLDDSFGNKTLCDPDFNRARKRNRLPSEVLDGADLAEVLTRVRHFKGPYAESKLRRFQAESVPEDFVSRQLNDTRYNSRLAAEFLQVLYGGRNDGNRQQRIVTPTGGLTWLIRRGFGLDRILSDGDYKERADHRQHAVDAICVALSTQKVIQRLSSLAGQVSRSDQRFNAFLSEFSKELPWPEFHADAAQTVQGIIVSHRPNRTISGGLHAETYYSKPLPAPADAKSVGKRVKSSKSRATEYRVRKNLDSLTKKDIEGDAIVDPAVRAAVQRKYQELVAAATSAAGTDPKKLWSNRADIDRFPRLLPSSKAAKQNEAQGGSMIFSVRIRTTVNARTIGGGVTLRQVTGGKDANFASMIYAITSADGKTVRWAHEVISRFEAHQRLIDARSGYKADDRRRVEVAVQPPISEKILIPRTEEEIRNAESPPFKLKPGESLQLVATLRKNDLIELDGEGGIRQIYRVQKLSATELQLSCHHQQGVEGTDRNTWNRITSLDSLRQRGLRLVNISPSGEVVYSR

SEQ ID NO: 6117 - protein, 1213 aa, synthetic construct
  REGION 1..1213: note = Synthetic
VTQADAEGGQTAPQGDGGEGEEDAVAGGGGGEGVRHGAGGSEGALLWHFCWKCHMRLRTFELHPGAEDARTHKTPDRRKLVTPSVVQDALSYHRKANALHAGRSIWCIFQLVSVQSAFPNSLGDNYYTELGTHTQSSIKMLQTTSGVSCMPAPLATPYRLALDLGSTSLGWAILRLAPTGDTDYKLKPTAIIRAGVRIFSDGRNPKDGSSLAVTRRAARAMRRRRDRLLRRKVRMTEKLVEHGFFPADQEERKKLEVLNPYELRAKGLDHALTPGEFARALFHINQRRGFKSNRKTDKKENDSSALKAAINGLRQAMIDQDCRTVGELLYRRLTDTALPAERRTVRARYREKRLEVDGKNRIEKSYDLYVDRQMIADEFDALWNKQSALNPALFNEATRFDLRDTLLFQRPLRPVRPGRCTLIPDEERAPLALPSTQRFRIYQEVNHLRLLSESDLQQRVLTRMQRDQIVEALEKNTKRSFDQLRKLLGLDGTVRFNLEDEKRKELKGNSTSSTLAKKEYFGSAWYEFDSNLQDEIVMQLLMEESEARLVNWLRETTGLSEERALATANTGLPEGYGSLSRKALERIVPALIDCDLVEDTAIPRTYDKAVLAAGFDHHSKLGFSFDFDDDEVEQLVDVETGEITPIFKQLPYYGKALQRHVAFEKENPRNDEERYGKIANPTVHIGLNQVRIVINSLIRRYGRPTEIVVELARDLKQSREQKLETHKRQAENQRRNERIRKAIATVLDCNEERVKRADIQKWILWEELSYDVADRRCPYSGIQISANMLLSDEVEIEHILPFSMTLDDTLNNKTVCMRRVNRVKGNKTPWQARDDFAHQGWFYTDIEHRASRMPKAKRYRFGADGYEQWLRDDKGFLARALNDTRYLSRITKEYLSLICPGSGVRVIPGQMTAMLRQKFGLNDVLGLRGEKNRNDHRHHAVDACVIGVTDQGLLQRFANANATTRSQGITRLVEDMPKPWSTYYDHVERAVRNIWVSHKPDHGHEGAMHNDTAYGLLGEGRVFTHKRIDGIKQRIEENLKVLPFANAKIIHATNKPWFNSPHHNPDAPYKGYKGDSNYCVEITENEKGKWEGKIISTYEAYQLAKNTKGNKSNLLSNLNNSYGLNGNKLIARLMRGDMVRILHEGETRTLRIAFIKSSGQMGFADHNESNVDKRTRQKEMSYILKTPGTFQTSYGRKIFINPDGVLTDPGSSF

SEQ ID NO: 6118 - protein, 1167 aa, synthetic construct
  REGION 1..1167: note = Synthetic
LRARSACSSPRAWRCSRRPASAASTWATPTPRTSTWARSARTKWRTWPCGVAWRWRNCGGGWRRTSEYYIKHSCLRLLDKRERRKMLKRRKPRMRGFPFGASFSLLADRAHIPVKYVEASVSGWVTNSKYFGGSCCMPAIYRLALDLGSTSLGWAVLRLEPAALEPIAIIKAGVRIFSDGRNPKDGASLAVTRRAARAMRRRRDRLLKRKARMQDKLVKHGFFPSDMDERKALERLDPYALRAKGLREALTPGEFARALFHINQRRGFKSNRKTDKKDNDSGALKKAISHLRQQMEAGGHRTVGDHLWSRLQQGLGVRARYRETPFTNDEGKKRIDKSYDLYIDRAMIEQEFDALWAAQAAFNPALFHEVARADLKDTLLHQRRLRPVKPGRCTLLPEEERAPLALPSTQRFRIYQEVNHLRLLGEDLREVALTLAQRDAVANALESKARLTFEQIRKLLKLSGSVQFNLEDAKRTELKGNATSAALARKELFGAAWGGFGEALQDEIVWQLVTEEGEGALIAWLQAHTGVDEARAQAIADASLPEGYGSLSRKALARIVPALRAGVVTYDKAVQAAGFDHHSQLGFEYDAGEVEDWVHPDTGEIRPVFKQLPYYGKPLQRHVAFGSGKPEDPDERRYGKIANPTVHIGLNQVRTVVNALIRRYGRPTEVVIELARDLKQSREQKVEAQRKQAENQRRNARIRKSIAEVLGIGEEQVRGADIQKWICWEELSFDVAERRCPYSGVQISARMLLSDEVEVEHILPFSKTLDDSLNNRTVAMRQANRIKRNRTPWTARDDFEAQGWSYEGILQRAERMPLRKRYRFAPDGYERWLGDDKDFLARALNDTRYLSRVAAEYLRLVCPGSGTRVIPGQMTARLRGKFGLNGVLGPDGEKNRNDHRHHAVDACVIGVTDQGLMQRFANASAQAREDGLTRLVDDMPRPWPTYRAHVERAVRHIWVSHRPDHGFEGAMMEETSYGIGKDGSIKQRRKADGSPGREITNLIRIHEATQPQRHGAGPDGQPLPYKGYVGGSNYCIEITRNDKGKWEGEVISTFRAYGIVRTSGLGQLRHPRVGQNGRELVMRLVIGDSVRLEIDGIERTMRIVKISGSNGQIFMAPIHEANVDARNSDKQDAFAYTSKYAGSLQKTKARFVTISPIGEVRDLGFKG

SEQ ID NO: 6119 - protein, 1123 aa, synthetic construct
  REGION 1..1123: note = Synthetic
VIWNSIKNFYPHRPPTIESCATAVYIGQAVWEEIWGLCAKLASSFIKLMQKYLQWGIEFMSKRKAVHYRLALDLGSTSLGWAVLRLDAKDRPSAILKAGVRIFSDGRNPKDGASLAVTRRAARAMRRRRDRLLKRKARMMNKLIAHGFFPQDVVARKALEALNPYQLRAEGLQRALTPGEFARALFHINQRRGFQSNRKTDKKDNESGALKTAISQLRQTLAESGCQTVGELLWQRLQAGQGTRARYRETRIATETGKGKIDKSYDLYIDRQMVADEFDALWAVQAAFNPILFNEQARAELRDTLLHQRPLRPVKPGRCTLLPEEERTPLALPSTQRFRILQEVNHLRILHPDLREEALTLDQRDAIVALLEDRGKVTFQAMRRTLNLGDAVQFNLEDAKRRELKGNATTAALSKKELFGAAWRDFDETLQDDIVLRLVTEESEAELVQWLIENTGVDEARATAIANTGLPEGYGSLSRKALARIVPALRAEVITYDKAVQAAGFAHHSDLRFSFEYDSADVEQVGERIDKTTGEILPVSAFKQLPYYGKALQRHVAFGSGNPQDPEEKRYGKIANPTVHIGLNQLRRVVNDLIRRYGRPTEIVVELARELKQSREQKLEAQRKQADNQKRNARIRAEIAPILGISEERVKHADIQKWILWEELSFDVADRRCPYSGVQISARMLLSDEVEIEHILPFSQTLDDSLNNKTVSMRQANRIKGNRTPWQARQDFEAQGWSYEGMLQRAERMPRAKRYRFASDGYERWLKEDKDFLARALNDTRYLSRIARDYLTLVCPGGVRVIPGQMTALLRAKFGLNDVLGLHGEKNRNDHRHHAVDACVIGVTDQALLQRFAQASATARQQGLEKLVEDMPLPWFTYRTHVERAIQNIWVSHKPDHGHEGEMFDATIYSASGQSRMAAKDRKVLPFHARPEHAHLSRYRDKNNAPKPYKGLLSNSNYCIEITRNEERGWEGKVISTFDAYKIERELLRAYRNKHGKNAKTLSLLDLLGDHESSDGQPLVMRLCKGDCIAIGQGKKREVLQVLKINSSGSITFIKPNETNISARYLAKLAAQKDQKAGKLFDEAALNDVFFQKAFSAGSLLEAKARRVTISPIGELRDPGFNG

SEQ ID NO: 6120 - protein, 1074 aa, synthetic construct
  REGION 1..1074: note = Synthetic
MWMGARTDARKRQDVSGIMKYRLGIDLGSTSLGWAVFRLNDEGLPVALIKAGVRIFHDGREAAKSGGVGAPLAVKRRIARGLRRRRDRMLKRKKRLMNQLIAFGFFPEDKEARKRLETLYPNPYALRAAGVERALKPEEFARALFHLNQRRGFKSNRKLDKEPDAGAGADVVKKSSEESAMKAGISDLRKTLKERHYTAGQLFNERLGQGEQVRNRSVLVTKGGKEQLESTYEMSIDRQMVADEFDAIWKTQAGFNPTLFNDKARDALRDTLLFQRPLKPIRPGRCTLMPEEERAPLALPSSQRFRIYQEVNNLRISDDQMNERALTLEERDKVVALLEGQGESKFTNLRKLLKLSGTTHFNLEDGKRDRLKGNAVSIALSKPNAFGDAWASFDEHLQDEIVWKLVDEDSEKVLVDWLVATTKVDAERARAIARVRLPEGYGNLSRKALERVVPELRKGVVTYSDAVQAAGFEHHSKLGFDYAESDVEAYIDPLTGEQLVDPETGEIKVVFKSLPYYGKPLRRHVAFGTDNPKDPEEVRYGKIANPTVHIGLNQVRQVVNGLIRFYGRPAEVVVELARDLKQSKKEREEEQREQKRNQDRNERIAKDIAAILKIDPSEVKKRDIVKWKLWEELGTDAADRCCPYSGQQISASMLLSDQVEIEHILPFSRTLDDSMHNKTVALTKVNRVKANRTPYEAREDFERQGWKYDDILMRVNGFPRHLQRKAKRFAPDGYEQWKGKEQDFIARALNDTRYMSRIAKQYLELVCPRGVRVIPGGVTAKIRHHLGLNDILGEDGLKNRNDHRHHAVDACVIGVVDYSFMQRLATASARAHEQGMDRLISGFEPPWPTYRDHVVRAIDNILVSHKPDHGYQKAMLEDTAHGIRKDGTINPSRSSNKANISFLNPISEPGQERRHGVDADGKSLPYKGYVGGSNYCIEIFKDEKGRWAGEVISTFDAYQIVRKGGGLKQGVSLLRNKACAQNGRPLVMRLMIDDTVKMDVNEFEPRTVFRVVTIFSNGQVFMAPINEANVDARNRDKTDPFKYISKMAGSFKKSKARQVTISPIGRLSDPGFKE

SEQ ID NO: 6121 - protein, 1068 aa, synthetic construct
  REGION 1..1068: note = Synthetic
MNKAVAYRLALDLGSTSLGWAIFRLNEAREPTAIIRAGVRIFSDGRNANSEPLAVHRRVARAMRRRRDRLLKRKKRMHDQLVQHGFFPAEVAERKELERLNPYQLRAKGLHEALTPGEFARALFHINQRRGFKSNRKTDRKDNDSGALKQAISELRKRIQDSDCATAGEWFWKERMQQKPEGVRGQWVRARYRKTPSTTDEGKKRIGYDLYVDRAMVEQEFDALWAAQAALQPGLFTEAARAELKDTLLYQRDLRPVKPGRCTLLPAEERAPLALPSTQRFRILQEVNNLRLLDEALREVPLNLAQRDAVVSALEGKKELSFAAIRKLLTLSGKFNLEDEKRAELKGNATSVILARKDLFGDAWAGFDAAVQDEIVWRLVSQESEGALIAWLQQHTGVDGVCAEAIVNTRLPDGYGRLSRKALERIVPALQREVCTYDKAVQAAGFAHHSDLGFDFDYAEDEVQQVGEHTIASTGEVQAQYAFKQLPYYGKALQRHVAFGSGDAKDHEEKCYGKIANPTVHIGLNQVRTVVNALIRRYGHPTEVVVELARDLKQSREQKQQTQREQADNQKRNEDIRKRIAPILETSPERVRDRDIKKWILWEELNKKDIADRHCPYSGERISATMLLSEAVEIEHILPFSRTLDDSLNNRTVAMRRANRIKGDRTPWEARADFEAQGWRYEAILQRAEGMPPRKRYRFAEDGYQRWLGKDRNFLARALNDTSYLSRLAANYLRLVCPQGVRVIPGQMTDKLRGKFGLNSVLGLDGKKNRNDHRHHAVDACVIGVTDQGLMQRFANASKQARENGLTRLVQDMLLPWWPSYYDHVERAVRHIRVSHRPDHGFEGAMMKGTAHGIREDGIREDGRIKQRPKAKGSADHKTITLIPIDEPRQLARHGVDAEGKPLPYKGYASGSNYCIEITKNGKGKWEGQVISTFDAYRIKAAADAAARAGQVISTVEADSIVRKSGWERLRGAQSQNGQPLVMRLVIGDSVRMEVDGRDEVMRVVKMSGKEMVFAPVREANVDKRNNMPDEQDPFTYTYKRADQLRKAKARQVTISPIGELRDPGFKG

SEQ ID NO: 6122 - protein, 1065 aa, synthetic construct
  REGION 1..1065: note = Synthetic
MSKHKPTIRYRLALDLGSTSLGWAILRLNADNQPTAIIKAGVRIFSDGRSPKDGSSLAVTRRTARAMRRRRDRLLKRKARMRDKLIEYGFFPQGVVARKALEALNPYQLRAEGLQRALTPGEFARALFHINQRRGFKSNRKTDKKDNDSGALKTAINQLRQQLQDENARTVGEWLWQRLQAGQGTRARYRETRITTEEGKNKIDKSYDLYVDRQMVADEFDALWAVQAGFNPALFHEQARAELSDTLLRQRPLRPVKPGRCTLLPEEERAPLALPSTQRFRILQEVNHLRLLQHGMREEPLTLAQRDAIVNMLESSGKVTFKAMRKKLKLGDVVQFNLEDAKRSELKGNATTAALAKKELFGTAWHDFDESLQDEIVLRLVTEESEAELVQWLTENTGVDEARAAAIANAGLPEGYGSLSRKALARIVPALRAEVITYDKAVQAAGFAHHSDLGCGFEHGDDEVAQIGERVIASTGEIKPVLAFKQLPYYGRALQRHVAFGSGNPKDPEEKRYGKIANPTVHIGLNQVRKVANALVRRYGRPAEIVVELARDLKQSREQKLETQRKQADKQKRNARIRAEIAPMLGISEERVKHADIQKWILWEELSFDAADRRCPYSGVQISAAMLLSEQVEIEHILPFSQTLDDSLNNKTVSMRQANRIKGNRTPWQAREDFEAQGWSYDGMLQRAERMPKAKRYRFAPDGYERWLKEDQDFLARALNDTRYLSRIAKAYLQLLCPQGTRVIPGQMTALLRAKFGLNDVLGLHGEKNRDDHRHHAVDACVIGVTDQALLQRFAQASAAARQQGLEKLVEDMPLPWESYRAHVERAVQNIWVSHKPDHGHEGEMFDATIYSASGQSRMAAKDRKVLPFHARPEHAHLSRYRDKNNAPKPYKGLLSNSNYCIEITRNEKRDWAGKVISTFDAYKIERELLRAYRNKHGKNASSLALLDLLSNHESFDGQPLVMRLCKGDCIAIGQGKEREVLQVLKINSSGSVTFIKPNETNISARYLAKLAAQKDQKAGKFFDEAALNDVFFQKAFSAGSLLEAKARRVTISPTGELRDPGFKG

SEQ ID NO: 6123 - protein, 1059 aa, synthetic construct
  REGION 1..1059: note = Synthetic
MNKPLRFAFDLGSTSLGWAVLGLKQIEGKFLPDSIIKAGVRIFSDGRDPQSDKSLAVNRREKRAARRRRDRLLKRKNKMMRLLVDVGFFPKDLNARKALEKKNPYALRAKALDEALSKEEMARAIFHLNQRRGFKSNRKSDSKETQGALKTAIADLTEQIDLNAADGKARTLGEFLWRRMQKGQGVRARHFEEKQVENGKSKIKKYYDLYVDRAMVEAEFDAIWAKQMAFSPNVFTAEIGNKLKDCLLFQRKLRPVQVGRCSLEPEKERAPLALPLQQRFRILQEVNNLRILNKDLSQTPLSLEERNILLDALEKNAKRTFIQIKKLLQLPGDVAFNLESENRTELKGNASTALLSKKELFGAKWFEFSIEEQTTIVEKLLNEESEPELMAWLEAQYGFGIETCQKIARANLPEGYGNLSKEALEKIVPELEKAVITYDKAVLKAGYEHHSRLNEFGEVCGKTFDTGLTFTDNATGEVKHIYAYFELPYYGECLTRHVSFGSGVPSDSVEKRFGKIANPTVHIALNQVRLVVNALLKRYGHPKEIIIELARDLKQSKAQKAEAQKKQKANQERNNRLRKAVAKVFGCLEENVKRADIERLILWEELSKDPAQRRCPYSGKMISIEMALNNETQIEHILPFSRTLDDSLNNKTLSTRKANQAKARRTPFEAKGDFEAQGWHWEEILQRVRNMPHAKQWRFLEDAMQKYNAENDFAARALNDTRYLSRIAKEYLSFVCPQNTRAIPGAMTAKLRKEFGLNDVLGLNGEKNRNDHRHHAVDACVIGITDQGMLQRFAKASADAEKKSLQRLVENMPLPWSTYRDHVQRAVDNIFVSHKPDHNYEGQMLQESAHGLKNWGTPQACVKKAKGSADKNNISINSVVPICEPSQNARHGVDSDGNPLPYKAYVGGSNYCIEIVKNEKGKWQGEVISTFKAYQIVRQSGEKRLRDPNWSQSGKPLVMRLMINDCVRMGTDVVFRVVSIRTDGRITFAPIHEANVDKRNTETGKRKKLQKNNPLTVENAQDVDNFEYTTIKASSLQKENGRKVTISPIGQLREYKLKE

SEQ ID NO: 6124 - protein, 1056 aa, synthetic construct
  REGION 1..1056: note = Synthetic
MPKQKSTRYRLALDLGSTSLGWAVLRLNEQHEPNAIIRAGVRIFSNGRNPKDGSSLAVTRRAARAMRRRRDRLLKRKARMMNKLVEYGFFPADVAERKKLERINPYELRAKGLDAPLTPGEFARALFHINQRRGFKSNRKTDKKENDSGALKAAISHLRQQLHERKARTVGEWLWQRLQAGLGTRARYRESRVAQANGKTRIEKSYDLYVDRQMIAEEFDALWAAQAAFNPQQFSEQARGELRDVLLFQRDLRPVRPGRCTLLPDEERAPLALPSVQRFRILQEANHLRLLHPDLREEPLSLAQRDAVVDALEHNSKRTFEQLRKLLKLNGTVKFNLEDEKRKELKGNATSATLSKDGLFGENWWNLDEALQDAIVWQLVSEQSEEKLQNWLQANTGVNATQAETIANAGLPEGYGSLSYKALARIIPALRGTEVANGIDVPRTYDQAVQAAGFAHHSDLDSGFDFEHSHDEVERIGERVIASTGEVKPVFAFKQLPYYGKALRRHVAFAKEHPRNEEERYGKIANPTVHIGLNQLRVVVNALIRRYGRPTEVVVELARDLKQSREQRQEEQKRQADYQKRNEHIRREIASMHGCAEERVSHADVQKWILWEELSFDVADRRCPYSGVQISAQMLLSNQVEIEHILPFSQTLDNSLNNRTVAMRQANRIKGNRTPWQAREDFERQGWSYDSILQRAERMPKAKRYRFSRDGYERWLKEDKDFLARALNDTRYLSRVAKTYMELVCPLGTRVIPGQMTALLRAKFGLNDVLGLNGEKNRDDHRHHAVDACVIGVTDQGLLQRFAQASADARGNGLEKLVENMPVPWATYRDHVKRAIQCIWVSHKPDHGYEGPMMEETAYGIRKDGSIRQKTKADGSTGREITHLIRITEPTQNLRHGVDAQGQPLAYKGYVGGSNDCIEITQNEQGKWEGNVITTFQAYDIVRRLGSKQGPRRLRHPTLAQTLDVYGKPKKLVMRLMIDDCVRLELDGNKKTLRVVKITGNGQVFMAPVHEANVDKRNSDKTDPFAYVSKYAGSFQKAKARRITISPIGELHDPGF

SEQ ID NO: 6125 - protein, 1054 aa, synthetic construct
  REGION 1..1054: note = Synthetic
MNVWKGAGFVSRKRNIIRYRLALDLGSTSLGWAILRLNAENEPTAIIKAGVRIFSDGRNPKDGSSLAVTRRTARSMRRRRDRLLKRKARMLDKLIAHGFFPQDEAARKALEALNPYQLRAEGLQRALTPGEFARALFHINQRRGFKSNRKTDKKDNDSGALKTAISQLRQQLQNENARTVGEWLWQRLQAGQGTRARYRETRIATETGKGKIDKSYDLYIDRQMVADEFDALWAVQAAFNPVLFNEQARAELRDTLLHQRPLRPVKPGRCTLLPEEERAPLALPSTQRFRILQEVNHLRILHPDLREEALRLDQRDAIVALLEDRGKVTFQAMRRTLDLGDAVQFNLEDAKRRELKGNATTAALSKKELFGAAWREFDEALQDDIVLRLVTEESEAELVQWLIENTGVDEARATAIANTGLPEGYGSLCRKALARIVPALRAEVITYDRAVQAAGFAHHSDLGFGFEHDDDEVTQIGERVIASTGEIKAVLTFKQLPYYGRALQRHVAFGSGKPQDPEEKRYGKIANPTVHIGLNQLRRVVNDLIRRYGHPTEIVVELARDLKQSREQKLETQKRQNENQERRQRIRKEISDAFGQQGREISPERVKDADIQKWILWEELSFTPTDRRCPYSGVQISAAMLLSDEVEIEHILPFSQTLDDSLNNKTVAMRQANRIKRNRTPWQARQDFEAQGWSYEGMLQRAERMPRAKRYRFAEDGYERWLGEDKGFLARALNDTRYLSRVAKEYLKLICPGGVRVIPGQLTGMLRRHLGLNDVLGLDGKKNRDDHRHHAVDACVIGVTDQALLQRFANASELPKMQGRHKLAQDFEPPWPTYREHAARAVKNIWVSHRPDHGHEGGMMEETSYGISKDGRIKQRRKADGSQGREVSNLIRISEPTQPERHGLDAEGQPLPYKGYVGGSNYCIEITCNDKGKWEGEVISTFRAYQIVRKHGVARLRHPGLAQNGKALIMRLMIDDCVRLELDGREETMRVVKIGSNGQVFMAPLHEANVDARNRDKNNPFSYVSKMAGSFQQAKARRVTISPIGELRDPGFKG

SEQ ID NO: 6126 - protein, 1054 aa, synthetic construct
  REGION 1..1054: note = Synthetic
LLASRAHIPSDKFLKCIAKVVTNKMKRQSAKRELPMSHKMRYRLALDLGSTSLGWAMVRLNHEAPPAPLAVIKAGVRIFSDGRNPKDGSSLAVTRREARAMRRRRDRLLKRKARMTHALLAHGFFPSDEAARKALERLDPYALRAKGLDEALKPEEFARALFHINQRRGFKSNRKTDKKDSDGSALKNAISKLRQALKEDQCRTVGQWLNKRNTTGQTVRARYRQQRVEKEDGKTRIDKSYDLYIDRAMIEAEFDALWAKQAELNPALFHETARAELKDCLLHQRLLKPVKPGRCTLLPDEERASLALPSTQRFRLYQEVNNLRILHEGLKEEPLTLAQRNQLIDALEQHSKRSFTQIKKLLGLGGAVQFNLEDARRQELKGNTTSAILASKQHFGPPWFGWSEATQDEIVAQLVGEENEARLVQWLQDTTGVDEARAETLANVALPEGYGSLSAKALRRILPALRLEVITYDKAVLAAGFEHHSHISHAATGEILPTLPYYGQYLQRHVGFGTGVPEDADEKRFGKIANPTVHIGLNQVRVVVNALIKRYGHPSEVIVEVARDLKQSQEQRKEDNERQAKNQKRNERLRADAAGVLQCAPERVRHADIQKMILWEELSFDPAYRRCPYSGVQISAAMLLSDQVEIEHILPFSETLDDSLNNKTVATRQANRVKGNQTPWQARNDFAAQGWAYADMLNRAELMPRNKRYRFAEDGYEQWLRDDKGFLARALNDTRHLSRVAREYLSLICPQATRVIPGQMTAMLRGKFGLNDILGLDGEKNRNDHRHHAVDACVIAVTDQGLLQRFAHASADARQQQLNRLVENMPLPWESYREHVKLAVSRIWVSHKPDHSHEGAMHNDTAYALLGNGRVSVRKVIDGARVREESTLKVIEFSSAKSADRHGLMPNGEPRAYKGYKGDSNYCIEIVRGEGGKWEGEVISTFEAYQIARKHGIAQLRNQVASVSGKPLVMRLMIDDSLKLEVDGQLKTMRIASINSAGRLSLAAHQEANVDARNRDNTGTWRYTYKQAGSLLKANARRVTISPLGELRDPGFKP

SEQ ID NO: 6127 - protein, 1049 aa, synthetic construct
  REGION 1..1049: note = Synthetic
MNVWKGTGFVSRKRNIIRYRLALDLGSTSLGWAILRLNADNQPTAILKAGVRIFSDGRNPKDGSSLAVTRRAARAMRRRRDRLLKRKARMLDKLIAHGFFPQDEAARKALEVLNPYQLRAEGLQRALMPGEFARAMFHINQRRGFKSNRKTDKKDSDSGALKTAISQLRQQLQNENARTVGEWLWQRLQAGQGTRARYRETRIATDTGKGKIDKSYDLYIDRQMVADEFDALWAVQAAFNPVLFNEQARAELRDTLLHQRPLRPAKPGRCTLLPEEERAPLALPSTQRFRILQEVNHLRILHPDLREEALTLDRRNAIVALLENRGKVTFQAMRRTLNLGDAVQFNLEDAKRRELKGNATTAALSKKELFGAAWHDFDEALQDDIVLRLVTEESEAELVQWLIENTGVDEARATAIANTGLPEGYGSLSRKALARIVPALRAEVITYDKAVQAAGFAHHSDLRFSFEYDSADVEQVGERIDKTTGEILPVSAFKQLPYYGKALQRHVAFGSGNPQDPEEKRYGKIANPTVHIGLNQVRRVVNDLIRRYGRPTEIVVELARELKQSREQKLEAQRKQADNQKRNARIRAEIAPILGISEERVKHADIQKWILWEELSFDVADRRCPYSGVQISARMLLSDEVEIEHILPFSQTLDDSLNNKTVSMRQANRIKGNRTPWQARQDFEAQGWPYEGMQQRAERMPRAKRYRFAPDGYERWLGEDQGFLARALNDTRYLSRIARDYLTLVCPGGVRVIPGRMTALLRAKFGLNGVLSLSGEKNRDDHRHHAVDACVIGVTDQGLLQRFAEASAMARQQGLEKLVETMPLPWETYPAHVQRAVQNIWVSHRPDHGHEGGMMEETSYGISKDGRIKQRRKADGSQGREISNLIRISEPSQPERHGVDAEGQPLPYKGYVGGSNYCIEITRNDKGKWEGEVISTFRAYQIVRKHGVARLRHPEMAQNGKALVMRLMIDDCVRLELDGREETMRVVVIPRNGQVFMAPLHEANVDARNRDKNDPFSYISKMAGSFLKAKARHITISPIGELHDPGFKG

SEQ ID NO: 6128 - protein, 1048 aa, synthetic construct
  REGION 1..1048: note = Synthetic
MSYRLALDLGSTSLGWAAIRLNQQAEPTALIRAGVRIFSDGRNPKDGSSLAVTRRAARAMRRRRDRMLKRKERMVRKLVEYGFFPADIAERKKLEVLNPYELRAKGLNEALAPAEFGRVLFHLNQRRGFLSNRKTDKKDNDSGALKQAINTMRTQLLETGCRTVGEWYWKVRMQENSGGVKGHGVRARYRETPMVGEEGKKRIDKRYDLYVERAMVAQEFDTLWDAQAALNPSQFNETARADLRDTLLFQRNLRPVKPGRCTLIPEEERALLALPSTQRFRIYQEVNNLRVLHPDLHEESLTLAQRDQIAAMLESKAKVTFEQMRKALNLSGATQFNLEDPKRQELKGNATTAILGKKDLFGAQWAQFDSQLQDEIVFNLMTEESEERLIAWLQANTGVDEMRAAAIANTSLPEGYGSLSRKALSAILPVLQSAVLTYDKAVRAAGFSHHSDLGFDFEYASEDVEQIGERIIASSGEIKPVYAFKQLPYYGRALQRHVAFGSGEPDHTEEKRFGKIANPTVHIGLNQVRVVVNALIRRYGRPSEIVVELARDLKQSREQKMETQRKQADNQKRNARIRTMIAETRNISEERVRVADIQKWILWEELSFDAADRCCPYSGVQISAALLLSERVEIEHILPFSKTLDDSLNNRTVVMREANRIKRNRTPWQAREDFEAQGWSYDGILLRAERMSKYKRYRFAADGYERWLGEDKDFLARALNDTRYLSRIAAEYLRLIAPGSATRVIPGQMTAMLRAKFGLNDVLGLNGEKNRNDHRHHAVDACVIGVTDQGLLQRFARASSDAREGGLTRLVDDMPMPWPTYREHVERAVNAIWVSHKPDHGHEGAMMEETSYGIGRDGSIKQRKKADGTAGREVSTLVRISEPSQPQRHGVDAQGAPLPYKGYVGGSNYCVEITVGESGKWEGKVISTFEAYAIVAEWMRKGSNAAEAQRKLRQSDVGLNGRPLALRLMIGDCVRLEHEGQERTLRVATISAAGQVYMSPLNEANVDARNRSRELPYISKMVGSFQKARARRVTLSPIGELRDSGGKE

SEQ ID NO: 6129 - protein, 1047 aa, synthetic construct
  REGION 1..1047: note = Synthetic
MSHRMRYRLALDLGSTSLGWAMIRLNANNRPCAVIKVGARIFSNGRNPKDDSSLAVTRRDARSMRRRRDRLLKRKARMMRTLVEYGFFPAEEAQRKAMETMNPFALRAKGLDSALTPAEFGRALFHINQRRGFKSNRKTDKKDSDSGALKSAIHKLRTILDTENSRTVGEWLHARNVTGQPVRARFRQNRILKDDGKIRIDKSYDLYIDRSMIEHEFDRLWAKQAELNPVLFTETARADLKDVLLHQRPLKPVKPGRCTFLPEEERAPLALPSTQRFRIYQEVNHLRILRDGFKEEQLTLQQRDNLIAELEKKGRCSFIQMRKLLSIGGAVQFNFEDPKRQELKGNITGAILSKNEYFGSAWFNFDDTKQDAIVLRLIAEENETKLMRWLQEETGVDEKRAEAIANAALPEGYGSLCTRALARILPELRGGVVTYDKAVQAAGFDHHSHISPSATGEIWPELPYYGQPLQRHVGFGSNDPRDSDEKRYGRIANPTVHIGLNQVRLVVNALIKRYGHPSEVIVELARDLKQSKDQRDEENKRQADHQKRNARLRAEIATILDISEERVKSEDLQKMILWEELSFDPADRRCPYSGTQISKSMLMSDEVEVEHILPFSQTLDDSLNNKTVALRRANRIKDDRTPWNAFGAQSQAGFDYEGILARAEQMPKAKRYRFGEDGYQRWLKDDAGFLPRALNDTRYMSKVAREYLSLICPNTRVIPGRMTAMLRGKFGLNDVLGLNGEKNRNDHRHHAVDACVIGVTDQYLLQQFANASASARKQHLNRLVEKMPLPWENYREHVKRAIEHVLVSHKPDHSFEGSMFKETSYGIRRDGSIVQKKNGEGEKGRMVEYIVPITEPGQTNRHGLDINGKSRAYKGYAPDGNYCMEILKQATGGWVMEVIPTYKAYLLARDLGWGKEDSLAVLKRMRTVKLATADGTLITKLMPGDTILAHFKGKNRLLQVVKMSVQGGTTFTELNEANISGRYEARRKARLKLKNEKTEVILTAEDVLALGDQFVLSQIGIEDLRRGKARRVTISPIGELRNPGFKD

SEQ ID NO: 6130 - protein, 1045 aa, synthetic construct
  REGION 1..1045: note = Synthetic
MKNKMQYRLALDLGTTSLGWAMLRVKPNPEGRLEPFAVVKAGVRIFSDGRNPKDGSSLAVTRREARAMRRRRDRLLKRKARMLQQLTAFGFFPTDLAERKALETLNPYELRAKGLDEPLSPYEFGRSLFHINQRRGFKSNRKTDKKENDSSALKAAIRRVASEIDGNQARTVGEWLYKRMLNGQPVRGRYRETKVQKEDGKTKIDKSYDLYIDRAMVEAEFEALWAKQASLNPAVYSEQAKATLKDVLLFQRNLRPVKPGRCTLIPTEERAPLALPSTQRFRIYQEVNNLRILREGLKDEALTLVQRDALVTALEQNNKRTFAQIKKLLGLDGQTQFNFEDPKRQELKGNTTSAILSHPKHFGDAWFGFDEAKQDGIVCQLLNEENESALIRWLMDHTGVDEAHAEAIANAALPEGYGSLSRAALAKILPELRKAVITYDKAAQAAGFDHHSHISPSTTGEILPELPYYGEALQRHVGFGTGNPDDVPEKRYGKIANPTVHIGLNQVRKVVNALIKRYGHPSEVIVEVARDLKQSKKQRDEENKRQAENQKRNERIRQDIAAMRPDRSEERVTRTDIQKWILWEELSFDPANRCCPYSGVQISAEMLMSDAVEIEHILPFSRTLDDSLNNKTVSMRQANRIKGNQTPFEAFGKDNALGVNYSDILMRAQQMPKAKRKRFAENALEEWLQNEKNFLARALNDTRYLSRVAREYVSLICPQATRVIPGQMTAQLRAKFGLNDILGLDGEKNRNDHRHHAVDACVIGVTDQGLLQRFAYASASARANGLARLVDTMPDPWPSYRQHVQRAVQNIYVSHKPDHSHEGAMFDETIYSATGKSRSAAKDRTVIPFIAKNWSHPDDHNKQRPFKGLITDVSQRHQNKPYKGLLSNSNYCIEIYSDEAGWGGHVLKTFDAYQIVRAHKNASEGMQALRNKHSSQNGHPLVMRLMIGDYIRAEIDGFLLLLQVLKINSSGSITFIKPNETNISARYLAKLAAQKAQKEGKPFDDIALNDVFFQKAISADSLRLFKARPVTLSPIGELRDPGFKG

SEQ ID NO: 6131 - protein, 1045 aa, synthetic construct
  REGION 1..1045: note = Synthetic
MAISGAYRLALDLGSTSLGWAMFRLGEDGSPTALIRSGVRIFSDGRNPKDGSSLAVTRRAARAMRRRRDRLLKRKSRMLGQLVRHGFFPADEAARKALERLNPYQLRAKGLREALTPGEFARALFHINQRRGFQSNRKTDRKDNDSGALKQAIHQLRERMTASGCQTVGEWFWQVRMQQRPEGVAGQGVRARYRETPYTTDDGKKRIDKSYDLYVDRAMIAQEFDALWAAQAALQPALFTEVARADLRDTLLHQRPLRPVRPGRCTLLPDEERAPLALPSTQRFRILQEVNHLRLLDGTLSEVPLTLAQRDAVVAALEAHSKRSFDQLRKLLKLSGSVRFNLEDAKRTELKGNATSAALARKDLLGAAWAGFAAELQDEIVWQIVNEEGEGTLIAWLQQHTGVDEARAEAIANVALPEGYGSLSRKALARIVPELQRDVVTYDKAVQASGFAHHSDLGFDFDHDSDEVERVGERTIASTGEIKPVYAFKELPYYGRALQRHVAFAKDKPRNDEERYGKIANPTVHIGLNQVRVVVNALIRRYGRPAEVVVELARDLKQSREQKQEAQKKQADNQRRNARIRERVAETLGISTERVRASDIQKWILWEELSFDVADRRCPYSGVQISAAMLLSEQVEIEHILPFSQTLDDSLNNRTVAMRQANRIKRNRTPWAARADFEAQDWSYEGILQRAERMPLRKRYRFAHDGYERWLGEDKDFLARALNDTRYLSRVAAEYLRLVCPGSATRVIPGQMTAMLRAKFGLNDVLGLNGEKNRNDHRHHAVDACVIGVTDQGLLQRFAQANAQAREGGLTRLVESMPLPWDTYRDHVERAVRHIWVSHKPDHGFEGAMMEETSYGIRKDGSIKQRRKADGSAGREITNLIRIAEPAQPTRHGVDAAGRPLPYKGYVGGSNYCIEITRNAQGKWEGEVISTFKAYGIVRAGGWVQLRNPTQGQNGQPLVMRLVIGDSVRLEVEGREQTMRVVNINGNNGQMFMAPVHEANVDARNRDKQDAFAYTSKYAGSMQKAKARQVTISAMGELRDPGFQG

SEQ ID NO: 6132 - protein, 1044 aa, synthetic construct
  REGION 1..1044: note = Synthetic
MQKEKPLAYRLALDLGSTSLGWAVLRLSAPGEPSAIIKAGVRIFSDGRNPKDGSSLAVTRRAARAMRRRRDRLLKRKARMLAALERHGFFPQDEAARKALEKLNPYELRARGLESTLKPEEFGRALFHLNQRRGFQSNRKTDRKDNDSGALKQAIGTLRAQMQESGCRTVGEWFWKARMEQKPEGVKGQGVRARYRENRYTNDEGKPRIDKRYDLYVDRAMVAQEFDALWAAQAAFNPVLFNETARFELRDTLLHQRKLRPVQPGRCTLVPDEPRALLALPSTQRFRIYQEVNNLRLLEGELREEPLTLTQRDQIVALLEKQAKVTFTAMRKALGFSALFNLEDAKRDGLKGNATAAALGKKHLFGPRWTDFDAALQDEIVTQLMTEESEPRLIAWLQEHTGVDEARAQAIANAGLPEGYGSLGRTALARIVPELRRDVITYDKAVQAAGFAHHSDLGFSFGHGDDEVECIGERTIASTGEIKPVPIFRQLPYYGRALQRHVAFGSGKPEDAEEKRYGKIANPTVHIGLNQMRTVVNALIRRYGRPAEVVIELARDLKQSREQKLEAQQRQADNQRRNARIRRSIAEVLGISEERVRALDIQKWILWEELSRDAADRRCPYSGVQISANMLLGDRVEIEHILPFSVTLDDSLNNRTVALREANRIKRNRTPWDARADFEAHGWIYDGILQRAERMPLRKRYRFAPDGYERWLGEDKDFLARALNDTRYLSRVAAEYLRLVCPGSATRVIPGQMTALLRGKFGLNDVLGLDGEKNRNDHRHHAVDACVIGVTDQRMMQRFAQANAQAREDGLTRLVEDMPLPWPTYRAHVERAVRHIWVSHKPDHGFEGAMMEETSYGILRDGSIKQRRKVDGSAGREISNLIRIAEPRQPMRHGVDAEGRPLPYKGYVGGSNYCIEITVNDEGKWEGRVISTFDAYRIVREGGLQQLRHPTQGQNGRALAMRLVIGDSVRLETGDGNLQTLRIAKMSAAGQVFMSEVNQANVDARNRSGDLPYVSKMAGSFQKARARQVTISPIGELRDPGFKG

SEQ ID NO: 6133 - protein, 1041 aa, synthetic construct
  REGION 1..1041: note = Synthetic
MRYRLALDLGTSSLGWAVLRLNEAKQPVAIVRSGVRIFSDGRHAKDGSSLAVQRRNARAMRRRRDRLIRRKRRMMQMLIEHGFFPASKTERKALERRYPDPYALRAKGLDEALPPEAFARLLFHLNQRRGFKSNRRTDKADAEGSVLKNAIGSVHRELDERGMRTVGELLYYRLAEQRRSTPGHEKGIRARYRETKIVDSDGKNRINKSYDIYIDRQMVADEFDRIWEVQASFDPDLFNERARQDLRGTLLYQRDLRPVVPGRCVLLPSESRAPLALPICQRFRIYQEVNNLRVQDEFLREVPLTLEQRNMVVEALEKYSKRSFDQLRTLLQLSGNSQFNLEDVKRRELKGNATTAILSGKKYFGKDWHEFSHEMQDEIVEKLCTEESETHLVKWLVERAHIDESRAREVANVTLPDGYGSLSHAALKRLVPVLKASVCSYSDAVREAGLGHHSQFEFSYEADEVEDWVNPETGEVSVAFKRLPYYAKALRRHVAFGTGEPGDPDEKRYGKIANPTVHIGLNQLRVVVNALMDRYGRPSEVVVELARDLKESKKRRAEIINQQADRQKKNEEIRKKIADARGCREDEIKRWEIEKWILWEELSRNPATRCCPYSGEQIGVEMLLSNEVEIEHILPFSRTLDDSLNNKTVCTVAANRVKGNRTPWEARDDFALRGWDYSGILARARQMPSKSKISRFAEDGYEKWKGEGEGFLARALNDTRYLSRVAKAYMQLVCPGSGVRVIPGRMTAILRRHLGLDELLSDSGVKNRFDHRHHAVDACVIGVTDQGLLQRFANASAQAREEGLRKLVKDFSPPWPTYREHVKRAIDSLWVSHRPDHGYQGAFMQEEAYGFSQDGKVKKKAKGEDSREVKNLIKISDSKQSERHGVNPDGSPRPYKGYIGGSNYCIEIFRNDEEGWGGDVISRFEAYQIIRNAGGEKEGVEKLRNPSRAQNGKPLVMRLMIDDSLRLELSGGLVTMRVVRISQNGQVFMAPLNEANVDARDRDKGDPFKLVSRKPGTLWALKARQVTVSPIGELRDPGFSG

SEQ ID NO: 6134 - protein, 1041 aa, synthetic construct
  REGION 1..1041: note = Synthetic
MKYAPSSYTYRQQKSIHGGGKLSKMRYRLALDIGSTSIGWCLLRLDGDDKPVAIIRMGVRIFSDGRNPKDGTSLAVTRRNARQMRRRRDRLLKRKERMLAALTRFGFFPTDEVQRRQLVNLDPYALRKKGLYDALSGPEFARALFHINQRRGFLSNRKTDKKDSDSGALKKAIKDLRDKLAQENCQTLGEWLANRHENRLSVRARLRGRTQKDKAYDFYADRAMIEHEFDVLWAKQSSLNPALFNEAARKELKDILLHQRPLKPVKPGRCTLLPDEERAPLALPSTQRFRIYQEVNNLRLLTPDLREQALTLEQRNQVVQLLEHQGEVRFTKILKALKLPGTTKFNLEDIKRDRLKGNATSAALAKDTCFDERWYSFDHAMQDDIVDKLLNEASESALVSWLQEHTGVDEATAERIANTSLPEGYGNLSRAALDRIVPELIKDVVMYSDAVKRAGFDSHSALSYIQQTGEIMDALPYYGIPLRRHVAFAKDNPRNDEERYGKIANPTVHIGLNELRKVVNALIKRYGRPSEIIVEVARELKLSRERKLEIQREQKERQELNDKQVAEACVVLGLTPTNLDRAKRRELSQKMQLWVELNSKNVADRQCPYTGEQIGIERLLSNEVEIEHILPYSMTLDDSMNNKTVSLRRANRDKGNRTPYQAFGEISQPGYDYEAILQRAALMPREKTKRFAPDGYQRWLKEDKDFLARALNDTAYLSRIAKEYLSLVCHPNKVRAIPGRMTALLRGKFGLNQLLSGTESKNRNDHRHHALDAAVIGITDQGLLQRFAQASASARVKQLDRLVEEMPLPWPSYREHVERALENIIVSHKPDHGYQGAMHEDTAWRLHGNGVVSRRIRPEDGGPRQREIKNKSVIAIASTRNPERHGLDENGSPRAYKGYVGGSNYCIEIWRDEKGKWDSDVISTFEAYQLIRLHGEAEGIKRLRNPSYSLSGKPLVMRLMINDLVRLNLGGNTKTMRVVKIGGNGQMFFAEHNEANVDARNKDDGDSFKYVSKIAGSLQTAQGRRVTVSEIGDLRDPGFRG

SEQ ID NO: 6135 - protein, 1039 aa, synthetic construct
  REGION 1..1039: note = Synthetic
MTYRLALDLGSTSLGWAALSMDETGKPIAVRRAGVRIFSDGRNPKDGSSLAVTRRAARAMRRRRDRLLKRKDRMLNKLIHYGFFPADDAARKALEKLNPYQLRAKGLESALTSGEFGRALFHMNQRRGFLSNRKTDKKDNDSGALKQAIGTMRAQLAETGCRTVGEWYWKERMQQRLEGIKGQGVRARYRETPFVNEDGKNRIDKRYDLYVERAMVAQEFDALWAVQAAINPDLFTEAARVDLRDTLLFQRNLRPVKPGRCTLIPEEERALLALPSTQRFRIYQEVNHLRILYPDLREERLDLAQRDQIVALLEASQKVTFTRIRKALGLSGECQFNLEDAKRQELKGNATAVVLGRKDVFGPQWAGFDAALQDEIVQQLMTNESEEQLVAWLQSTAGVDEERAMAAANVGLPEGYGGLSLKALAKIIPALERDVVTYDKAVAAAGFAHHSDLGFDFDHDAGDVEQIGERTIASSGEIKPVFAFKQLPYYGRALQRHVAFGSGKPEDTDEKRFGKIANPTVHIGLNQVRLVVNTLIRRYGRPSEIIVELARDLKQSREQKQETQRRQADNQKRNARIRTSISETLGISEERVRTADIQKWILWEELSFDVADRHCPYSGVQISAAMLLSERVEIEHILPFSHTLDDSLNNRTVAMREANRVKRNRTPWAARADFESMGWSYDGILQRAERMPRNKRYRFAEDGYERWLGEDQDFLARALNDTRYLSRVAAEYLRLIAPGSATRVIPGQMTAMLRAKFGLNDVLSLEGVKNRNDHRHHAVDACVIGVTDQGMMQRFAQASANARESGLTRLVDDMPMPWSTYRDHVQRAVDHIWVSHRPDHGHEGAMMEETSYGIRRDGSIKQRKRADGSAGREISNLIRIAEPKQLQRHGVDAQGQALPYKGYVGGSNYCMEITLGDKGHWEGAVISTFEAYSIVRARRISALRNRSVGQNGKPLVMRLMINDIVRLEVNDVLRTMRVATISGGMQVFMSDVHEANADARNRSRELPYVSKMPRSFQKAKARQVSISPIGELRDPGFKG

SEQ ID NO: 6136 - protein, 1038 aa, synthetic construct
  REGION 1..1038: note = Synthetic
MAKQVRYRLSLDLGSTSLGWAIFRLDADAHPTAIIKAGVRIFSDGRNAKDGSSLAVTRRAARSMRRRRDRLLRRKTRMLDALLEYGFFPQDAAQRKALERLNPYALRAEGLARPLTPGEFARAIFHLNQRRGFKSNRKTDKNDNDSGALKTATSQLRQDIQASGCRTVGEWLWTQRLQKKPEGVPHQGVRARYRETPHINSEGKKRIEKKYDLYIDRSMIEAEFDALWSAQATFNPVVFHATAHEKLKDILLYQRPLRPVKPGRCTLLPEEERAPLALPSTQRFRIYQELNNLRLLVDQLNEQPLTLAQRDTIATLMEGRAKISFDQIRKALKLGSMTKFNLEDDKRNELKGNATGSQLAKKEFFGPAWHQFDEALQDDIVWHLLSEENESALISWLQDRTGIDAATAQAVSNASLPEGYGSLSRKALEVILPRLRSEVITYDKAVQAAGFSHHSQLGFEYDPDDVEDWIDHATGEVKPIFKRLPYYGKALQRHVAFGSGKPEDSQEKRYGKIANPTVHIGLNQVRVVANALIARYGRPTEIIIELARDLKQSREQRQQDQRRQADNQKRNARIRNSIAQALGIAEARVRREDIQKWILWEELDPGDAMHRCCPYSGVPISASMLLSEQVEIEHILPFSMTLDDSLNNRTVSLRQANRIKRNRSPWDAREDFEAQGWHYDGILQRAGLMPVQKRYRFAADGYQRWLRDDQDFLARALNDTRYLSRIAAEYLRLVCPQGTRVIPGQLTALLRRRFGLNDILGLEGEKNRNDHRHHAVDACVIGITDHGLMQRFARASAQAREQGLTRLAEEMPLPWPTYRDHVDRAVSLIWVSHKPDHGHEGAMMEETAYGLMKDGTIRQRHKADGTKGREVANVIRIAEPAQPTRHGVDDQGRPLPYKGYIGGSNYCIEITRGAQGKWEGTVISTSDAYGIVRARGIAGLRNTSQGQNGHPLVMRLVIGDSLRLRINDALQTMRVTKISGNGQVFMAGVHEANVDARNRDKSQAFALVSKMAGSLQAAQARQATISPIGEIRDPGFPG

SEQ ID NO: 6137 - protein, 1037 aa, synthetic construct
  REGION 1..1037: note = Synthetic
MPAITLRYRLAIDLGSTSLGWAILRLNAENEPTAIIRAGVRIFSDGRNPKDGSSLAVTRRAARAMRRRRDRLLKRKARMMDKLIAHGFFPQAEAERKALESLNPYQLRAEGLQRALTPGEFARALFHINQRRGFKSNRKTDKKDNDSGALKTAISQLRQALAESNCQTVGALLWQRLQAGLGTRARYRETRTTTETGKNKIDKSYDFYIDRQMVADEFDALWTAQAAFNSSLFNDGARLALRDTLLHQRKLRPVTAGRCTLLPEEERAPLALPSTQRFRILQEVNHLRILHPDLREETLTLAQRDAIVALLESKGKVTFQTMRKALKLGDVVQFNLEDAKRCELKGNATTAALAKKELFGAAWHDFDETFQDDIVLRLVTEESEAELVQWLIENTGVDEVRATAIANAGLPEGYGSLSRKALKRIVPALRAEVITFDKAVQAAGFAHHSDLGFGFEHGDDEVQQIGERVIAATGEIKPVFAFKQLPYYGRALQRHVAFAKDKPRNEEERYGKIANPTVHIGLNQVRKVVNALIRRYGQPTEIVVELARDLKQSLEQKLETQRKQADNQKRNARIRAEIAPLLSISEERVKHADIQKWILWEELSSDAADRRCPYSGVQISAAMLLSDEVEIEHILPFSQTLDDSLNNKTVAMRQANRIKRNRTPWQARQDFEAQGWSYEGMLQRAERMPKAKRYRFAADGYERWLGEDKGFLARALNDTRYLSRVAKEYLKLICPSGVRVIPGQLTSMLRRHLGLNDVLGLDGEKNRDDHRHHAVDACVIGVTDQALLQRFANASELPKMQGRHKLAQDFEPPWPTYREHAARAVKSIWVSHRPDHGHEGGMMEETSYGISKDGRIKQRRKADGSQGREVSNLIRISEPTQSERHGVDANGQPLPYKGYVGGSNYCIEITRNDKGKWEGEVISTFRAYQIVRKHGVARLRNPGLAQNGKALIMRLMIDDCVRLELDGREETMRVVKIGSNGQVFMAPLHEANVDARNRDKNNPFSYVSKMAGSFQQAKARRVTISPIGELHDPGFKG

SEQ ID NO: 6138 - protein, 1036 aa, synthetic construct
  REGION 1..1036: note = Synthetic
MLHKMHYRLALDLGSTSLGWAMIRLDADNQPCAVIKAGVRIFSNGRNPKDGSSLAVTRREARAMRRRRDRLLKRKARMMRTLIEYGFFPAEAAQRKALETINPFALRAKGLDEALTPAEFGRALFHINQRRGFKSNRKTDKKDNDSGALKTAIGKVRATIEAEGCRTVGEWLHKRDVAGLTVRARYHQDKVIKEDGKTKIDKYYDLYIDRAMIEQEFDELWKKQAELNPALFTEAARADLKDVLLHQRPLKPVKSGRCTFMPDEERAPLALPSTQRFRMYQEVNNLRILRDGLKEEPLTLKQRDDLIAALEKNSKHSFTQIKTLLGVGGAVQFNFEDLKRQELKGNTTSAILSNDKHFGKAWFTFDEAKQDAIVLQLVKEENEAKLVRWLQDETGIDEKRAEAIANVGLPEGYGSLCAKALARILPELRRDVMTYDKAVQAAGFEHHSRLGSNTEIPGLTFKIESIDQDSGEVKQFHIHKVLPYYGEYLQRHVGFGSGEPEDPAEKRYGKIANPTVHIGLNQIRLVVNALLKRYGHPSEVIVELARDLKQSKDQRDEESKRQAENQKRNKRLRDAIAGTLKISEERVRRDDIQKMILWEELSFDPADRRCPYSGAQISATMLLSDEVEVEHILPFSQTLDDSLNNKTVALRQANRIKGNRTPWDAFGAQAVAGFDYESILVRAEGMPKAKRYRFAENGYQRWLKDDASFLARALNDTRHMSKVAFEYLKLICPNTRVIPGRMTAMLRAKFGLNDVLGLNGEKNRNDHRHHAVDACVIAVTDQGLLQRFAKASASAREQQLNRLVENMPLPWGSYREHVQRAINAIWISHKPDHSHEGAMHNDTAYGLRGDGKVSFHKMVEGVRTHSEDNLKVIEISNAKATDRHGLLPNGEPRPYKGYKGDSNYCIEIVRNEKGKWEGEVISTFEAYQLVREHGIARLRHSTLSVSGKLLVMRLMIDDVVRLIIDEQTRTMRIATLSGNGQIFMADTSEANVDARNRSKEETFAYVSKMAGSLQKANARRINISPIGELRDPGFKE

SEQ ID NO: 6139 - protein, 1036 aa, synthetic construct
  REGION 1..1036: note = Synthetic
MLHKMRYRLALDLGSTSLGWAMIRLDANQRPCAVIKAGVRIFSNGRNPKDGSSLAVTRREARAMRRRRDRLLKRKARMMRTLIEYGFFPAEEAQRKALETLNPYKLRADGLDKALTPAEFGRVLFHINQRRGFKSNRKTDKKDTDSGALKTAISKLREILKTENCRTVGEWLHKRNQAGQTVRARYRQDKTIKDDGKAKIDKYYDLYIDRAMIEHEFNELWRKQAEFNPALFSSAAYTDLKDVLLYQRPLKPVKPGRCTFMSDEERAPLALPSTQRFRMYQEVNNLRILREGLKEEPLTLQQRDDLIVVLERNNKRTFTQIKKLLGVGGAVQFNFEDPKREELKGNTTNAILGKKEHFGEAWIAFDEAKQDAIVMQLIKEENEAKLIQWLQDETGIEEERAEIIANVGLPEGYGSLGTKALARILPELRRDVVTYDKAVQAAGFEHHSKLNQNRGIPGITFKIESIDQDTGEIKEFHIHKELPYYGEYLQRHVGFGSGKPEDPIEKRYGKIANPTVHIGLNQVRLAVNALIKRYGHPSEVIVEVARDLKQSKEQRSEENKRQAENQQRNNRLRTEIARILQINEEGIRRDDIEKMILWIELSADVADRKCPYSGVPISATMLLSDEVEIEHILPFSQTLDDSLNNKTVALRKANRVKGDRTPWEAQQDFAAQGWSYADILARAENMRKEKRYRFAEDGYKRWLKDDAGFLPRALNDTRYLSRVAREYLHLICPNTRVIPGRITAMLRSQFGLNKVLGLNGEKNRNDHRHHAVDACVIGVTDQGLLQKFAKASASAREKQLNRLVDNMESPWKNYQEHVQRAIDAIWVSHKPDHSHEGAMHNDTAYGLRGNGKVSFHKMMDGKREYIEDNLKVIEIADTKAAERHGLLPNGKPKPYKGYKGDSNYCIEIVRNEKGRWEGEVISTFEAYQLVREQGAAQLRHPALGISGKPLVMRLMIDDTVRLDVDGQSCTMRIAKLSSNGQIFMADICEANVDARNRNKEDSFAYISKMAGSLQTAKARRVTISPIGELRDSGFKG

SEQ ID NO: 6140 - protein, 1035 aa, synthetic construct
  REGION 1..1035: note = Synthetic
MLRKMHYRLALDLGSTSLGWAMIRLNAGNEPCAVIKAGVRIFSNGRNPKDGSSLAVTRREARAMRRRRDRLLKRKARMIQTLIEYGFFPAKEDQRKALEIMNPFALRAKGLNEALTPAEFARALFHINQRRGFKSNRKTDKKDNDSGALKTAINKLRETLKTENCRTVGEWLNKRDVAGLTVRARYHQDKTIKEDGKSKINKYYDLYIDRAMIEHEFDELWKKQAELNPTLFTEAARADLKDVLLHQRALKPVKPGRCTFMPDEERAPLALPSTQRFRMYQEVNNLRILRDGLKEESLTLNQRDDLIAALEENNKRTFTQIKKLLGLGGVVKFNFEDPKREELKGNTTSAILGKDEHFGSVWFKFDEAKQDAIVMQLFKEENEAKLLRWLQNETGIDEKRAETIANVGLPEGYGSLCALALARILPELRRDVVPYSDAAKAAGFHHSDTSNNQEVPGLTFPIELVVTETGEIKTKHIFHELPYYGEYLQRHVGFGSGKPEDSAEKRYGKIANPTVHIGLNQVRLVVNTLIKRYGHPSEVIVEVARDLKQSKDLRDEEGKRQAENQKRNKRIRTAIAGVLQTSEERVRRDDIEKMILWEELSFDPADRRCPYSGVQISAAMLLSDEVEIEHILPFSQTLDDSLNNKTVALRQANRVKGNRTPWEAFGAQSTAGFDYATILARAEHMPKGKRYRFAEDGYQRWLKDDAGFLPRALNDTRHMSKVAREYMSLICPNTRVIPGRMTAMLRGKFGLNDVLGLNGEKNRNDHRHHAVDACVIAVTDQGLLQRFAKASASAREQQLNRLVENMPLPWESYREHVERAIDAIWVSHKPDHSHEGAMHNDTAYGLLGDGKVSIHKMVEGKRERIEESLKVIAFTNAKANDRHGLLDNGEPRPYKGYKGDSNYCIEIIRNEKGKWEGEVISTFDAYQLVREHGVARLRHPTLSVSGKPLVMRLMKDETIRMVTNEKPITARVCWVRSDTRIAFASTSEANVDARDRDKNDSFSYIVKTASVLQKLQARRISISPTGELRDPGFKE

SEQ ID NO: 6141 - protein, 1033 aa, synthetic construct
  REGION 1..1033: note = Synthetic
MFKLSYRLALDLGTTSIGWAILRLNNETPPRPSAIIKAGVRIFNNGRDAKTEASLAVNRREARGMRRRRDRLLKRKARMMKTLIEYGFFPKDAAERKALENLNPYELRAKGLDDALTPAEFARALFHINQRRGFKSNRKTDKADNDSGALKTAISALRQTLLQTNCRTVGEFLHKRFTDETLTPEERTVRARFRQKPIEIDGKKRIDKSYDLYIDRQMIEDEFDALWAKQAQLNSAQFTESARTDLKDVLLFQRNLKPVIPGRCTLLPDEERAPLALPSVQRARMYQEVNHLRILAEGLKEQVLTVAQRDSLIVALEANSKRSFTQIKKLLGLGGAVQFNFEDVKRQDFKGNTTSAILSNDKYFGKAWLNLTESFQDEIVMQLVKEENEAKLVRWLIKHTGVDEATAERIANVGLPEGYGSLSAAAIVRLLPELRKDVVTYDKAVKAAGFDHHSHLNPSKVTGEILPELPYYGEPLQRFVGFGTNNPADVPEKRYGKIANPTVHIGLNQIRTVVNALIKKYGHPSEIIVEVARDLKQSKIQREEEQKRQAANQKRNERIRRDIANAKFGGNEERVKHADIQKWILWEELSFDVVDRRCPYTGVQISAEMVLSDSSGVEIEHILPYARTLDDSLNNKTMSMRVANRIKGNQTPWEAFGVKQVADFKYEEILQRAERMPKGKRYRFAPDGYEKWLKDDKDFLARALNDTRYLSRIAKEYLALVCPQNTRVIPGQMTAKLRAQFGLNKVLGLDGLKNRNDHRHHAVDACVIGVTDQGLLQRFANASQSANALQLDRLVEKMPDPWPTYREHVKRAVAHIYVSHRPDHSYEGQMHEDTAWGLRPDGVTTRRVRNDETGRREREYKNRSVIPFNSTRDPNRHGLDESGQVKSYKGYVGGSNFCMDIVCNDKGKWEGEIVSTYQAYQIVREYGRDKGLAMLRSRSTSISGKPLVMRLQNGDIVKMMVGERLCLMRVVKMGANGQMFFAEHNEANVNERNSNKGELFSYISKYAGSLQNTKARRVTISPIGEITDQGFKE

SEQ ID NO: 6142 - protein, 1029 aa, synthetic construct
  REGION 1..1029: note = Synthetic
MKYRLALDLGSTSLGWAIVQLNAKDEPCAIVRAGVRIFPDGRNPKDGSSLAVTRRNARAMRRRRDRLLKRKARMQRLLIEHDLFPADEAARKALETLNPYELRAKGLDAALTPAEFARALFHLNQRRGFKSNRRTDRKDNDSGALKAAIGGLRAQLDTAGADGRARTVGELLWRRMSDPNVLTVRARYREQRITKDDGKTRVDKSYDLYVDRAMVEAEFDALWAKQAELSPTQFGEAARATLKDCLLHQRNLRPVRPGRCTLEPDEPRAPLALPSQQRFRILQEVNHLRLLGGRLLEESLSVEQRDKLVAALEDGSKSFKTAIPKLLGLPGTVQFNLADAKRTELKGNATSMLLGKKDFFGPAWHGFSEARQDEIVMRIQEEESEARLVDWLATSTGVDEAHALKIANAALPEGYGSLSAKALAKILPAMRAEVITYDKAVLAAGYDHHSHISHAASTGEILPELPYYGEYLQRHVGFGTGELNDTPEKRFGRIANPTVHIGLNQVRVVVNALIKRYGHPTEVIVEVARDLKQSQDQRRETQEQQAKNQKRNERLRKDAAAILGIADERVRLADIQKLILWEELSFDIADRRCPYSGVQLSAAMVLSEQVEIEHILPFSMTLDDSLNNKTVAMRLVNRLKGNRTPWDAREAFAGQGWDYDGILMRAERMPRAKRQRFAPDGLEKWLKEDKDFLARALNDTRHLSRVAREYLSLVCPASTRVIPGQMTAMLRAKFGLNDILGLNGEKNRNDHRHHAVDACVVAVTDQGLLQRFAQASADARGKGLDRLVETMPDPWDSYREHVQRAVNSIWVSHKPDHGFEGAMHEDTTYRPPHLDPKNMWRTRGIGGGKPNEKEADSKAMVGFTGPEHLQRHHRDKAGQQLPYKGYVASPKFCMDIVRNDKGRWEGEVVSTFEAYRLVSEFGRDAALAHIQSKSRSISGKPLVMRLQGGDMVRFDDDEGRPVVLRVVNMTGNGQIFFAPHNEANGDARNRDKQDQFVYLSKYAGSLQKARGRRVTVSPAGELRDPGFKE

SEQ ID NO: 6143 - protein, 1029 aa, synthetic construct
  REGION 1..1029: note = Synthetic
MRSLRYRLALDLGSTSLGWALFRLDACNRPTAVIKAGVRIFSDGRNPKDGSSLAVTRRAARAMRRRRDRLLKRKTRMQAKLVEHGFFPADAGKRKALEQLNPYALRAKGLQEALLPGEFARALFHINQRRGFKSNRKTDKKDNDSGALKKAIGQLRQQMAEQGSRTVGEYLWTRLQQGQGVRARYREKPYTTEEGKKRIDKSYDLYIDRAMIEQEFDALWAAQAAFNPTLFHEAARADLKDTLLHQRPLRPVKPGRCTLLPEEERAPLALPSTQRFRIHQEVNHLRLLDENLREVALTLAQRDAVVTALETKAKLSFEQIRKLLKLSGSVQFNLEDAKRTELKGNATSAALARKELFGAAWSGFDEALQDEIVWQLVTEEGEGALIAWLQTHTGVDEARAQAIVDVSLPEGYGNLSRKALARIVPALRAAVITYDKAVQAAGFDHHSQLGFEYDASEVEDLVHPETGEIRSVFKQLPYYGKALQRHVAFGSGKPEDPDEKRYGKIANPTVHIGLNQVRMVVNALIRRYGRPTEVVIELARDLKQSREQKVEAQRRQADNQRRNARIRRSIAEVLGIGEERVRGSDIQKWICWEELSFDAADRRCPYSGVQISAAMLLSDEVEVEHILPFSKTLDDSLNNRTVAMRQANRIKRNRTPWDARAEFEAQGWSYEDILQRAERMPLRKRYRFAPDGYERWLGDDKDFLARALNDTRYLSRVAAEYLRLVCPGTRVIPGQLTALLRGKFGLNDVLGLDGEKNRNDHRHHAVDACVIGVTDQGLMQRFATASAQARGDGLTRLVDGMPMPWPTYRDHVERAVRHIWVSHRPDHGFEGAMMEETSYGIRKDGSIKQRRKADGSAGREISNLIRIHEATQPLRHGVSADGQPLAYKGYVGGSNYCIEITVNDKGKWEGEVISTFRAYGIVRAGGMGRLRNPHEGQNGRKLIMRLVIGDSVRLEVDGAERTMRIVKISGSNGQIFMAPIHEANVDARNTDKQDAFTYTSKYAGSLQKAKTRRVTISPIGEVRDPGFKG

SEQ ID NO: 6144 - protein, 1026 aa, synthetic construct
  REGION 1..1026: note = Synthetic
MGTMRYRLALDLGSTSLGWSMVRLKEEEPVAVIKAGVRIFSDGRNPKDGSSLAVTRRMARAMRRRRDRLLKRKNRMMATLLHHGFFPAEPAERRALERLNPYELRAKGLDAQLTPAEFARALFHINQRRGFKSNRKTDKKDNDSGALKTAIGALRQQLEASGADGKARTVGELLWRRMKDGSGVRARYRERRVEKEDGKTRIDKSYDLYIDRAMIEAEFDALWASQTRFNTAQFNEAARSALKDCLLHQRPLKPVKPGRCTLLPDQERAPLALPSQQRFRIYQEVNHLRILGANLADTPLTRVQRDAVVDALERNGKRSFKQIVALLKLPGDTQFNLDDAKRQELKGNATSALLGKKDFFGPAWFDFRAERQDAIVMRLLTEESEAALVDWLQTEFKLDEAHAQTIANASLPEGYGSLSAQALVRILPALQSDVITYDKAVLLAGFDHHSHISHAATTGEILPQLPYYGEYLERHVGFGSGDLNDPPEKRFGKISNPTVHIGLNQTRTVVNGLIKRYGHPSEVIVEVARDLKQSQEQRKEEHQRQADNQKRNDRLRADAAAILHIAPERVRHTDIQKLILWEELSRDIADRRCPYSGVQISAAMVLSDEVEIEHILPFSVTLDDSLNNKTVAMRRANRVKGNRTPFEARADFEQQGWNYDAILARAEHMPRNKRYRFAEDGHQKWLREDQDFLARALNDTRHLSRVAREYLSLICPQATRVIPGQMTAMLRAKFGLNDILGLSGEKNRNDHRHHAVDACVIAVTDQGLLQRFAQASASARERQLDRLVENMPLPWESYREHVARAIGNIWVSHKPDHGHEAGFADETTYRPPHLDPQGRWRTRGIGGNNPNERAADAPMIAISGPPRADSRHLANENGQPLPYKGYVGGSNYCIEITRTDKGKWEGNVIPTFDAYRICSTKGPTQLRHPMRGQNGAPLIMRLVAGDSVAVEKNGCRIVFRVVKMRAGRNQITLVGVTEANHADRMSAKDAGLIQLQDQSATALSKLRARRVTISPIGELRDPGFEE

SEQ ID NO: 6145 - protein, 1025 aa, synthetic construct
  REGION 1..1025: note = Synthetic
MGGYMPQLMRYRLALDIGSTSIGWAMIRLSMQNEPIAIIRMGVRIFSDGRNPKDGSSLAVTRRVARQMRRRRDRLLKRKTRLLNALVQKKFFPEDADARKALVVLNPYELRKEGLYRQLSGPEFGRALFHISQRRGFLSNRKTDKKDNDSSVLKKAIVDLRQQLEVENCQTIGEWLFKQQQSGKSVRARLRGKTQKDKAYDFYIDRAMIAHEFDTLWVSQAKYDPLLFNEDARAILRDILLYQRPLKPVKPGRCTLIPDESRAPLALPLTQQARIYQELNHLRITTPALGAQALTVAQRNTIAALLEKSDVTFVKIAKALGLTSTTEFNLQDIKRDRLKGNATAIILARNQYFGRRWHDFNADLQNLIVDKLVNEGSETALIEWLKANTDVDESAAERVSGVTLPEGYGSLSVAALRRLLPALKEDVVVYSEAVKRAGFDSHSALSLIEQTGELYQELPYYGEVLQRHVGFGSGDPNDSPERRFGKIANPTVHIGLNELRKIINALIKRYGNPAEVVVELARDLKLSREKRKEIQEEQKQRQDRNEKRIKDACEILGIDPLVIDRGKRREISQKMQLWDELNPKDAANRRCPYTGDQISIEKLLSAEVEIEHILPFSKTLDDSLNNKTVAMRRANRDKGNRTPYEAFGESLNPDYDYDAILQRASLMPREKRKRFASDGYQQWLRDDKDFLSRALNDTAYLSRIAKEYLTLICPPNSVRAIPGRMTAQLRAMFGLNRLLSEGGIKNREDHRHHAIDAAVIGVTDQGLLQKFSRASARTRELQLSRLVDDMPLPWDTYREHVTRALEHLVVSHKPDHGYQGKMHEDTAWGLRDNGQVTRRVRSEDGGPRQRLLENKNVVKINSTRDFSRHGIDEQGQVNAYKGYVGGSNYCIEIWIDEKGKWNSDVVSTFQAYQIVRELGEKAAWQKLRNPLLSLSAKPLVMRLIIDDVVKMQIAGQNKIMRVVKIAQNGQIFFAEHNEANVDARDKDKNNPFKYISKTAGSLQKAGGIHMAISPIGDARPVRYGR

SEQ ID NO: 6146 - protein, 1024 aa, synthetic construct
  REGION 1..1024: note = Synthetic
MLDSKMPYRLALDLGSSSLGWALIRLNAENKPSAIIKAGVRIFPDGRNPKDGSSLAVTRREARAMRRRRDRLLKRKARMITVLTELGFFPSDSLERKALESLNPYRLRAEGLDRELQPDEFARALFHLNQRRGFKSNRKTDKKDNDSGAMKQALSKLRQNLDESSCRTVGEWLFQRQCAGQSLRARYRETRQIHEDGRTRVEKSYDLYIDRTMIEAEFDTLWRSQAARNPSRYTDEARRRLKDVLLFQRPLKPVRPGRCTLLPDEERAPLALPSTQRVRIYQELNNLRVLGDSLQEYALTLQQRDQLAAALDHRPKMSFDQIRRLLRLDGQTKFNLEDIKRQEIRGNATAALLSKSDFFGEQWHSFNSSLQDEIVQHLIADEEEQALIDWLIANTGIDEACAQRLADVSLPQGYGSLGRTALARILPALRQSVLPFSAAVQAAGFEHHSALDHVQKTGEILLELPYYGEYLTRHVGFGTGNPDDVLEKRYGRIANPTVHIGLNQTRVVVNALLKRYGPPQEIIVEVARELKQSREDRLAEQKRQAENQRRNQRLREEVAAILEIEEHAVKTADIQKMILWEELSPDPADRRCPYSGEQISKHRLLSEEVEIEHILPFSETLDDSLNNKTVAMRMANRVKGNRSPWQAFGEHPIAGFDYQEILARAERMPKGKRYRFAPDGYQRWLKDDAGFLARALNDTRYLSRIAREYLRLICPQGTRVIPGQMTALLRAKFGLNDVLGLHGEKNRNDHRHHAVDACVIGVTDQGMLKKFSEAARSAREKQLDRLVEHMPLPWPTYREHVKRAINAIWVSHRPDHNYQGPMHNDTAYGLLGDGRVVHHKWLDGKRERVEKSLKVIEFKNPDVRNRSGQPRHGVTENGSPRPYKGYDGNSNYCIEIVRVENGRWQGEVISTYTAYQTVKAQGEKRLRDPKLSLSGQPLIMRLMIDDAVRLEIDDHIRTMRVAKISANGQIFMCDLHEANVDKRNRDKNELFAYVSKTAGSLHAARGRRVTISPSGELHDPGFAD

SEQ ID NO: 6147 - protein, 1024 aa, synthetic construct
  REGION 1..1024: note = Synthetic
MGDEMYYRLALDVGSNSLGWAVIRLKFDEETQKYFPMAIVRAGSRVFPDGRHPKTGVSNAVERRMARGQRRRRDRYLRRRSSMLRQLVRYGFFPDSIEECKALVKLDPYEIRARGLDEELKPEEFGRALFHINQRRGFKSNRKTDAKDNEHGIMKQAITDFKEQLQDEGVRTVGEMLYKRLQNGLPARARLRTQVIPQANGRNRNVKSYDLYIDRGMMEEEFEQLWESQKRFNPEFYNDEKKEKLWFTVFHQRPLRPISPGRCTFFPDEERAAVALPIAQKFKLLQEVNHLRYVGEKGQAIPLTLEQRNLVLNELVRSRKCTFTQLRKKLNFPGYVRFTIEDSRRTELPGDLVSAELSKKTLFGSRWFGFDPSFQTQIVKQLLEEENEKELISWLVKNTRVDEVVASKIIHATLPSGYINLSEKALSKIVPVLEDEVITYDKAVKLTSIGSHSEISKYHDGEIMEYLPYYGEVLHRHVGFGTNNVDDSDEVRYGKINNPTVHIGLNQIRVVINALIREYGHPKQVIVELARDLKLSAKAKERIKKEQTVNQQKNKERREKISHLLPKTAEEVTRDDLQKYILWEELSPNPLERCCPYTGEPIPCHKIFSSDVEVEHILPFSMTLDDSINNKTLSYVHANRAKGNRTPYQAFGKNDIEGYDYQAILARTEVMSKQKSYRFAIDGYERWLREHDGFLARALNDTAYMSRLAKEYVSVICPRNTTVVPGQLTGVLRRHLGLNNILGVDGEKNRNDHRHHAVDACVIGITDRALLKRFADANKFEEHGARSRLLQRVEDPWPTYREQVKRAVHNIWVSHKPDHGHQGQMHNETAFGQVSKGRFRYHKSEDGKRTPMFRENPDAMISITSTKAKKRHGTLPDGTPKPYKYYLKDSNYCIEIYREDNGKWSGNIVSTFEAYQIVKKQGLETLRNPKWAQNGKPLVMRLMRDDMVRLEHNDRLLVVRLCKINSSGQMFFAEHFESNVAARSVGVDKDFDYISKTPNSLKSSEGRIVTISPTGRLHDPGFRE

SEQ ID NO: 6148 - protein, 1022 aa, synthetic construct
  REGION 1..1022: note = Synthetic
MPFRYRLALDLGPTSLGWAVFRINAENKPIALVLSGVRIFSDGRNPKDGTSLAVTRRLARAMRRRRDRLLKRKSKLIAALIKHGFFPADEKERKALEVLDPYRLRAEGLNRALAAHEFGRALFHLNQRRGFKSNRKTDKRETDSSVMKSTISSVRNALEEGGFCTVGEWLYQRSRQGQKVRARFNAQRITTDAGKTKIEKSYDLYIDRAMVEHEFDVLWARQAKLNPELFHEQARAELRDILLFQRRLRPVDPGRCTFYTKEARAPLALPSVQRFRFYQELNNLRWLDDSLVERPLTLAQRDAMAAALETSVKKTFQQLRAIAGLGSGATFSIEDLKRQEFKGNTTSCILSKKQHFGSRWGRFDEALQDEIVMRLLMEENESALIAWLQEHTGVDEAQAEAIANVALPEGYGRLSLKAIRKILSALQEDVRTYDKAVLAAGIDHHSDLGARATGEILPELPYYGKALERHVGFGTGNPEDPEERRFGRISNPTVHVGLNQVRAVVNELIRRYGHPAQVVIELARDLKQTWEQKRETEREQAANQQRNTLYRREIADVLGIGEEQVKRELIEKRILWEELSFDPVKRCCPYSGEQIGLKMLFSDEVEIEHILPFAKTLDDSLNNKTVALRRANRLKGDCAPWEAFGRQEVAGFKYDDILQRAQAMPQRKRYRFAQDSMEQWLKNDKSFLDRALNDTRYLSRLAKEYLEWICPRATWVVPGQLTSMLRRIFGLNNPDILGWRGQKNREDHRHHAIDACVIGVTDRWLLQIMSDTSARARDQLHGRLLKNMPMPWPTYRDHVKRAVSHIWVSHKPDHSYEKAMHNDTAYGLLPGGYVRVRKEVDGVRVRTTEKLAVIPISSAKAGPRHGFLPDGSPKPYKGYKGDSNYCIEIVRDEASGKWVGEVISTYQAYQVIREHGRVNGWNRLRHPGCGLSGRSLVMRLMINDIVRLEDNGELKTWRVAKISGNGQIYFADIHEANVDARNRDKNDSFSYVSKMAGSLNKAKARRVTISPAGRLADPGYIP

SEQ ID NO: 6149 - protein, 1021 aa, synthetic construct
  REGION 1..1021: note = Synthetic
MLWKMQYRLALDLGASSLGWVMFRLNKDGNPCAIIKAGVRIFPDGRNPKDGASLAVTRRDARSMRRRRDRLLKRKARMMTALISLGFFPQDKDQRLELTKLNPYELRAQGLDTALSGEEFARALFHINQRRGFLSNRKTDKKDNDSGALKRAIKELREKLKEENCRTLGEWLAKRSKNGESVRARLQGKTQKDKKYDFYADRAMIEHEFDTLWSAQEKFNPALFTEAARLELKDILLHQRPLKPVVPGRCTLIPEEPRAPLALPSTQRFRIYQELNHLRILTEGLQEQNLTMAQRNTLANLMETKSDLTFTAMVKALKLPGTTSFNLEDIKRDRLKGNATSVALSKPEHFGAAWHDFVPALQDDIVTQLLEEASEAKLVAWLQGHTGVDEEHAERIANASLPEGFGRLGKTALSRILPALMSDVITYDKAVVAAKFDSHSAISHAQQTGEIMEELPYYGIPLRRHVAFEKNNPRNDEERYGKIANPTVHIGLNQVRAVVNTLIREYGHPTQVIIEVARELKLSRERKLEIQREQKTKQDLNDIHVKEACRILNLEASHLDKNKRRELSQKMQLWVELNPKNIADRCCPYTGEQISIDRLLRGDVEIEHILPFKRTLDDSMANKTVSLTRANRAKGNQTPYEAFGRVQQAGYDYEAILLRAALMPTNKKKRFAIDGMEQWLDGEKDFLPRALNDTAYLSRIAKEYLTCICPHNQVWAIPGRLTGLLRGKFSLNKLLSGDDTKNREDHRHHALDACVIGITDRSTLNTFSSSSDRAWESGSKRLLDKVDEPWPGYREHVERALNNIVVSYKPEHGYQGAMHEASAWGLRKDGLVQHRVLSEDGVRRELDVRKLGVIAFSDAKANDRHGITEDGQSKPYKGYVGGSNYCMEIWADDKGRWNGDVITTFEAYQIIRQFGEKKGWEKLRDPKLTVSGKLLAMRIMSKDYLRLEIDGKLKTMVIANIKQNGQIFIAEHNEANVDARNRDKENSFSYISKMPGSLQKAKGRRCTVSETGKLRDPGFRG

SEQ ID NO: 6150 - protein, 1019 aa, synthetic construct
  REGION 1..1019: note = Synthetic
MLPKLRYRLALDLGTSSIGWCLLKINPDYQPQAIIKMGVRIFSDGRNPKDGSSLAVTRREARQMRRRRDRLLKRKARLIDSLIKHGFFPKSPEERHASVTLDPYLLRRKGLYETLSASEFARALFHLNQRRGFLSNRKTDKKDNDSGALKQAIIKLRKKLEEEQCQTLGEWLAKRHEQGLSVRARLRGKTQKDKAYDFYADRAMIEHEFDTLWEKQRVFNAMLFNEAARLELKDVLLFQRNLKPVRPGRCTLIPEEERAPLALPSTQLFRIYQEVNNLRILSEQLAEAELSKGQRDQIVSLLNLKSRVTFKGISKALKLSSGSSFNLEDVKREFLKGNSTTAILSKDDLFGDSWHELNLLEQDTIVSRLLNDPSEQKVIAWLMNKFTLDESTAERIANASLPEGYGSLSKAALDKILPQLMGEVVTYDKAVVAAGFDSHSALSHSQSTGEIMESLPYYGDPLRRHVAFAKDNPRNNEERFGKIANPTVHIGLNELRKVVNALIKRYGHPSEVIVEVTRDLKLSREKKKEIERDQKDRQDFNEKLVIEACGVLNLNPDNLDRSKRRELSQKMQLWYELNPHDVTNRCCPYTGEQLNISKLLSSEVEIEHILPYSRTLDDSLNNKTVCISRANRIKGNDTPYEAFGAKTEPGYDYESIVHRASLMSKNKGKRFTEDGYQRWLKEDKDFLARALNDTAYLSKIAKEYLSLICPPNRVRAIPGRMTALLRGTFGLNQLLSSDSSKNRDDHRHHALDAAVIGVTDQGLLQRFSQASANARSMQLDRLVENMPLPWDTYREHVERGLSNIVVSHKPDHGYRGAMHEETAWGLRSDGVATRRIHEEGSDHRIREFANKKLVEISSTKNPDRHGLDSNGEPAPYKGYVGGSNYCLEICRDETGKWHGDVISTYEAYQVIRKLGEAEGAKKLSHSTLSQTDKPLVMRLMMNDYLRIKIDGISKIMRVVKIAGNGQISLALHREANVDARNRDKLNTFSYISKMAGSLKTAEGYKITVSPIGEVSSQFR

SEQ ID NO: 6151 - protein, 1019 aa, synthetic construct
  REGION 1..1019: note = Synthetic
MMKYRLGLDLGSTSIGWAVLRLNEIEVGKYEPAAIIRTGVRIFSDGRNPKDGSSLAVTRRVARAARRRRDRLLRRKESMLRQLVALGFFPADEEARQRLVDLNPYHLRAKGLDEALTPNEFGRALFHINQRRGFKSNRKTDKSDADGSVMKKAIADLKAKLDELGVRTVGEYLYQRMQKGQPTRARLRQFTVQQDNGRNKIEKSYDLYIDRGMVEYEFEQLWSVQEKFNPELYNATAKECLKHILLYQRPLKPVDPGRCSFLPQQKRAAKALPIAQHARIYQFANHLRYLDANNQEVPLTLSQRNIVASELLKSSKRTFDQLRKALDFSGTAKFNIEDAKTKDVQGDRTAGILSGKKYFGNQWFKFDAELQNQIVEKLLYEENEAELIDWLVAHTGVTSEDAEVISAAPLPDGYGSLSVMALQRILPELKKDVISYDKAVVNAGFESHSALATYHDGEIYPELPYYGTVLARHIGFGTNNPDDTDEQRYGRINNPTVHIGLNQLRQVVNGLIKEYGHPTQIVIELARDLKLGVDERNRIKKEQAENQKNNERRRQEIAAIIGKTAEQVTRLDLQKMILWEELAESPQDRCCPYTGRHISATMLFSAEVEIEHILPFSRTLDDSLNNKTVAMAWANRAKGNATPFEAFAGQQIEGIHYADILNRTGRMKKEKRYRFAEGAYEKWLREDKDFLARALNDTRYFSRIAKEYISVICPKHTWAIPGQLTALLRTQLGLNAILDEIEEKKNRHDHRHHAVDACVIAMTDRGMLQRFATENARTQGKQYSRLIQRIEPPWPTFREQVRRAVSAIWVSYKPDHSHEGAMHNDTAYGLLGDGKMHHHKVVDGRRTEVIEALNVIPMTCEKANKRHGMNADGSPKAYKGYKGDSNYCMEIFLNEKGKWQSDVISTYDAYQIVRKQGLEQLRHKTLAQNGKPLVMRLMRNDLIKMEHSDLLGLYRVCALSTNGVITLAPHNESNVDARNRDKDDPFSYTFKTAGSLQKAKARLTTVSATGRLKDPGFKE

SEQ ID NO: 6152 - protein, 1018 aa, synthetic construct
  REGION 1..1018: note = Synthetic
MRYRLALDVGSTSIGWCLIRLNADDEPIAIIRMGVRIFSDGRNPKDGSSLAVTRRNARQMRRRRDRLLKRKERMLSALTRLGFFPLDEAKRRELVSLDPYALRKKGLYEALSGPEFARALFHINQRRGFLSNRKTDRKDSESGALKKAIKGLRGKLAEEGCRTLGEWLARRHEQRLSVRARLRGKTQKEKAYDFYADRAMIEHEFDALWDRQEALNPVLFNPAARDELKDILLHQRRLRPVRPGRCTLLPEEERAPLALPSTQRFRIYQEVNNLRVLSPADMCEKPLTLDQRNRVVELLERQGEVRFTRILKELNLSGATKFNLEDIKRDRLKGNSTSAVLAKENCFGERWYGFDGAVQDEIVDRLLNDASKSALVNWLQERTGVDEACAETIANVSLPEGYGNLSRKALSRILPELAADVTVYSDAVVRAGFDSHSALSSAEQTGEILGELPYYGIPLRRHVAFAKDHPRNDEERYGKIANPTVHIGLNELRKVVNALIRRYGHPSEVIVEVARELKLGRERKLEIQREQKERQDLNDKQVAEACAVLGWTPANLDRAKRRELSQKMQLWVELNPKNVADRQCPYTGEQIGIERLLSSEVEIEHILPYSATLDDSMNNKTVSLRRANRDKGNRTPYEAFGVQPIPGYDYQAILLRASNMPREKAKRFAPDGYQRWLKEDKDFLARALNDTAYLSRIAKEYLSLICPPNKVRVIPGRMTALLRGKFGLNQLLSGSEVKNRDDHRHHALDAAVIGVTDQGLLQRFAKASASARERQLDRLVEEMPLPWPSYREHAERALGGIVISHKPDHGYQGAMHEETAWGLCGDGVASRRVRLEDGGPRQREFRNKNLVEIDSTRDPNRHGMDEHGRPRHYKGYVGGSNYCIEIWRGEKGKWDGDVVSTFQAYQLIRQWGEIEGARRLRDLSFSQSGRPLVMRLMIDDLVRLQVDGKERTMRVAVISGNGQIFMCDHHEANVDARNRDKQNPFAYISKLPGSLQKAKGRRVTVSEIGELRDPGFKG

SEQ ID NO: 6153 - protein, 1014 aa, synthetic construct
  REGION 1..1014: note = Synthetic
MNKMRYRLALDLGSTSLGWAMVRLNAENQPCAIIKSGVRIFSDGRNPKDGSSLAVTRREARAMRRRRDRLLKRKARMMKTLIAHGFFPQDEEDRKLLERSDPFALRAKGLDQALRPDEFARALFHINQRRGFKSNRKTDKKENDSGALKTAISQLRQAMQATQCRTVGEWLNMRHQSGLSVRARYRQHMVQREDGKTKTEMRYDLYIDRAMIEGEFDALWQKQSELNPNLFTETARAELKDCLLHQRPLKPVKPGRCTLMPEEERAPLALPSQQRFRIYQEVNNLRLLKEGLNEEALSLDQRNQIVQALEGNTKRTFTQIKKLIGFSGDFNLEDEKRAELKGNSTSAMLCKKDLFGPAWFDLSEDQQDSIVMQLVKEENEATLVRWLQDNTGIDEANAERVANTNLAEGYGSLCAKALQKILPALKVEVITYDKAVLAAGFDHHSNISHASTGEILPSLPYYGEYLQRHVGFGTGKPEDTPEKRYGKIANPTVHIGLNQIRTVVNALIKRYGHPSEVIIELARDLKQSQEQRKEEQQRQATNQKRNQRMREDIAALLHISADRVKTADLQKMILWEELSFNVADRRCPYSGVQISAQMLFSDQVEIEHILPFSETLDDSLSNKTVAMRQANRIKGNRTPWQAKDDFAKQGWATEDMLGRAELMPRNKRYRFSETGYAQWLRDDKGFLARALNDTRHFSRVAKEYMSLICPQNTRAVPGQLTAMLRGKFGLNNILGLDGEKNRNDHRHHAVDACVIAVTDQGMLQRFAQASANARQQQLGKLVDNMPMPWPTYREHVQRAVENIWVSHKPDHGHEGAMHNDTAYGLGANGKVRVHKMVEGVRTLEESSLKVIAFSEPKASARHGVLPTGDAKPYKGYKGDSNYCIEIVRNEKGKWEGEVVSTFEAYQIVRKHGFSKLRHPTISVSNKPLVMRLLIDDIVKLNTSDNDYVGRIATISGNGQIFMAPHNEANVDARNRSKEDAFSYISKMAGSLQKAHGRRVTISPIGELKDLGFQG

SEQ ID NO: 6154 - protein, 1013 aa, synthetic construct
  REGION 1..1013: note = Synthetic
MLGKMIYRLSLDLGSTSLGWAMIRLNAQNLPCAIIKAGVRIFSNGRNPKDGSSLAVTRREARAMRRRRDRLLKRKARMMRSLIEHGFFPSDEEQRKALETLNPYHLRGTGLDEELTPGEFGRALFHINQRRGFKSNRKTDKKDNDSGALKTAISKLRTAMVEENCRTVGEWLYKRDAAGKTVRARYREAKVTKDDGKTRLDKSYDLYIDRAMIEAEFDALWKKQAEFKPHLYTEAAYQDLKDVLLHQRPLKPVKPGRCTFLPDEERAPLALPSTQRFRIYQEVNNLRILREYMREEALTLTQRDALVKALEENSKRTFTQIKNLPGIGNVNFNFEDPKRQELKGNITTVKMSSNECFGKDWFSFSEEKQDAIVLQLITEENLAKLIRWLIEETGIGEERAESIANTALPEGYGSLSIKALARILPELRRDVVTYDKAVIAAGFEHHSNISLSASGEIFPELPYYGQALQRHVGFGTGKADDTDERRYGRIANPTVHIGLNQIRLVVNALIKQYGHPREVIVEVARDLKQSKEQRDNESKRQAENQKRNSQIKTEIAGILNISEERVRHADIQKMILWKELSFDPADRHCPYSGARINAHTLLSDEVEVEHILPFSLTLDDSLNNKTVAMRQANRLKGNRTPWDAFGQNQIAGFEYDNILGRAEQMPKAKRYRFAKDGYERWLKDDAGFLARALNDTRYMSRIAREYVQLICPDTRVIPGQMTAMLRKKFGLNNVLGLNGEKNRNDHRHHAVDACVIAVTDQGLLQRFAQASASARERQLNRLVEDMPLPWPSYYDHVVRAVNNIWVSHKPDHSHEGAMHNDTAYSLLSNGKVSVHKFIDGKRTKIEESLKVIPFTSVKALDRHGVLENGEPRPYKGYKGDSNYCIEIVRNEKGKWESEVISTFFAYQIVRSGGVKKLRNPEISLSGQPLVMRLMIDDNVIIENGSGKQILRVAKLQGDGRTWLIEHREANVRKRVDSGEIKYLGAPASTLRKLHARRITISPIGTLRDPGFKE

SEQ ID NO: 6155 - protein, 1012 aa, synthetic construct
  REGION 1..1012: note = Synthetic
MANMRYRLALDLGSTSLGWAMVRLDAQNETCAVIKAGVRIFSDGRNPKDGSSLAVSRREARAMRRRRDRLLKRKTRMMATLMKHGFFPQDEAARQALVNKEPFALRAKGLDHALLPEEFARALFHINQRRGFKSNRKTDKKETDSSALKKAIGQLREAMQASGCRTVGEWLCARHQQGLSVRARYRENRITKDDGKTKIEKSYDLYIDRAMIEAEFDALWAKQSELNPELFHETARAELKDCLLHQRPLKPVKPGRCTLLPDEERAPLALPSQQRFRIYQEVNNLRLLREGLNEEPLTLTQRDQLIQALETNPKRSFTQIQKLLGFSGQFNLQDDKRTELKGNSTSAMLSKKEFFGSQWLSFDETHQDEIVMQLVSEENEARLIAWLQAETGVDEITAERIANTPLAEGYGSLSAKALEKILPALRADVITYDKAVLAAGFDHHSHISHAATGEILPDLPYYGQYLQRHVGFGTGKPEDPAEKRYGKIANPTVHIGLNQVRTVVNALIKRYGHPSEVVVELARDLKQSQEQRKEEQAQQAKNQRRNERMRQDIAGLLNTSTERVRALDLQKMILWEELSFNVADRRCPYSGVQISAQMLFSDQVEIEHILPFSQTLDDSLNNKTVAMRQANRIKGNRTPAEAAADFAAQGWPVEDMLHRASLMPKGKRYRFAQDGMAQWLREDKGFLARALNDTRHLSRVAREYLSLVCPQGTRVIPGRMTAMLRAKFGLNDILGLNGEKNRNDHRHHAVDACVIAVTDQSMLQKFAKASASAREKQLNKLVESMPLPWDSYRDHVQRAVERIWVSHKPDHGHEGAMHNDTAYGLLGGGHVQVRKRMDGVRTRETAALKVIEFADRQAHPRHGLLPNGEPMPYKGYKGDSNYCMEIVRNDKGKWEGEVVSTFEAYQLVRQHGLARLRHPALSVSGRPLVMRLLRNDTLRVIHNGEQRTVRICKMTAEGVIALADTTESNVDARTRTKDLSYIFKTAGSLQKSKGRRVAISPSGEMKDPGFFD

SEQ ID NO: 6156 - protein, 1047 aa, synthetic construct
  REGION 1..1047: note = Synthetic
MDLQKIEHSFMSKQNYLMRYRLAIDLGTTSLGWSILHLNQQDAPTAIIKAGVRIFSDGRNPKDGSSLAVTRRAARAMRRRRDRLLKRKARMLNMLIKHGFFPQDAAARKALESLNPYQLRAKGLDKALTPGEFARALFHINQRRGFKSNRKTDKKDNEGGALKTAINQLRQQLQDENARTVGEWLWRRLQAGQGTRARYHETRFTTEEGKNKIDKSYDLYVDRQMVADEFDALWAAQAAFNPSLFHEQARAELRDTLLHQRPLRPVKPGRCTLLPEEERAPLALPSTQRFRILQEVNHLRILHPDLHEEPLTLAQRDAIVNMLESKTKVTFAAMRKKLKLGDSVQFNLENAKRAELKGNATTAVLSKKEFFGTAWQNFDETLQDEIVLRLVTEESEAALVQWLIENTGVDEDRATAIASTSLPEGYGSLSRKALARIVPALRAEVITYDKAVQAAGFAHHSDLGFDFEHGDDEVEQIGERVIASTGEIKPVLAFKQLPYYGKALQRHVAFGSGNPKDPEEKRYGKIANPTVHIGLNQVCKVVNALMSRYGRPTEIVVELARDLKQSREQKQETQRKQAENQKRNARIRQEIASLLGCSEERVKHADIQKWILWEELSFDVADRRCPYSGVQISAAMLLSDQVEIEHILPFSQTLDDSLNNKTVSMRQANRIKGNRAPWQAREDFETQGWAYDSILLRADRMPKAKRYRFAPDGYERWLKEDKDFLARALNDTRYLSRIAKAYMQLVCPQGTRVIPGQMTALLRAKFGLNDILGLDGEKNRNDHRHHAVDACVIGVTDQGMLQRFVQASAAARQQGLQKLVDDMPLPWPTYRTHVERAVQNIWVSHKPDHGHEGGMMEDTAHGISKEGAIRPSRLSKKDEVKNLIPISDPTQPKRHGVDADGQPLPYKGYIGGSNYCIEITRNDKGKWEGEVISTFRAYQIVRKHGVARLRHPGLAQNEKTLVMRLMIDDSVRLELDGQKETMRVVNIGSNGQVFMAPVHEANVDARNRDKANPFSYTSKYAGSLQKAKARRVTISPIGELRDHGFKN

SEQ ID NO: 6157 - protein, 1002 aa, synthetic construct
  REGION 1..1002: note = Synthetic
MKMQDSVSKMKYRLGIDLGTTSLGWAMLRLDEQNEPYAVIRTGVRIFNNGRDPKTEASLAVARRLARQQRRTRDRKIRRKERLIGELVAMGFFPKDPDKRRQLASLDPFELRTEALDRALSPEEFARALFHLAKRRGFKSNRKTDFGDTESGKMKEAIKRTLNELQNKGFRTVGEWLNMRHQQRLGTRSRIKNVPTGAGKQTTAYDFYLNRFMIEHEFDCIWEKQSQMNPSFFTNERKAILKDIIFYQRPLRPVEPGRCTLMPDNPRAPLALPQQQDFRIYQEVNNLRKIDPTTLLEVNLTLHERDQIVELLQRKPALTFDAVRKTLCFNGTFNLEGENRSELKGNLTNCALANKKLFGESWYSFDAHKRFEIVEHLLQEESEEKLVSWLQRECNLSEESAKNTASVRLPAGYGALCREALDLILPYLKAEVITYDKAVLKAGTNHSELALANETGEILPELPYYGQYLKRHVGFGTGKPEDSVEKRYGKIPNPTVHIALNQLRTVVNALIRRYGKPTQIVIELARELKQNKKAKDQYRIEMNHNQIRNKRIRTDISKVLGINPENVKRKDIEKQILWEELNLKDATARCCPYSGKQISAEMLFTDEVEIDHILPFSRTLDDSKNNKVVCIREANRIKGNRTPWEAREDFEKRGWSIEAMTARAQAMPKAKRFRFAEDGYKVWLKDFDGFEARALTDTQYMSRVAREYLQLICPSQTWSVPGQLTGMLRRFLGLNDILGVNGEKNRDDHRHHAVDACVIALTDRSMLQRISTASARAENKHLTRLLESFPPPWATFYEHVTRAVKSICVSHKPEHAYQGAMNEQTAYGLRPDGYVKYRQNGKVEHKKLNVIPQVSVKGTWRHGLNSDGSLKAYKGLKGGSNFCIEIVMGEGGHWEGDVITTYEAYQIVRAKGEAALYGSVSRSGKPLVMRLMQKDVVEMTLEDGRCKMLLYKISQNKQMFFYRIENAGGGKEDVSKKPGSLQKALAKKVIISPIGDFRRERL

SEQ ID NO: 6158 - protein, 875 aa, synthetic construct
  REGION 1..875: note = Synthetic
MLHKMRYRLALDLGSTSLGWAMVRLNANQQPCAVIQAGVRIFSNGRNPKDGSSLAVTRREARSMRRRRDRLLKRKARMMRTLIEYGFFPADETQRKALENLNPYALRAKGLDEALIPSEFARALFHINQRRGFKSNRKTDKKDSDSGALKTAIKQLHSVLDPQGNDGKPRTVGELLYKRFTDLSKLPKDRTVRARYRQDKTVKDDGKTKIDKYYDLYIDRAMIEQEFDALWKKQSELNPILFTENARADLKDVLLYQRSLKPVKPGRCTFMPEEERAPLALPSTQRFRMYQEVNNLRILREGLKEESLTLQQRDDLINLLEKNNRRTFTQIKKLLGVGGSVQFNFEDPKREELKGNTTSAILGKSEHFGEAWFAFNEAKQDAIVLQLIKEENEAKLVRWLQDETGIDEKRAEVIANTGLPEGYGSLCIEALARILPELRRDVMTYDKAVQVAGFEHHSKLNRNEEIPDITFKIESIDRNSGEIKEFHLHKELPYYGEYLQRHVGFGSGKPEDSIEKRYGKIANPTVHIGLNQVRVVVNALIKRYGHPSEIIVEVARDLKQSKDRRDEENKRQAENQKRNERLRKDIADILGISEERVRRDDIEKMILWEELSFDPADRRCPYSGVQVSTVMLLSDEVEVEHILPFSQTLDDSLNNKTVALRQANRIKGNRTPWEAFGISDILGFDYAGILTRAELMPKAKRYRFAEDGYQRWLKDDAGFLARALNDTRHLSKIAREYMSLICPNTRVIPGQMTAMLRRNFGLNDVLGLNGEKNRNDHRHHAVDACVIAVTDQGLLQRFAAASASARERQLNRLVENMPLPWESYREHVQRAIDGIWVSHRPDHSHEGAMHNDTAYGLRGNGRVSFYKVVDGARIC

SEQ ID NO: 6159 - protein, 1013 aa, synthetic construct
  REGION 1..1013: note = Synthetic
MRYRLALDLGSTSLGWAMVRLNDANEPHAIIKAGVRIFSDGRNPKDGSSLAVTRRDARAMRRRRDRLLKRKSRMMANLVEYGFFPVDPVARKEFELLDPYELRARGLNEALQPSEFARALFHINQRRGFKSNRKTDKKDNDAGALKTALKNLRAAMVSDGSRTVGEWLYKRHTSGQTVRARYRQTPVKQENGKTKIDKSYDLYIDRAMIEAEFDALWSAQTKFNSSQFTEDARLALKDCLLHQRPLKPVKPGRCTLLPDEERAPLALPSTQQFRMYQEVNNLRILGEGLSEGPLTLAQRNLLVTALEQHSKRSFTQIKRLLDLSGAAQFNFEDPKRQELKGNTTSAILSKTDYFGATWFDLSLERQDEIVGKLVNEENETLLINWLQNEFGFDERKAEKIANAALPEGYGSLCAKALVRILPELKKEVVTYDKALVAAGFEHHSNISHAATGEILPLLPYYGEYLQRHVGFGTGVPEDHPEKRYGKIANPTVHIGLNQIRVVVNALIKRYGHPSEVIVELARDLKQSQEQRKEDNKRQTENQNRNARLRQDVATALNISAERVRRDDIQKMLLWEELSHDAADRRCPYSGVQISVQMLLSDQVEIEHILPFSQTLDDGLNNKTVAMRQANRIKGNRTPWEARNDFAAQGWNHEDMLARAEKMPKNKRYRFGDDGYQRWLREDKTFLARALNDTRHLSRVAREYMSLICPQNTRVIPGQMTAMLRSKFGLNDILGLYGEKNRNDHRHHAVDACVIAVTDQSMLQRFAKASANAREQHLTRLVENMPLPWDTYRDHVARAINAIFVSHKPDHGHEGAMHNDTAYGLLSGGVVRTHKIVDGIRQREDSNLKVIEMTSNKAPKRHGLLPDGSPRPYKGYKGDSNYCMEIYRTDDGKWASDVISTFQAYQIVRHEGVARLRNPRLSLNGKHLVMRLLIGDTLRLEVNGRTETVRIQKLAGNGQIFLASHQEANVDARNRDASDTFAFVSKMVGSLRTAKGRRVTVSPIGEVKDKGFVD

SEQ ID NO: 6160 - protein, 745 aa, synthetic construct
  REGION 1..745: note = Synthetic
MAKQVRYRLSLDLGSTSLGWAIFRLDADAHPTAIIKAGVRIFSDGRNAKDGSSLAVTRRAARSMRRRRDRLLRRKTRMLDALLEYGFFPQDAAQRKALERLNPYALRAEGLARPLTPGEFARAIFHLNQRRGFKSNRKTDKNDNDSGALKTATSQLRQDIQASGCRTVGEWLWTQRLQKKPEGVPHQGVRARYRETPHINSEGKKRIEKKYDLYIDRSMIEAEFDALWSAQATFNPVVFHATAHEKLKDILLYQRPLRPVKPGRCTLLPEEERAPLALPSTQRFRIYQELNNLRLLVDQLNEQPLTLAQRDTIATLMEGRAKISFDQIRKALKLGSMTKFNLEDDKRNELKGNATGSQLAKKEFFGPAWHQFDEALQDDIVWHLLSEENESALISWLQDRTGIDAATAQAVSNASLPEGYGSLSRKALEVILPRLRSEVITYDKAVQAAGFSHHSQLGFEYDPDDVEDWIDHATGEVKPIFKRLPYYGKALQRHVAFGSGKPEDSQEKRYGKIANPTVHIGLNQVRVVANALIARYGRPTEIIIELARDLKQSREQRQQDQRRQADNQKRNARIRNSIAQALGIAEARVRREDIQKWILWEELDPGDAMHRCCPYSGVPISASMLLSEQVEIEHILPFSMTLDDSLNNRTVSLRQANRIKRNRSPWDAREDFEAQAGTTMASCSAPGSCPSRSAIVSPPTGINAGCGTTRTFSLGRSMTPGIFRASRRNTCGWYAHRVRGSSLAN

SEQ ID NO: 6161 - protein, 1022 aa, synthetic construct
  REGION 1..1022: note = Synthetic
MGKMRYRLALDLGSTSLGWAMVRLKEDQPVAVIKAGVRIFSNGREPSRPGELGTSLAATRRLKRAMRRRRDRLLKRKARMMALLIDKGFFPTDPAERKALEQLNPYELRAKGLDSPLSQAEFARALFHINQRRGFKSNRKTDKKDNDSGALKKAISALRQQLDPSGADGKARTVGELLWRRMQDGSGVRARYRERRVEKEDGKTRIDKSYDLYIDRAMIEGEFDALWASQARFDATRFNEASRVALKDCLLHQRPLKPVKPGRCTLLPDQERAPLALPSQQRFRIYQEVNHLRILGSDLTDTPLTLAQRDAVVDALERSAKRSFTQIKTLLKLPGTTTFNLEDIKRQELKGNATSALLGKKDFFGSAWVTFSPAQQDAIVMRLLTEESEAALVDWLQTEFGLDESRSETIANASLPEGYGSLSTQALSRILPALKSEVITYDKAVQVAGFEHHSHISHAATTGEILLQLPYYGQHLQRHVGFGSGDPHDPPEKRFGKIANPTVHIGLNQVRTVVNALIKRYGHPSEVIVEVARDLKQSQEQRKEQQQRQADNQQRNNRLRADAAGILRIAPERVRQADIQKLILWEELSRDIADRRCPYSGVQISAAMVLSDEVEIEHILPFSNTLDDSLNNKTVATRRANRVKGNRTPFDARADFERQGWTYDAILARAEHMPRNKRYRFGEDGYQKWLREDRDFLARALNDTRYLSRVAREYLSLICPQSTRVIPGQMTAMLRAKFGLNDVLGLDGKKNRNDHHHHAVDACVIAVTDQGLLQRFAQASACARERQLDRLVDDMPLPWPSYREHVARAIHSIWVSHKPDHGYEGAMMEETSYGIRRDGSIKQKRKADGSEGREISNLIRLAEPTQLQRHGVDRDGNPLSYKGYIGGSNYCIEITRDQSGKWIGNVISTFRAYDIVRNSGFGRLRHPNLGQSGQPLAIRLGINDVVRMDHEGREQTMRVAKVDSSGRMAFAPISEANVDARNRDKEDAFSYTYKMASTLKLSKARRVTISPIGELRDPGFKE

SEQ ID NO: 6162 - protein, 1052 aa, synthetic construct
  REGION 1..1052: note = Synthetic
MAFAGAYRLALDLGSTSLGWAMFRIHQDPIGGSVPTAIIRSGVRIFSDGRNPKDGSSLAVTRRAARAMRRRRDRLLKRKARMMEQLVRHGFFPAEVAERKALESLNPFQLRAKGLHGALTSGEFARALFHINQRRGFQSNRKTDRKDNDSGALKQAIHQLRAHITASGCATVGEWFWQVRMQQRPEGVAGQGVRARYREKPFTTEEGKKRIDKSYDLYVDRAMIAQEFDALWAAQAALQPALFTEVARADLRDTLLHQRPLRPVRPGRCTLLPEEERAPLALPSTQRFRILQEVNHLRLLDDTLREVPLMLAQRDAVVAALEAKNKLSFDQIRKLLKLSGSVQFNLQDAKRNELKGNATSAALARNDLFGAAWAGFAVELQDEIVWQIVNEEGEGTLVAWLQQHTGVDEARAEAIANVALPEGYGSLSRKALARIVPELQRDVVTYDKAVQAAGFAHHSDLGFDFDHESDEVELVGERTVPSTGEIQPVFAFKELPYYGRALQRHVAFAKDNPRNDEERYGKIANPTVHIGLNQVRVVVNALIRRYGRPAEIVVELARDLKQSREQKLETQKKQVDNQRRNARIRERIAETLGISPERVRASDIQKWILWEELSFDVADRRCPYSGVQISAVMLLSEQVEIEHILPFSQTLDDSLNNRTVAMRQANRIKRNRTPWAARADFEAQGWSYDGILQRAERMPLRKRYRFAPDGHERWLGEDKDFLARALNDTRYLSRVATSYLRLVCPQGGRVIPGQMTAMLRAKLALNDVLGLNGEKNRNDHRHHAVDACVVGVTDQGLLQRFASANAQAREGGVNRLVENMPLPWDTYRDHVERAVRHIWVSHKPDHGFEGAMMEETSYGIRKDGSIKQRRKADGSAGREITHLIRIAEPAQPTRHGVDAEGQPSPYKGYVGGSNYCIEITRSELGKWEGDVISTFDAYRIVRAAGEGDAGWGQLRHARQGQNGKPLVMRLAIGDCVRLQLRDREEVMRVVSVNSAGRLTLAAIHEANVDKRNADKTDPYSYTYKNAAPLQQAMARRVSVSPMGDLRDPGFQG

SEQ ID NO: 6163 - protein, 1062 aa, synthetic construct
  REGION 1..1062: note = Synthetic
MGGLRYRLALDLGSTSLGWAIVRLKGDEPVAFVKVGVRIFGDGRNPKDGSSLAVTRRAARAMRRHRDRLLKRKHRMMALLLKHGFFPADVAERKALELLNPYELRAKGLNEALAPAEFARALFHINQRRGFKSNRKTDKQDNDSGALKTAINTLRKAIATYPVGSDGKPLQPGNFNLLDWVNRQLPETRNDLPRTVGELLWRHIKPEKKGQPIRAGLVRARYRERHIEKEDGKTRIDKSYDLYIDRAMIETEFDALWAKQAEINPTVFTEAARAELKDCLLHQRPLKPVKPGRCTLEPDKERAPLALPSQQRFRIYQEVNNLRILREDLRDEPLTLEQRDQIVALLERPQRDKKTAHEVSFDQMRTALSLRGATKFNLEDAKRTSLKGNSTSSNLSKKNLFGPDWFNWSLARQDEIVMRLLTEESEAALVAWLQNEFGVDEAHAEGVANARLADGYGSLSAKALAKILPKLKTEVISAKEAEIKAGYKFAERTGEILSELPYYGEPESMQRHVGFGTMNHDDVPEKRYGKIANPTVHIGLNQVRVVVNALIKHYGHPSEVIIELARDLKQSREQRKEDQERQAQNQKRNERLRADTATILQIAPERVKHADIQKLILWEELSFDVAERRCPYSGVQIGARMALSDEVEIEHILPFSQTLDDSLNNKTLATRRANRVKGDRTPAQAREDFEREGWSYENILQRAERMPKNKRYRFGPDGYEKWLGEEKGFLARALNDTRHLSRVAREYLSLICPQGMRVIPGRMTAMLRAKFGLNDILGLQGEKNRNDHRHHAVDACVIAVTDQGLLQRFAQASASAREKQLDKLVDSMPLPWPTYYDHVKRAVHNIWISHKPDHGYEAGFADETTYRPPHLDPQGKWRTRGVGGSNPNERSADTAMIAISEPKLAGRHKLGLTGEVLPYKGYLGGDNYCLEITLTENGAWEGNVIPTFSAYEIVRQHGIRQLRNKSGGQNGASLVMRLVAGDCIAIEKDSQRLILRVVKMRAGRNQVTLVGVSEANHANRLKEKDSSLIWLEDKSASSLRSLRARHITISPIGELRDPGFKE

SEQ ID NO: 6164 - protein, 1044 aa, synthetic construct
  REGION 1..1044: note = Synthetic
MPKLSKPVRYRLALDLGSTSLGWAILRLSTIDDPTAIIKAGVRIFSDGRNPKDGSSLAVTRRAARAMRRRRDRLLKRKARMMTKLVEYGFFPRDDAARKELERLNPYQLRAKGLHEALTPAEFGRALFHLNQRRGFKSNRKTDQKDNDSGALKTAIKKLRETLAASDCQTVGELLWKRLQAGQGTRARYRETRYIEDGKNKIDKSYDFYIDRQMVADEFDALWAKQAALNPEQFTEAARADLRDTLLYQRKLRPVKPGRCTLLPEEERAPLALPSQQRFRILQEVNHLRLLDDRLLETSLTLAQRDAIVDLLEQSSKVSFKSIRKKLKLGDAVQFNLEDEKRTELKGNATTASLAKKDLFGSAWHDFDDALQDEIVWRLVTEESEEALVRWLCETTGVDETRAAAIANAGLPEGYGSLSRKALARIVPALRAEVITYDKAVQAAGFAHHSALGFEFSGEEVDDWIDPVSGEIKPVFKQLPYYGKALQRHVAFGSGKPEDPDEKRYGKIANPTVHIGLNQVRVVVNALIRRYGRPTEVVVELARDLKQSREQRMETHKRQAENQKRNARIRQSISDAFRSQGIFVAPDNVKHADVQRWILWEELSFDAADRRCPYSGEHISVAKLLSDAVEIEHILPFSKTLDDSLNNRTVAMRHANRVKRNRTPWDARADFEAQGWAYDGLLLRAERMPLRKRYRFAADGYERWLGEDKGFLARALNDTKYLSRIAKQYLQLVCPGSGVRVIAGQLTGMLRWHLGLNDVLGLDGEKNRNDHRHHAVDSCVIGVTDQALLQRFARASELAHDEGRGKLAKDFQPPWPTYREHVKRAVGNIWVSHRPDHGYEGGMMEETSYGIGKDGAIKQRLKADGTKGREISNLIKVSEASQPTRHGVDEQGVPLPYKGYVGGSNYCIEIMRNDKGKWEGEVISTFRAYEIVRAKGEKCLRDSTHAQATDSAGKRKPLVMRLMIGDTVRLDFGDGNVVMRIVKMSGAGQVFMAPIHEANVDARNSDKNDPFSYSSKMAGSFQKAHARRVSISPIGELNDPGFKS

SEQ ID NO: 6165 - protein, 1016 aa, synthetic construct
  REGION 1..1016: note = Synthetic
MFHKMNYRLALDLGSTSLGWCMVRLDKEGKPCAVIKAGVRIFSSGLDPEKGTSLAVARRQARGMRRRRDRLLKRKVRMMRMLIQYGFFPENEAERKALEKLNPYALRAKGLDEALAPSEFGRALFHMNQRRGFKSNRKTDDKKNDGSVIKAAISNAREAMERENCRTVGEWLLRRDEQGQTVRARYREQPVMRDGKSRKDKSYDLYIDRAMIEAEFDALWAKQAEFNPGQFTEQARQDLRGTLLYQRDLKPVDPGRCTFLPNEKRAPLALPGAQRFRMYQEVNNLRILQDDLRELPLSPSQRDAVIEALEKNNKRTFAQIRTLLKLGGASKFNLEDPKRTELKGNATSAVLGKAEYFGNSWFQLDEAKQDAIVMQLLGEENEADLIGWLQEGTGVDASHAKAIVNVSLPEGYSNLGMTALNRILTELKKNVVVYSDAVRHASFNHHSNIDASATGEIWPELPYYGLALQRHVGFGTNNPADPDEKRYGRIANPVVHIGLNQIRVVVNALIKRYGHPTEIIVELARELKQSKEKRDAQNREQATRQNKNKERRKAIADILGNSEDSVGDSDLQKWILWEELNPADCAERLCPYSGERIGADRLFSPEVEIEHILPLARTLDNSLNNKTVSMWKANRIKGNQTPWEAFGDSPGGFDYDAILLRAGLMPKEKRYRFGEDGYARWLKEDKDFLARALNDTRYMSRIAREYLGLINPSGVRVITGTMTAMLRRHFGLNNLLGLQGEKNRNDHRHHAVDACVIAVTDQSMLQKFATASANAREEQLGRLVKGLEMPWKSYSDHVKRAINHIKVSYRPDHNYEGAMHRAGAYGLRANGNVSFRKIVDGRRQRMEENRKVIPVTSLKASARHGLLPDGSPRPYKGYDGNSNYCIEIVRNEKGKWTGEVVSTFEAYQVAKKYRKERLRHRTLSISGKPLIMRLMRNDCLQFENNGELQIMRVVSIRTDGAITFAAPVEANVDARNRDKEDPFSYFRKTAGTLQQAKARLVTVSPIGELRIYPFKG

SEQ ID NO: 6166 - protein, 1016 aa, synthetic construct
  REGION 1..1016: note = Synthetic
MLHKMRYRLGLDLGSTSIGWALVRLDTSDQPCAVIKTGVRIFSDGRNPKDGSSLAVTRRKARAMRRRRDRFLRRRCRMLNALIQYGFFPSEKAQRKALELLDPYFLRAKGLNEALTPGEFGRALFHINQRRGFKSNRKTDQKNDDSSVLKTAITRLRNALASENCRTVGEWLNNRHKLGWGVRARYREKRTINDDGKTRINKNYDLYVDRAMIEQEFDVLWKSQSEFNPVLFNEAARIELKDILLYQRPLKPIRPGRCTFIPDEERAPMALPSVQRFRLYQEVNNLRILGENLKEETLTLKQRDDLVGSLERYGKRTFPEIKKLLGMNGSVQFNLEDQRRQELKGNITNAILSKDKYFGEDWFSFSEEKQDEIVLKLCKEENMSQLISWLRNETDVDEERAEAIANVGLPEGYGGLCKIAIDRILPELRREVITYDKAVIAAGFEHHSHIGASVTGEVLLELPYYGRALQRHVGFGSNDPQDKDEKRYGRIANPTVHVCLNQVRLVVNALIKRYGHPSEVIVEVARDLKQSKDQRNEENKRQAENQKRNRRLRAEIARILNVDEERVRNADIQKMILWEELGSDPADRRCPYSGTQISVSMLLSDEVEVEHILPFSQTLDDSLNNKTVCLRLANRAKGNRTPWDAFGAQNPSGFDYSDILERAERMPKAKRYRFGEDGYRNWLKDDAGFLARALNDTRYMSRVAKEYLSLICPHTRVIPGRMTALLRAKLGLNGILGLRGEKNRNDHRHHAVDACVIAVTDQGLLQRFASASASSRESQLDRLVANMPLPWESYREHVERAIRHTYTSHKPDHGHEGAMHNDTAYGLLGDGKIGFHKVEGGQRIYIEENLKVIEITDTGVGDRHGFLPNGEPRPYKGYKGDSNYCIEIICDEGGKWKGNVISTYMAYQIVRKGGIAKLRDSRTGFNGESLVMRLMIDDTIRLHIDGILRVMRVAKLSSNGQVFMADINEANVDARNRNKEDPFSYISKKASSLQLLKARRVTISPTGKLQDPGFKG

SEQ ID NO: 6167 - protein, 1043 aa, synthetic construct
  REGION 1..1043: note = Synthetic
MTLDRAKLPYRLALDLGTNSLGWAILRLKKDEERYKPTAIIKAGVRIFSDGRNPKDGTSNAVKRREARQARRRRDRLLKRKSQMLIRLIQFGFFPKTLDERKALEHLNPYKLRAKGLNEQLTAYEFGRALFHMNQRRGFKSNRKTDSKENDSSVMKDTIKQVSAQIDQTNTRTIGELLYQRQQNQLTVRARYREQRIVTEGNKTKINKSYDLYINRQMIEDEFEVLWAKQNSFNPTLFNEDAKLTLKDTLLFQRKLRAVRPGRCSLLPNEQRAELAYPSAQRLRIFQETNHLRILNQQLKPEPLTLEQRNLITGSLEKNGKLTFTAIKKKLGLSSQTKFNLEDDKRTELIGNKTSSLLSEKEYFDKAWFEFNASLQDEIVKNLLNEENEKELIQWLCQHTQINQETAKRIAQAPLITGHSAFCLIAIKKLLDCLKENVITYDKAVKAAGYEDHSKLNYSNSGEILESLPYYGAYLQRHVGFGTGAVSDSPEKRYGKIANPTVHIGLNQVRRVVNAIIKKYGHPTEIVVELARDLKRSKKERDKISKMQKQNEIRNNRIRTSIAQTLNISENQVSRKDLEKWILWEELSADQADRKCPYTGVQISASKLLSPEVEIEHILPFSKTLDDSLNNKTVSLKRANAAKGNQTPWEAFGQANSLGIHYDEVIERAKNMPKDKFFRFAENGMEQWLHEHKDFLARALNDTRYLSRIAKEYLHLICPDENRIHVIPGQMTEKLRAKFGLNQILSDNGGKNRNDHRHHAIDACVIGVTDRGLLQRFANANQHAKEKGLEKLVEEMPMPWPTYRNHVERAVKSIIVSHKPEHNFEGEMFDATIYNTNGYSKKAAKIRKVIPFPIQQEIKTQKPYYELIRPSTQRHKNKPYKGLLTTSNYCIEIFKNDAEWGSDVLSTFEAYQVVSKYKSKDEGFKQLRNKKNAQNGKPLIMRLSIGDYVVVELERKKCLLQVLKIDSKGSITFIKPNEANISARYNEKLKAEKNKKEQQNYDEKALNDDFFQKAMNCSSLLKGKARQAKISELGILNDPGFKN

SEQ ID NO: 6168 - protein, 1053 aa, synthetic construct
  REGION 1..1053: note = Synthetic
MGEIMPPKMPYRLALDLGTTSLGWALLRLNANQAPCAVIKAGSRIFSDGRHPKTGTSLAVARREARAMRRRRDRLLKRKARMLRALLQYGFFPAKVEERKALEILNPYALRAKGLDEQLTPAEFARALFHINQRRGFKSNRKTDQKEADSGALKSAIQKVREQIDAEDCRTVGEWLHKRDKRDQHYQRNEANTTSLPVRARYHADKVVGENGKSKLNKYYDLYIDRAMIEQEFDALWQKQAEFNPAVFTNAGRVELKDVLLHQRKLKPVKPGRCTFLPDEERAPLALPSVQGFRIYQEVNNLRILDADLQDTPLNLTQRDQVIAALEKSAKQTFTQLRKLLRLSGSSTFNLEDKKRSELKGNTTSAVLSKAEHFGKQWFEFEAELQDEIVWQLLSVESETQLIDWLQTHTGIDEERAEKIANVGLAEGYGSLSRKALALILPELRREVVTYDKAAKAAGFHHSQFEHGEVEGCTFAVERVLTETGEIKTLHLHHKLPYYGEFLQGHVGFGTGNPEDTPEKRYGKIANPTVHIGLNQVRLVVNALIRRYGHPSEVIVEVARELKQSKQQRDETQKRQADNQARNKRLRELAAGILDIAPERVKRDDIEKLILWEELNPGNAADRRCPYSGAQISQAMLLSNAVEIEHILPFARTLDDSLNNKTVSMRQANRIKGNRTPWEARQDFAAQGWLYEEILERAANMPRAKRERFAEGGYEKWLKEDKDFLARALNDTRHLSRVAFEYLKLVSPNVRVIPGQMTAMLRAKFGLNDILGLSGEKNRNDHRHHAVDACVIGVTDQGMLQRFARANASARERQLSRLVDNMPLPWDSYPQHVQRAIDAIWVSHKPDHSHEGGMHNDTAYGLQDNGNVHFHKIQDGKRVRIEESLQVISFTSPHPRHGQLPNGDPKPYKGYKGDSNYCIEIVRNEKGKWQGEVISTFQAYQVIRQHGEEKGKALLRSPTQSLSGKPLVMRLLRNDIVRLVNEQQAITARVCWIRSDTRIAFAPVHEANVDARDRSKDDPFSYLIKNASVLQKLNARRITISSIGELRDPGFKA

SEQ ID NO: 6169 - protein, 1031 aa, synthetic construct
  REGION 1..1031: note = Synthetic
MAKMRYRLALDLGSTSLGFALLRLDEASNPCAIIKAGVRIFSNGRDPDGNSLAVTRRMARAMRRRRDRLLRRKARMMHLLIEHGFFPKDPEARKALETINPYELRARGLDESLTPEEFARALFHLNQRRGFQSNRKTDKKDNDNSALKSAIKRLRDALAEGQGRTVGELLFRRMQTGQTVRARYRESKALKPDGKTKIDKSYDLYIDRAMAIDEFEALWSKQASLNPDIFCAAAYHELKECLTKQRPLLPVRPGRCTFMPEEERAPLALPSTQRYRMYLEANHLRILREGLHEEVLTLTQRDALVQALEHNPKRTFVQIKALLGLKGAVQFNFEDPKRQELKGNITNAILSKPGHFGQSWFTFDEAKQDDIVSRILSEEDESALIKWLLLETGVNEAQAEAIANVGLPEGYGSLSRKALARIVPALRQEVISYDKAVQAAGFEHHSQLDASAIGEQHPTLPYYGEALQRHVSFGTLDANDPDEKRFGKIANPTVHIGLNQVRTVVNDLIKRYGHPSQVVVEVARDLKQSRQQREETNKRQADNQKRNARIRQEVAEASNGSISPERVKVADIQKWILWEELNENDVLNRCCPYSGARISALDLLSSDGRVEIEHILPYARTLDNSLNNKTVSMRWANRIKGNKTPAEAFGQNQVESCNYEAILKRAEQMPKGKRYRFAMDAMERWDKEGNGFLARALNDTRYLSRITREYISLICPHATRVIPGQMTALLRHQFGLNGILGLRGEKNRNDHRHHAVDACVIGVTDQKTLQELSNASKRGRDQHIMDWAESMPDPWPTYREQVKRAINHILVSHKPDHSHEGAMHNDTAYSLLGNGRVGVHKLVDGKRTLVEDTLKVIEFDYAKAKHSTNEPWFDSDHNHRSGAYKGYKGDSNYCIEIVSNDKGKWEGEVISTFDAYQLVRKERNAGRDGVSRLRHPTLSLSGKPLVMRLIRDDYVKLETDEGMKLMRLAKLAADGRMFWVEHNEANESARARDKEDAFTYTVKTPVGLQKAKGRRVTVSPIGELRDPGFKG

SEQ ID NO: 6170 - protein, 1016 aa, synthetic construct
  REGION 1..1016: note = Synthetic
MANMRYRLALDLGSTSLGWAMIRLNAASEPCAIIKAGVRIFSDGRNPKDGSSLAVTRREARAMRRRRDRLLKRKARMMHTLVSHGFFPADVAARKALETINPYELRARGLSSALTGAEFARALFHINQRRGFKSNRKTDKKDNDSGALKTAISKLREALKVDRCLTVGEWLHKRQQAGHTVRARFRQIRVIKDDGKSRIDKSYDLYIDRAMIEAEFDALWAKQTELNPGLFTETARSELKDCLLHQRPLKPVRPGRCTLLPDEERAPLALPSTQRFRIYQEVNNLRILREGLKEEPLTLEQRDELVHALEHNSKRSFIQIKKLLGVGGSVQFNFEDPKRQELKGNITSAILSNDKYFGDAWFDFPEAKQDAVVAQLVQEENEARLIRWLQDETGVDEPRAEAIANVSLPEGYGSLSAKALARILPALRRGVMTYDKAVQAAGFEHHSHISPAASGEILPELPYYGIPLQRHVGFGSGKTDDRDEKRYGKIANPTVHIGLNQVRLVVNALIRRYGHPSEVIVELARDLKQSKEQRDEDSKRQADNQRRNTRLRADVAVILGISAERVRTADIQKMILWEELSFDPADRRCPYSGVQISANMLLSDQVEIEHILPFSETLDDSLNNKTVALRTANRVKGNRTPWQAFGAQATAGFDYASILQRAELMPKAKRYRFGEDGLQRWLRDDAGFLARALNDTRYLSKVAREYVSLICPQNTRVIPGRMTAMLRAKFGLNDVLGLNGEKNRNDHRHHAVDACVIAVTDQGLLQRFAQASASAREQQINRLVEDMPLPWDSYREHVHRAVDNIWVSHKPDHGHEGAMHNDTAYGLLGNGRVSMHKTVEGKRERIEDNLKVIEFTSAKASARHGVLPNGELRPYKGYKGDSNYCIEIVHTDKGKWDWEVVSTFDAYQAVRKHGLHRLRYPNLSMSGKPLVMRLIIGDYVRANFKDSLRLLTVKKIKSNGGIFVAQHNEGNVRQREDEKDDSLIYGSFSAGSLQKAKGRYVTISPIGELNDPGFKE

SEQ ID NO: 6171 - protein, 1015 aa, synthetic construct
  REGION 1..1015: note = Synthetic
VQKMRYRLALDLGSTSLGWAMVRLNAQNETCAVIKAGVRIFSDGRNPKDGSSLAVSRREARAMRRRRDRLLKRKNRMMTNLLHHGFFPQDETDRKALETKDPFALRAKGLDQTLLPEEFARALFHINQRRGFKSNRKTDKTENDSGALKKAIGQLREAMQATGCRTVGEWLNARHQSGLSVRARYRENRITKDDGKTKIEKSYDLYIDRAMIEAEFDALWAKQSELNPALFHETARAELKDCLLHQRPLKPVKPGRCTLLPDEERAPLALPSQQRFRIYQEVNNLRLLREGLNDEPLTLSQRDLLIQALDANSKRSFTQIQKLIGFSGKFNLQDEKRTELKGNSTSALLGRKEFFGPRWSTWSERQQDAIVKQLVSQEYEDRLIKRLQKYCGVDEATAETIANAPLPEGYGSLSVKALEKILPALRAEVITYDKAVLAAGFDHHSHISHAATGEILPELPYYGQYLQRHVGFGSGKPEDTAEKRYGKIANPTVHIGLNQVRTVVNALIKRYGHPSEVIVELARDLKQSQEQRQEEQKRQADNQRRNERMRQNIADLLNTSTERVRAADLQKMILWEELSFNTADRRCPYSGVQISAQMLFSDQVEIEHILPFSQTLDDSLNNKTVAMRQANRVKGNRTPADAAADFASQGWPTEDLLHRASLMPKGKRYRFAQDGMAQWLREDKGFLARALNDTRHLSRVAREYLSLICPQGTRVIPGRMTAMLRAKFGLNDILGLNGEKNRNDHRHHAVDACVIAVTDQRLLQKFATASASTREKQLNKLVETMPLPWDNYRDHVQRAVDNIWVSHKPDHGHEGAMHNDTAYGLLGGGHVQVRKRVEGVRTREISALKVIEFSDSQAHPRHGLLPSGEPRPYKGYKGNSNYCMEIVRNDKGKWEGEVVSTFDAYQLVRQHGLARLRHPTLSVSGRPLVMRLMIGDTLALTTEDDPKMIARITTISGNGQIFMAAHNEANVDFRNRDKSDPFAYVSKMAGSLQKAQGRRVGVSPIGELRDPGAMF

SEQ ID NO: 6172 - protein, 1021 aa, synthetic construct
  REGION 1..1021: note = Synthetic
MSEEKAVTQMRYRLALDLGSTSLGWAMVRINSQDEPCAVIKAGVRIFSDGRNPKDGSSLAVSRREARAMRRRRDRLLKRKNRMMATLLKHGFFPHDESARKALEKTDPFVLRAKGLDQALLPEEFARALFHINQRRGFKSNRKTDKKETDGSALKKAIGQLREAMETTGCRTVGEWLCARHQQGLSVRARYRENRITKDDGKTKIEKSYDLYIDRAMIEAEFDALWFKQSELNPELFHETARAELKDCLLHQRPLRPVKPGRCTLMPEEERAPLALPSQQRFRIYQEVNNLRLLREGLNEDTLTLTQRDQLIQALETNSKRSFTQIQKLLGFSGQFNLQDEKRTELKGNSTSALLSKKEFFGSQWVSFNEAHQDAIVMQLVSEENEARLIAWLKAETGVDEITAERIANAPLAEGYGSLSAKALEKILPALRADVITYDKAVLAAGFDHHSHISHAATGEILPDLPYYGQYLQRHVGFGTGKPEDPAEKRYGKIANPTVHIGLNQVRTVVNALINRYGHPSEVIVELARDLKQSQEQRKDEQKRQADNQRRNERMRMVIADLLNTIPERVRAIDLQKMILWEELSFNVADRRCPYSGVQISAQMLFSDQVEIEHILPFSQTLDDSLNNKTVAMRQANRIKGNRTPSEAAADFEAQGWSSADMLQRASLMPKGKRYRFAQDGFDQWLREDKGFLARALNDTRHLSRVAREYLSLICPQGTRVIPGRMTAMLRAKFGLNDILGLDGEKNRNDHRHHAVDACVIAVTDQGLLQRFAQASASAREKQLNKLVESMPLPWHSYRDHVQRAIYNIWVSHKPDHGHEGAMHNDTAYGLLSGGQVHIHKRVDGLRVREVAALKVIEFSDAQASPRHGLLPNGEPRPYKGYKGDSNYCIEIVRNEKGKWEGEVVSTFEAYQLVRQHGLARLRHPKLSVNGKPLVMRLMIGDVLALSMPNNPKMIARITKISGNGQIFMAAHNEANVDARNRDKTDTFGYVSKMAGSLQKANGRQVSISAIGQLRDPGLID

SEQ ID NO: 6173 - protein, 1018 aa, synthetic construct
  REGION 1..1018: note = Synthetic
MQTLRQMRYRLALDLGSTSLGWAMIRLGSENQPCAVIKAGVRIFSDGRNPKDGASLAATRREARAMRRRRDRLLKRKACVMRTLIEHNFFPKEEAARKALETLDPYRLRAKGLDEALTPAEFGRALFHINQRRGFKSNRKTDKKDNDSGALKTAISSLRAALKDENCRTVGEWLHRRNLAGKTVRARYRQNKIVKDDGKTRIEKSYDLYVDRAMIEAEFDAIWKKQAELNPAQFTGTSHDELKHALLYQRPLKPVKPGRCTFLPDEERAPLALPSTQRFRIYQEVNHLRILQTGLKEQQLTLQQRDDLVHALEVNGKRSFTQIKKLLGVGGAIQFNFEDPKRQELKGNITSAILSKVENFGTAWFAFDETKQDAIVLQLVKEENEAKLVRWLREETGVDEARAEVIANAGLPEGYGGLCALALARILPELQRDVITYDKAVQAAGFEHHSNISPAASGEILLELPYYGMPLQRHVGFGSNDPNDPDEKRYGRIANPTVHIGLNQVRLLVNTLIKRYGHPSEVIVEVARDLKQSKDQRDAESKRQAENQKRNKRLRADISGILQIAEEQVRASDIQKMILWEELSFDIADRRCPYSGVQISAHMALSDEVEVEHILPFSRTLDDSLNNKTVAMRQANRVKGNATPWEAFGERIVAGFDYASILARAEHMPKAKRYRFGEEGYQQWLKDDAGFLARALNDTRHMSIVAREYLRLICPNTRVIPGRMTAMLRAKFGLNDILGLHGEKNRNDHRHHAVDACVIGVTDQGMLQRFAKAGAEARERQLNRLVESMPLPWESYREHVARAIDRIWISHKPDHSHEGAMHNDTAYGLRGDGKVSVHKIFDGQRTVVEESLKVIPITSSKASARHGLLPDGTPRPYKGYKGDSNYCIEVVRGGKGKWEGEVISTFDAYQLVRAHGVARLRHATVSTSGKPLVMRLMVGDCLRLEVDGVLRTMRMVSVNSEGRISLVDLHEANVDARNRHKEDTFSYTYKTAGSLQKAKGRRIGVSPIGEIRDPGFKV

SEQ ID NO: 6174 - protein, 1039 aa, synthetic construct
  REGION 1..1039: note = Synthetic
LLHKNKMGYRLALDLGSTSLGWAMIRLNVDQQPCAVIKAGVRIFSNGRNPKDGSSLAVTRREARAMRRRRDRLLKRKARMMRTLIEYGLFPADEIQRKALETMNPYALRAKGLDEVLTPSEFGRVLFHINQRRGFKSNRKTDKKDNDSGALKTAINKLRETLKAENCRTVGEWLHKRNEANQTVRARYRQNKTIKDDGKTKIDKYYDLYIDRAMIEHEFDQLWKKQAELNPILFTEAARADLKDVLLHQRPLKPVKPGRCTFMPDEERAPLALPSTQRFRMYQEVNNLRILREGLKEEPLTLQQRDELIAALEKNSKRTFTQIKKLLGFGGAVQFNFEDPKREELKGNTTSAILSKKEHFGDVWFTFDETKQDAIVLQLIKEENEAKLVRWLQDETGIDEKCAEFIANVGLPEGYGSLCTKALARILPELRRDVVTYDKAVQAAGFEHHSRLGSNTEIPGITFKTESIDQDSGEIKEFHIHKKLPYYGEYLQRHVGFGSGKPEDPAEERYGKIANPTVHIGLNQVRLVVNALIKRYGHPSEVIVEVARDLKQSKEQRDEESKRQTENQNRNKRLRTIIAETLQISEERVRRDDIEKMILWEELNPRNAADRRCPYSGAQISAAMLLSDEVEIEHILPFSQTLDDSLNNKTVALRQANRIKGNRAPWDARNDFSAQGWDYASILSRAEQMSKAKRYRFGEDGYQHWLKDDAGFLARALNDTRHLSKVAREYMSLVCPNTRVIPGRMTAMLRAKFGLNDVLGLNGEKNRNDHRHHAVDACVIAVTDQGLLQRFAKASASARERQLNRLVETMPLPWESYREHVQRAIDAIWVSHKPDHSHEGAMHNDTAYGLRENGKVSFHKMVDGKRECIEDNLKVIEISDAKAIDRHGLLPTGKPKPYKGYKGDSNYCIEIVRNEKGKWEGEVISTFNAYQFVREHGAAQLRCPDLSVSKKPLVMRLMIDDVVRLDVDGESRTMRIATLSGNGQIFMADISEANVDARNRSKEDSFTYISKMAGSLQKAKARQIGISPIGKLRDPGFKG

SEQ ID NO: 6175 - protein, 1021 aa, synthetic construct
  REGION 1..1021: note = Synthetic
MPFRYRLALDTGPTSLGWAIFRLNAENRPMALVLSGVRIFSDGRNPKDGASLAVARRLARAMRRRRDRLLKRKNKLIAALVHHGFFPEDSAQRKRLEGLDPYRLRAEGLDRALEAYEFGRALFHLNQRRGFKSNRKTDKRETDSSVMKSAIAGVREALAEGGFRTVGEWLHHRKQQGQTVRAKFSARRTVTEEGRARIEKNYDLYIDRAMVEAEFDALWTRQAELNPAVFSEQARDELRDILLFQRRLRPVDPGRCTFFPDEARAPLALPSVQRFRLYQELNNLRWLDEGLQERTLTVAQRDTMANALEKSVRRTFQQLRSIAGLGSEASFSVEDLKRQDFKGNATSVVLSKKQHFGACWAQFDETFQDEIVLRLLTEENESVLIAWLQEHTGVDESQAEAIASVALPDGYGRLSLKAIRLILPSLREDVHTYDKAVMMAGIEHHSFLGPRATGEILPNLPYYGKVLERHVGFGTGSPEDSEERRFGRISNPTVHIVLNQIRVLVNELIRRYGHPDQVVVELARELKQTWEQKRETEREQAANQQRNTRYRQEIASVLGISEEQVKRDLIEKRILWEELSFDPVERCCPYSGQQISLEMLLSDRVEVEHILPFSQTLDDSLNNKTVALRQANRVKGNQTPWDAFGRQEVAGFRYEDILQRAQVMPQRKRYRFAQDGKEQWLKNDKGFLDRALNDTRYLSRMAKEYLEFICPQATWVVPGRLTAMLRRVFGLNSPDILGWQGQKNREDHRHHAIDACVIGVTDRGLLQKVADASARGRGMQGRFLQDMPMPWPSYREHVKRAVNRIWVSHKPDHSYEKAMHNDTAYGLLPDGYVRVRKEVDGVRKRHKEKLRVIPVFSAKAGERHGFLMNGNPRPYKGYKGDSNYCIEIVRDDASGKWLSDVISTYQAYQVIREHGQEEGWKRLRDPIHGFSGGSLVMRLMINDIVRLEHENELRTWRVSTISGNGQIFFADIHESNVDSRNRNKNDPFSYASKKASSLQKAKARRVTISPAGRLSDPGFTP

SEQ ID NO: 6176 - protein, 1046 aa, synthetic construct
  REGION 1..1046: note = Synthetic
MLSNLNYRLALDLGTTSIGWCLLKLNKLHEPVAIIRMGSRIFSDGRHPKDGSSLAVARREARQMRRRRDRLLKRKQAMTHALIDLGFFPQDEDQRQALTQLNPYQLRKKGLYEELSGAEFARALFHINQRRGFLSNRKTDSKDSESGLLKKSIKTLRDKLEQENCQTLGEWLANRHEQRLSVRARLRGATQKDKAYDFYADRAMVAHEFETLWQKQRQYKPELFTQAAHDKLQDILLFQRPLKPARPGRCTLLPEEERAPLALPSVQQFRIYQEINNLRILNDLQAEKTLTMEQRDIISDLLAQKRDVSFTEIIKKLGQPGSARFNLQDIKRTSLKGNITNIQLSNKNAFGKEWYRFSLEQQDEIVTQLLDEPSISTLCDWLQKYTNIDPEQAQQIADISLSSGYSHLSSKAINKVLPELKKDVIPFSAAVTKAGLGSHSALSHADQTGEIMDRLPYYGIPLSRHVGFAKENPRNEEERYGKIANPTVHIGLNELRKVVNALINKYGHPQEVIIEVTRDLKLSHSKKLELQKEQAQRQKQNQQYIEDACKVLQLNPDNLSKSQRREISQKIQLWIELNPNASDRCCPYSGEQISIQKLLSNEVEIEHILPFSMTLDDSMNNKTVSMRHANRDKGNRSPYDAFGNSNHYDYEAILARTTRMPRAKRKKFAPDALQHWQDEEQGFIARALNDTAYFSRIAREYLTLICPPNKVHAIPGRLTAMLRGKYGLNKLLSGTELKNRNDHRHHALDAAVIGITDRSLLQKVSTASAHARELHLNRLIDDLPEPWPKYRQQVENALKAIIVSHKPEHSFEGAIFEATAYGIRRDGSVVQKNNPDKEKQRVIDYVVPIYAPEKSDRHGTRDDGSPRAYKGYQPGGNYCLEIIQAPEGHWQMETIPIFRAYEYARQLGWGRLDTNQILPNIIRDKLSDKPGELLMKLMPGDTIRMNYKGQRNMLLSVVQMSVKGGATFTPIHEANIQQRYTNKLKANKALKQADNNESLLNDLDQSALNDTFIRSQIGIAELQAGNAQKVTVSPIGTLNQGYRRKS

SEQ ID NO: 6177 - protein, 1087 aa, synthetic construct
  REGION 1..1087: note = Synthetic
MSKHKPTIRYRLALDLGSTSLGWAILRLNADNQPTAIIKAGVRIFSDGRSPKDGSSLAVTRRTARAMRRRRDRLLKRKARMRDKLIAHGFFPKDEAARKALEALNPYQLRAEGLQRALTPGEFARALFHINQRRGFKSNRKTDKGAKDAGAMKAAISSLRAQLAPYPVDGAGKRLDPHSPALLQWACRQSDDTRNSMPRTVGELLAQRLQQGLGARAKNNGQSGAKLAYDLYVDRQMVADEFDALWAVQAGFNPALFHEQARAELRDTLLHQRPLRPVKPGRCTLQPEEERAPLALPSTQRFRILQEVNHLRLLQRGMREEPLTLAQRDAIVNMLESSSKVTFKAMRKKLKLGDVVQFNLEDAKRSELKGNATTAALAKKELFGDVWHTWTLRQQDAIVRQLVTQQNTERLIKRLVKYCRVDEACAAAIANTGLPEGYGSLSRKALARIVPALRAEVITYDKAVQAAGFAHHSDLGFDFEHGDDEVEQLGERIIASTGEIKPVLAFKQLPYYGRALQRHVAFGSGNPKDPEEKRYGKIANPTVHIGLNQVRKVANALVRRYGRPTEIVVELARDLKQSREQKLETQKRQAENQKRNARIRAEIAPMLGISEERVKHADIQKWILWEELSFDAADRRCPYSGVQISAAMLLSEQVEIEHILPFSQTLDDSLNNKTVSMRQANRIKGNRTPWQAREDFEAQGWTYECMLQRAERMPKAKRYRFAPDGYERWLKEDQDFLARALNDTRYLSRIAKAYLQLLCPQGTWAIPGQMTALLRAKFGLNDVLGLHGEKNRDDHRHHAVDACVIGVTDQALLQRFAQASATARQQGLEKLVEDMPLPWESYRAHVERAVQNIWVSHKPDHGHEGEMFDATIYSASGQSRMAAKDRKVLPFHARPEHAHLNRYRDKNNAPKPYKGLLSNSNYCIEITRNEKRDWAGKVISTFDAYKIERELLRAYRNKHGKNASSLALLDLLSNHESFDGQPLVMRLCKGDCIAIGQGKEREVLQVLKINSSGSVTFIKPNETNISARYLAKLAAQKDQKAGKFFDEAALNDVFFQKAFSAGSLLEAKARRVTISPTGELRDPGFKG

SEQ ID NO: 6178 - protein, 1021 aa, synthetic construct
  REGION 1..1021: note = Synthetic
MLPKMRYRLALDIGSTSIGWCLIRLNADDAPVAVIRMGTRIFSDGRNPKDGTSLAVTRRNARQMRRRRDRLLKRKERMVNALTRLNFFPKNIAQRQELANLDPYPLRKKGLYHPLSGPEFARALFHITQRRGFLSNRKTDKKDNESGALKKAIRDLRERLNQEGCQTLGEWLANRHEARLSVRARLRGKTQKEKAYDFYADRSMVEHEFDALWAKQSEFNPSLFNTAARDELKGILLFQRDLRPVRPGRCTLLPDEERAPLALPSTQRFRIYQELNNLRILTHDLREVPLTLEQRDKLAQLLERQGQVSFTAMIKALSLPGTTKFNLEDIKRDKLKGNVTGAILAKDQHFGDHWHNFNLTLQDDIVSKLLNEPDESALIRWLQEQTGIDEAAAERISIVSLPEGYGNLSQAALARILPELMKDVVVYSEAVSRAGFDSHSALSYAQQTGEVMDSLPYYGNPLRRHVAFAKDNPVNDEERYGKIANPTVHIGLNELRKVVNALIKRYGHPSEVIVEVARDLKLGRERKREIEKEQKTRQDLNKKHIAEACVVLGLDPTNLDRSKRREISQKMQLWVELNTKNIADRQCTYTGEQISIERLLSSEVEIDHILPYSMTLDDSMNNKTVAMRRANRDKGNQTPYQVFSERLLPGYDYEAILQRAALMPREKAKRFAPDGYQRWLKEDKDFLARALNDTAYLSRIAKEYLSLICPPNRVRAIPGRMTALLRGKFGLNHLLSGSDLKNRNDHRHHAIDAAVIAVTDQGLLQKFAKASASARERQLDRLVEDMPLPWPTYHEHVARALDHIIISHKPDHGYQGGMMEDTAWGLRDDGVVVRHVRPEGGGHREQEVKNKNVVTINNTRNPERHGLDENGQPRPYKGYVGGSNYCIEIWRDDKGKWNGDVISTFQAYQVIRQFGEAEGLKKLRNPNLSQSIMPLVMRLMIDDMVKLDIGSGLQTMRVVKISGNGQICLCNHNEANVDARNRDKDDSFAYTTKVPSSLQGAKCRHVTVSEVGEVRDSGFKG

SEQ ID NO: 6179 - protein, 1023 aa, synthetic construct
  REGION 1..1023: note = Synthetic
MLPKVPYRLALDIGSTSIGWCLLRLDTDTPPKPKAIMRMGVRIFPDGRNPKDGTSLAVTRRNARAMRRRRDRLLKRKTRLLNALIRLGFFPQDDATRRNLVFLDPYALRKKGLHEPLTGPEFARALFHINQRRGFLSNRKTDKKDSDSGALKKAIKDLREKLAQEDCQTLGEWLAKRHSARLSVRARLRGKTQKDKAYDFYADRAMIEHEFDALWLKQSCLNPVLFTEAAGVELKDILLHQRNLKPVRPGRCTLLPDEERAPLALPSTQRFRIYQELNNLRLLTPELTEVSLNLEQRNKIATLLEHQGEVRFTAMLKTLKLPGTTRFNLEDIKRDRLKGNATTAILAKDSNFGEAWFEFDQVLQDTIVDKLLNEASESALIAWLHANTGVDEGTAEHIANAGLPEGYGSLSREALAVVLPELIKDVVVYSEAVTRAGFDSHSVLSHSALTGEVMDELPYYGDPLRRHVAFAKENPRNDEERFGKIANPTVHIGLNELRKVVNALIRRYGHPSEVIVEVTRDLKMNRERKLEIQRDQKIRQDLNDQQVAEACFVLGLTQANLDRAKRRELSQKMQLWIELNAKNVADRQCPYTGEQISIQRLLSNEVEIEHILPYSMTLDDSLNNKTVAMRRANRDKGNLTPFDAFGKEPVPGYDYQAMLRRAALMPKEKAKRFAPDGYQRWLREDKDFLARALNDTAYLSRIAKEYLSLICPHNKVRAIPGRMTALLRGKFGLNQLLSGTSEKNRNDHRHHALDAAVIGITDQGLLQRFSQASARARAMELDRLVDSMPDPWTTYREHVKRGLEHIIVSHKPDHGYQGAMHEETAWGLRDGGQVTRRVRPEDGGPRQREFKNKTVVAINSTNNVARHGSDENGNPQAYKGYVGGSNYCIEIWRDEKGRWNGDVISTYQAYQAVRELGESEGLRMLRSRDISQSGNQLITRLSIDDFVRLEIDGREEIMRVAVISGNGQVFMCPHNEANVDSRNRNQSDDFSYISKMAGSLQKAKGRRVTVSEIGDLRDSGFNN

SEQ ID NO: 6180 - protein, 1049 aa, synthetic construct
  REGION 1..1049: note = Synthetic
MKNKMQYRLALDLGTTSLGWAMLRVKPNEDGQLQPCAIIKAGVRIFSDGRNPKDGSSLAVTRREARAMRRRRDRLLKRKARMLQQLTHFGFFPTDLAERKALETLNPYELRAKGLDEALSPYEFGRALFHINQRRGFKSNRKTDKKENDSGALKAAIKFVHSQIDGNTHRTVGEWLYKRMLNGDPVRARYRQTKQVKEDGKTKIDKSYDLYIDRAMVEAEFEAIWATQATLNPTTYSEQAKAALKDVLLFQRNLRPVKPGRCTLIPTEERAPLALPSTQRFRIYQEVNNLRLLRAGLKDEALTLTQRDQLVVALEQNNKRTFTQIKKLLGLDGQTQFNFEDPKREELKGNTTSAILSHTKHFGEAWFGFDEATQDAIVWQLLNEENESRLIAWLMQKTGVDAEKAETIANVALPEGYGSLSRQALARILPELRKTVITYDKAVQAAGFEHHSRLNNYGEVSGRTFDTGIERIDQKTGEIQRLHAFHELPYYGEFLQRHVGFADPKATPATPEKYFGKIANPTVHIGLNQVRKVVNALIKRYGHPSEVIVEVARDLKQSKKQRDEENKRQAENQKRNDRIRKDIANTLGISEERVRHADIQKWILWEELSFDPADRKCPYSGVQISAQMLLSEEIEIEHILPFSRTLDDSLNNKTVSTRQANRIKENKTPWEAFGKENALGVIYADILLRAQKMPKAKRYRFAEDGLAQWDKEGKGFLPRALNDTRYLSRVAREYVSLVCPQATRVIPGQMTAQLRAKFGLNDVLGLNGEKNRNDHRHHAVDACVIGVTDQGMLQRFASANASTRQKGLTRLVETMPEPWPTYRQHVERAVQQIYVSHKPDHSHEGAMHNDTAYSLLAEGLVGAHKTIEGKREYVEEKLAVIPFTSQKAAERHGYLPNGELRPYKGYKGDSNYCIEIVRNAKGKWEGEVISTFQAYQVVRTAKTPKEGAALLRNPHRSLSGKPLVMRLLIDDLIRLKLENTTRIMRIAKVVGNGQIFMADHQEANVDARNRDKEDSFTYISKTAGSLFNAQGRRVTLSPIGELHDPGFKG

SEQ ID NO: 6181 - protein, 1033 aa, synthetic construct
  REGION 1..1033: note = Synthetic
MLPNMRYRLALDLGSTSLGWAMIRLNAANQPCAVIKAGVRIFSNGRNPKDGSSLAVTRREARAMRRRRDRLLKRKARMMRTLIEYGFFPAEESQRKMLETINPFTLRAKGLNQALTPAEFARALFHINQRRGFKSNRKTDKKDNDSSALKIAISNVRATIAAEGCRTVGEWLNKRDVAGQTVRARYRQSKIVKDDGKTKIDKSYDLYIDRVMIEHEFDELWKKQSELNPALFNDKARDDLKDVLLHQRPLKPVKPGRCTFMPDEERAPLALPSTQRFRMYQEVNNLRILREGLKEEPLTLQQRDNLIAALEENSKRTFTQIKKLLGLGGIVKFNFEDPKREELKGNTTSAILSKDVHFGADWFRFDEAKQDAIVLQLVKEENEAKLVRWLQDETGIDEKRADAIASVGLPEGYGSLCAAALARILPELRRDVVTYDKAVQAAGFDHHSQLNPYGEITDVTFKIESIDQDTGEIKAFHLHKALPYYGEYLQRHVGFGSGNPEDVPEKRYGKIANPTVHIGLNQVRLVVNALINRYGHPSEAIVELARDLKQNKDQRDEENKRQTANQNRNKRLRTAIAEVLRISEERVRRDDIEKMILWEELSFDPADRHCPYSGAQISAAMLLSDEVEIEHILPFSQTLDDSLNNKTVALRQANRVKGNRTPWDAFGAQSTAGFDYAAILARAEQMPKAKRYRFAEDGLQRWLKDDAGFLPRALNDTRHMSKVAREYMSLICPNTRVIPGRMTAMLRGKFGLNDVLGLNGEKNRNDHRHHAVDACVIAVTDQGLLQRFAKASASAREQQLNRLVENMPLPWESYREHVERAIDAIWVSHKPDHSHEGAMHNDTAYGLLGDGKVSVHKIVEGKRERIEENLKVIAFTNAKANDRHGVLENGEPKPYKGYKGDSNYCIEIVRNEKGKWEGEVIATFDAYQLVREHGVARLRHPTLSVSGKPLVMRLIIDDFIRLEEEANSRTLRVCKIREGQIALADVTQANVDARTRTKEISYILKAASSLQKSKARRISISPIGELRDPGFKE

SEQ ID NO: 6182 - protein, 1013 aa, synthetic construct
  REGION 1..1013: note = Synthetic
LGKMRYRLALDLGTTSLGWAMVRLDVDNHPSAIIKAGVRIFSDGRDAKTKASLAVTRREARAMRRRRDRLLKRKAGMMRSLIEHGFFPNDITARKALAVLNPYTLRAKGLNEALTPAEFARALFHINQRRGFKSNRKTDKNENDSGALKTAIIQLREKIKNENCRTVGEWLHKRDSAGLPIRARYHVAKVLTAEGKTKTDKYYDLYIDRAMIEEEFDVLWQKQRAFNPVLFNQNAHDDLKNVLLFQRPLKPVKPGRCTLMPDHERAPLALPSVQRFRMYQEINNLRLLDSALQTAPLTLAQRNIIIAELEKKNKLSFTQVKKMLGVGGAVEFNLEDAKRTELKGNTTSAILSKAEHFGAVWFDFNECKQDTIVLQLVQEENEAKLIRWLQDETGVDETHAERIAKTGLPEGYGSLCVAALARILPELRGDVITYDKAVIAAGFEHHSNLNPSATGEVLLSLPYYGEPLQRHVGFGTGNPEDNAEKRYGKIANPTVHIGLNQVRLVVNALIKRYGHPSEVIIELARDLKQSKDQRDEDNKRQTLNQNRNTRLRADIANILGMSEERVKRADIEKMILWEELSSDIADRRCPYSGEQISATMLLSDEVEIEHILPFSRTLDDSLNNKTVALRRANRIKGNLTPFEAFGAQAVAGFEYADILARAARMPKNKRYRFAEDGYQQWLKDDAGFLPRALNDTRHLSKVAFEYVKLICPNTRVIPGRMTAMLRAKFGLNDILGLNGEKNRNDHRHHAVDACVIAVTDQGMLQRFAQASARAREKQLNRLVESMPLPWDTYREHVQRAIDAIWVSHKPDHSHEGAMHNDTAYGLLANGMVVTHKTIDGERTRIEENLKVIPFASAKANDRHGILENGDPKPYKGYKGDSNYCMEIIRNEKGKWEGEVISTFDAYQIARTQGVEKLRHATLSVSGKSLVMRLIRNDFVRLVHEGNVRTLRVCKMTSEGTIALADVNQANVDARTRTKEIGYVFKAPSSLQKSNARCVTISPIGELRDVSFKA

SEQ ID NO: 6183 - protein, 1038 aa, synthetic construct
  REGION 1..1038: note = Synthetic
LKLDHSCFLCATPTTSTGEDMASMRYRLALDLGSTSLGWAMVRLNAEHNPCAVIKAGVRIFSDGRNPKDGSSLAVTRREARAMRRRRDRLLKRKARMMTLLVKHGFFPGDESTRKALQTLNPYALRAKGLDHALLPGEFARALFHINQRRGFKSNRRTDKKENDAGALKAAISKLRQDMAATGCRTVGEWLHKRDQVGLGVRARYRQTKVTRDNGKTGIDKSYDLYIDRAMIEVEFDALWSKQAALNPQLFTEAARQDLRYCLLFQRNLKPVMPGRCTLLPEEVRAPLALPSVQRFRIYQEVNNLRVVRQGLREEALTLHQRDQVIALLERSRKVTFAKIKKALGLGSITFNLEDAKRTELNGNSTNAELSKDAYFGDNWLAFDDAKQDAIVMQLVSEENLAALVRWICSETGVDADRAEAIANAGLPEGYGSLSAAALARILPALRADVVTYDKAVIAAGFDHHSNISAAATGEILPELPYYGIPLQRHVAFGSGKPEDTEEKRFGKIANPTVHIGLNQVRRVVNALIKRYGHPSEVIIELARDLKQSREQREQDNKQQADNQRRNKQLRSDIAGVLGISEERVRTADIQKMILWQELSFDAADRRCPYSGVPISVNMLLSDQVEIEHILPFSETLDDSLNNKTVATRQANRIKGNRTPSAARGDFEAQGWAYADMLARAELMPKAKRARFAEDAIARWLKDDAGFLARALNDTRYLSRVAKEYLSLICPQNTRAIPGRMTAMLRAKFGLNDVLGLNGEKNRDDHRHHAVDACVIAVTDQGLLQRFARASASARERQLNRLVDDMPLPWGTDQDKKYYLSVKRAIDNIWVSHKPDHGHEGAMHNDTAYGLLGNGRVSVHKVVEGKRERIEDNLKVIEFTNAKAHDRHGVLPNGDPRPYKGYKGDSNYCIEIVRNENGRWEGEVISTFEAYQLVREHGLARLRHPTMSVSGKALVMRLMIDDVVKLDHAEAIRVLRVAYASSAGTIAFADHHEANVDKRTRGKDLAYVFKTAGSLQKSKARRVTISPIGELHDPGFKE

SEQ ID NO: 6184 - protein, 1041 aa, synthetic construct
  REGION 1..1041: note = Synthetic
MSKLHYRLALDLGPTSLGWAVVRLTGEIPPVPVELIKTGVRIFGDGRRPKDKASLAVTRREARSMRRRRDRFLKRKARMMHTLVQHGFFPQDPKQLRELETLNPYELRARGLEQALQPGEFARALFHINQRRGFKSNRKTDSRDSDSGLLKTAIQTLRETLAQEQVRTVGEWLYKRYCAHQTVRARYRENSIIGSEGSKKTEKSYDLYIDRAMVEEEFDTLWSKQAQLNPALFTEQARSDLKYCLLYQRPLKPVRPGRCVFLPDEERAPLALPSQQRFRIYQEVNHLRVLEEGLREGEPLARARRDALVQALERGNQSFASGIPKLLGLPGGTQFNLADVKRKELKGNATSMVLGKPRYFGEAWFHFDAQQQDQIVMQLCTEENESVLIRWLMENTAITQERALAIADVRLPDGYGSLSAKALARILPELEREVQTYDKAARAAGFHHSRLGGNEAIPGRTFAWERVEPSTGEINTFHIFHALPYYGEFLQRHVGFADPKASADDLPEKRFGRIANPTVHIGLNQIRVVVNALLKRYGHPAEVVVEVARDLKQNKQQRDEQQKQQAHNQKRNERLRQQIATVLQTAPEQVRFGDIQKMILWEELSKNPAQRCCPYSGIPISPTMLLSDQVETEHILPFSKTLDDSLNNKTVAMRHANRIKGNRTPWEARHDFAAQGWSREGLEERSSLIEGRNKRYRFGEAAMQLWDKEGKGFLARALNDTRHLSRVAREYMELVCPQATRVIPGQMTALLRAKFGLNDILGLHGEKNRNDHRHHAVDACVIAVTDQALLQRFANASQRTEEKGLNRLVEKMPDPWPLYRNQVKFAIEHTWVSHKPDHAYQGAMHDDTAYGLQPNGRVRTHKHVDGRRVLEEKPLKVIEISDARAHERHGTQPDGSPRPYKGYKGNSNYCIEIVHNEKGKWQGEVISTFEAYQIVRQWGEKRLRHPRLSISEKPLIMRLMIGDMVRIQESEWLRTLRVVSINSAGNLTLAEHHEANTDARNRDSSNAWRYTNKVAGSLQKSRGRKITISPDGQVRDPGFTG

SEQ ID NO: 6185 - protein, 686 aa, synthetic construct
  REGION 1..686: note = Synthetic
MKMQDSVSKMKYRLGIDLGTTSLGWAMLRLDEQNEPYAVIRAGVRIFNNGRDPKTEASLAVARRLARQQRRTRDRKIRRKERLIGELVDMGFFPKDPVKRRQLASLDPFKLRTEALDRALSPEEFARAIFHLARRRGFKSNRKTDSGDTESSKMEEAIKRTLNELQNKGFRTVGEWLNMRHQQRLGTRSRIKNVPTGSGKQTTAYDFYLNRFMIEYEFDRIWEKQSQMNPGLFTNERKAILKDIIFYQRPLRPVEPGRCTFMPDNPRAPLALPQQQDFRIYQEVNNLRKIDPTSLLEVNLTLPERDRIVELLQRKPALTFDAVRKALCFNGTFNLEGENRSELKGNLTNCALAKKKLFGESWYSFDAHKRFEIVEHLLQEESEENLVSWLQKECNLSEEYAKNVASVRLPAGYGALCQEALDLILPYLKAEVITYDKAVQKAGMNHSELTLAQETGEILPELPYYGQYLKRHVGFGTGKPEDSAEKRYGKIPNPTVHIALNQLRTVVNALIRRYGKPTQIVIELARELKQNKKAKDQYRIEMNHNQNRNERIRADISMILGINPENVKRKDIEKQILWEELNLKDATARCCPYSGKQISAEMLFTDEVEIDHILPFSRTLDDSKNNKVVCIREANRIKGNRTPWEARKDFEKRGWSVEARMVGRSDDGTRPSNAESQAISLRRGRI

SEQ ID NO: 6186 - protein, 1046 aa, synthetic construct
  REGION 1..1046: note = Synthetic
MLHKMRYRLALDLGSTSLGWAMVRLNANQQPCAVIKAGVRIFSNGRNPKDGSSLAVTRREARSMRRRRDRLLKRKARMMRTLIEYGFFPVDETQRKALENLNPYALRTKGLDEALTPSEFARALFHINQRRGFKSNRKTDKKDSDGGALKTAIKQLHSVLDPQGNNGKPRTVGELLYKRFTDISKLPKDRTVRARYRQDKTVKDDGKTKIDKYYDLYIDRAMIEQEFDALWKKQSELNPILFTENARADLKDVLLYQRSLKPVKPGRCTFMPEEERAPLALPSTQRFRMYQEVNNLRILREGLKEESLTLQQRDDLINVLEKNNRRTFTQIKKLLGVGGSVQFNFEDPKREELKGNTTSAILGKSEHFGEAWFAFNEAKQDAIVLQLIKEENEAKLVRWLQDETGIDEKRAEVIANTGLPEGYGSLCIEALARILPELRRDVMTYDKAVQVAGFEHHSKLNRNEEIPDITFKIESIDRNSGEIKEFHLHKELPYYGEYLQRHVGFGSGKPEDSIEKRYGKIANPTVHIGLNQVRVVVNALIKRYGHPSEIIVEVARDLKQSKDRRDEENKRQAENQKRNERLRKDIADILGISEERVRRDDIEKMILWEELSFDPADRRCPYSGVQVSTVMLLSDEVEVEHILPFSQTLDDSLNNKTVALRQANRIKGNRTPWEAFGISDILGFDYAGILTRAELMPKAKRYRFAEDGYQRWLKDDAGFLARALNDTRHLSKIAREYMSLICPNTRVIPGQMTAMLRRNFGLNDVLGLNGEKNRNDHRHHAVDACVIAVTDQGLLQRFAAASASARERQLNRLVENMPLPWESYREHVQRAIDGIWVSHRPDHSHEGAMHNDTAYGLRGNGRVSFYKVVDGVREYVEENLKVIEIADAKAAKRHGLLPTGKPKPYKGYKGDSNYCIEIVRNEKGRWEGVVISTFEAYQLVRKHGAAQLQRSGLSISGKPLVMRLIIDDTVRLNVDGQSRTMRIAKLSGNGQIFMSNINEANVDARNRNKEDPFVYISKMAGSLQTAKARRITISPIGELRDPGFKE

SEQ ID NO: 6187 - protein, 1116 aa, synthetic construct
  REGION 1..1116: note = Synthetic
MCPAHRMAASPSCPSARTEPENSMDYRLAIDLGTTSLGWAVYRLNNEHAPVALIRAGVRIFSDGREAAKNGGVGAPLAVQRRMARGLRRRRDRMLRRKARMMRQLVDFGFFPKDLKARKALEKQYPNPYELRAAGMERELKPEEFGRALFHLNQRRGFKSNRKLDKVELDENGNEVTKASDETSKMKGAISEMRKTLRDQGLTAGQWLYRRMLTGAAVRNREILTQDKKGNDVIEKNYSLSIDRQIVTDEFDALWARQASFNPVLFNDAARDALRDTLLFQRPLKPVDPGRCTLLPDEQRAPLALPSSQRFRIYQEVNNLRIVDDRMQQTPLTKEQRDLIVNVLERGKPPTKATAKKTVDKAGKGGEGKTRTRRSSNNATFEYIRKLLEVSGTTRFNLEDDRREELKGNAASAALSRPECFGEAWFDFDDNLQDDIVCQLVNEDSEADLIEWLKQRTGVDDARAKVISNARLPEGYGNLSRKALNLIVPELRRDVITYDKAVEAAGLGSHSALGFSVEGEEQLPVIDPATGKPKVNEETGEIRMVLRHLPYYGKALQRHVSFGTNKREDPEEKRYGKIANPTVHIGLNQVRKVVNALIDRYGNPAEVVVELARDLKQSKKQREEIQREQTANEKRNKRIAEDIAGILGITPEGVRRDDIKRWILWEELSRDAADRRCPYSGEQISAEMLLSDQVEVEHILPFSRTLDDGMNNKTVCIRLANRVKGNRTPYEARADFERQGWKYEDILRRAASMPNKRKAARFAEDGYKRWLHEDKDFIARALNDTRYLSRLAKSYLGLVTKGHVRVITGSLTAMLRRHLGLNLLLGDTGEKNRNDHRHHAVDACVIGVTDQGLLQRFASANARADEAGTEQLVKNFQPPWPTFRDQVERAIGNIWVSHKPDHGFEGAMLEDTAHGIGKDGKTIIPSRTSSKANISSVNMISEPGQEARHGVDAEGHPLPYKGYVGGSNYCIEIFRNGQGKWEGEVISTFRAYQIVREAMRRGASREEAVRKLRDPKFAQNGASLVTRLMIDDAVRMSQSNGEGGGREVTMRIVKIASSSGQIFMAPINEANVDARNRDKDDPFKYTSKYASSFQKSHGRKVTVSTLGIVRDPGYSG

SEQ ID NO: 6188 - protein, 1023 aa, synthetic construct
  REGION 1..1023: note = Synthetic
MSHKMRYRLALDLGSTSLGWAMIRLNEKNEPNAIIKAGVRIFSDGRNPKDGASLAVNRRNARAMRRRRDRLLKRKARMMRALIEFGFFPEDEASRKALERVDPYALRAKGLDHALTPAEFARALFHINQRRGFNSNRKTDTKESDSSVMKGAINDLDSRLKAGEARTVGEWLYFRTQRGEPTRARRREAVIVKDDGKNKKLVSYDLYINREMIKAEFDALWSKQNALNPATFTEKIGETLKDILLHQRPLKPVRPGRCTLLPEEERAPLALPSVQRFRMYQEANNLRVLQKGLTEQPLTLAQRNQVIDALEQSGKQTFTQLKKLLGLGGAAKFSHEDVKRTELKGNGTSAALSKRTLFGKKWFEFDLATQDEIVRKIFSEESEVALVEWLKANTGVEEARAEQIANVGLAEGYGSLSSAALARILPELERDVVTYDKAVIAAGFEHHSNLNPSATGEILPELPYYGEPLQRFVGFADPRATENDPPEKRFGRIANPTVHIGLNQVRKVVNALIKRYGHPSEMIVEVARDLKQSKEQREEESKRQKANEDRNRRYRRDIAQALRMSEERVRRDDLQKVLLWEELNLGDAMDRKCPYSGTTISLTMLLSDQVEIEHILPFSMTLDDSLNNKTVALRTANRDKGNQTPWQAFGERSGAGYDYGAILARAELMPKNKRYRFGRDGYQQWLRDDKDFLARALNDTRYLSRVAREYVRLVCPAARVIPGQMTAMLRGKFGLNDVLGLNGEKNRNDHRHHAVDACVIGVTDQGMLGAFAKASADARTQRLNRLVENMPLPWDTYRAHVQRAVAAIWVSHRPDHSYEGAMHNDTAYGLLPEGRVRHHKPIEGKRTLVEEALKVIPFSSQRAGARHGFTGDGDPRAYKGYKGDSNYCIEIVRAESGKWEGEVISTYEAYQAVRELPPTARFPALRKPRQSLSGKPLVMRLVAGDAVRLVHKEETRTMRLIAVNSQGTLTFATVHEANVDSRNRDKQDSFAYTYKTAGSLSASQGRLVTISAIGELHDPGFRG

SEQ ID NO: 6189 - protein, 1028 aa, synthetic construct
  REGION 1..1028: note = Synthetic
LGWAIFRLSADNQPTALIKAGVRIFSDGRNPKDGSSLAVTRRAARAMRRRRDRLLKRKARMMGKLVEYGFFPADAAARKELEQKNPYELRAKGLHEALTPGEFARALFHLNQRRGFKSNRKTDKNESDSGALKTAIKQLRETLAASDCQTVGELLWKRLQAGQGTRARYRETRYTEDGKNKIDKSYDFYVDRQMVADEFDALWARQAALNPALFTEAARADLRDTLLHQRPLRPVKPGRCTLLPDEERAPLALPSQQRFRILQEVNHLRLLDAGLQETPLTLAQRDAIVDLLEASGKVSFKAIRKKLKLGDVVQFNLEDEKRTELKGNATTASLAKKNLFGPAWLDFDDAMQDEIVWRLVTEESEEALVRWLCETTGVDEARASAIANAGLPEGYGSLSRKALARIVPALREPEMVEGQALPRTYSQAVQAAGFAHHSDLSFDFEHGSDEVEQVGERTIASTGEIQPVYAFKQLPYYGKPLQRHVAFGTGKPEDPDEKRYGKIANPTVHIGLNQVRVVVNALIRRYGRPTEVVVELARDLKQSREQKLETQKRQADNQKRNARIRQSIAEILGCSEERVKHADVQKWILWEELSFDVADRRCPYSGVQISARMLLSDEVEIEHILPFSRTLDDSLNNRTVAMRHANRIKRNRAPWDAREEFEAQGWSYDGILLRAERMPLRKRYRFAADGYERWLGEDKGFLARALNDTKYLSRIAKQYLQLICPGSGVRVIPGQLTGMLRWHLGLNDVLGLDGEKNRNDHRHHAVDACVIGVTDQALLQRFASASELSHDEGRGKLAKDFQPPWPTYREHVQRAVENIWVSHRPDHGYEGGMMEETSYGIRKDGSIKQRLKADGTKGREISNLIRIAEASQPTRHGVDDEGNPLPYKGYVGGSNYCIEITRNEKGKWEGTVISTFDAYQIARQQGVQALRSATVGQNKQALVMRLTIDDCVRLEHEGRVRTMRVASINSAGRLSLAEHQEANVDARNRDPAGDWRYTYKQAGSLQKAKGRLVTISPIGELRDPGYRD

SEQ ID NO: 6190 - protein, 1020 aa, synthetic construct
  REGION 1..1020: note = Synthetic
MFPKLKFRLALDIGTTSIGWCLIKINEDYQPQAIIKMGVRIFSDGRNPKGGSSLAVTRREARQMRRRRDRLLKRKDRLLKALIKHKFFPTDETERQACVNLDPYELRRKALYERIEGKEFARALFHINQRRGFKSNLKIDKKDNDSGALKQAIIKLREKLATENCQTLGEWLAKRHEQGLSVRARLRGNTPKEKAYDFYADRAMIEHEFDLMWEKQSAFNPTLFNEMARVELKDILLFQRNLKPVRAGRCTLIPEEERAPLALPSSQLFRIYQEVNNLRIISEHLSDRCLTTEERNKVVNLLNQKNKVTFKAIAKTLQIPSGSSFNLEDIKRDSLKGNATAVNLAKPECFGDRWHLLPLAEQDLIVDKLLNEASESIVIGWLMNKYGFDENNAEEIANTTLPEGYGNLSKKALDKIVPHLIADVITFDKAVLAGGFETHSSLAYSQQTGEIMPSLPYYGEPLRRHVAFAKDNPKNDEEKYGKIANPTVHIGLNELRKVVNALIKRYGHPSEIIVEVTRDLKNSREKKLEIQKEQKVNQDRNEKLVQEACLALGLNADSLDRSKRRELSQKMQLWYELNIADPINRCCPYTGEQLSISKLLSNAVEIEHILPYSRTLDDSLNNKTVCVSRANRDKGDRTPYEAFGSSKVDGYDYDAILQRASLMSKNKAKKFAPDGYEKWLKEDKDFLARALNDTAYLSRIAKEYLSLVCPPNRVWAIPGRMTAMLRGIFGLNQFLSGDETKNRDDHRHHALDAAVIGITDRGMLQSVSKANARARGLRLNRLFENMPMPWVTYREQVENGLKHIIVSYKPDHGYQGAMHKETAWGLRANGIGTRRVKEEGASTRSRIEENLNLVEINSTNNIARHGLTEDGDMKAYKGYVGGSNFCIEICEVESGKWIGEVISTFKAYQVIRSLGEVAGYQRLMHSSLSQSEKKLVMRLMINDYVKLNHKGEDLLLRIVKISASNGQITFCEHHEANVDARNSDKANTFAYITKTAGSLKTSGAVKVAVNPIGKVVRLIN

SEQ ID NO: 6191 - protein, 1020 aa, synthetic construct
  REGION 1..1020: note = Synthetic
MYYRLALDIGSNSIGWAIFLLRRAEENSRLYPYAIARAGSRVFPDGRHPKSKLSNAVQRREARGHRRRRDRYLRRRSSMLRQLVKYGFFPKSLAERKTLVKLDPFELRARGLDYELSPEEFGRALFHINQRRGFKSNRKTDSKDTDSGVMKQAITAFKEKLKKEGARTVGEMLYKRIQEGLPVRARLRTYVIPQANGRNSNVKSYDLYIDREMMEEEFELLWESQRRFNPALYNDEAKQRLWSTVFYQRPLKQVSPGRCTFFPEEERAPVALPIAQKFKILQEANHLRYVGDEGQAIALTIEQRNIVVNELSKSKRRTFDALRKKLNFPGTVRFTIEDSKRTGLQGDTVFAELAKKTLYGQKWFSFDLTKQTEIIKHLLEEENESELINWLIKNTDIDPDVAMELARISLPSGYMSLSEKALNEIVPALEESVITYDKAVESTSIGNHSEVSKYHDGEIMDKLPYYGEILQRHVGFGTNNPEDSDEVRYGKINNPTVHIGLNQIRVLVNELIDEYGHPTEIIVELARDLKLGKEAKERIQKQQAENQKKNIERRDKISELLSIKPESVSREDLQKYILWEELSLNPLERCCPYTGKQIPCHKIYSSKVEIEHILPFSMTLDDSMNNKTLVYVEANRDKGNRTPYQAFGEQEVDGYSYEDILARTATMSKAKSYRFAKDGYQRWLRNHSGFLARALNDTSYLSRMAKEYLSVICPQSTTVIPGQLTALIRAHLGLNHILGLSGEKNREDYRHHAVDACVIGITDRALLKRFADANKYEHHGARSRLLERLPDPWPTYRKQVIRAIENIWVSHKPDHGHEGQMHNETAFGKVGPKQFRYFKRENDLREPVIRDNPEAMVSIKSRKAVDRHGVLKDGSPKPYKYYLKDSNYCIEIYREDDGKWAGHIVSTYDAYQIVRKAGVKVLRNPEYAQNGKPLVMRLMRNDMLRIEHNEKLMLVRVCKINSSGQMSFAEHFEANVATRSSGADKNFSYITKYPNSLKASKGRLVTVSPTGRLRDPGFKE

SEQ ID NO: 6192 - protein, 1123 aa, synthetic construct
  REGION 1..1123: note = Synthetic
MLGRPAAVARYQSERPHVAAVPFGASICRSSICLLADRAHIPSIERAEDILCRSLRQQGGDDMLKRMRYRLGLDLGTTSIGWCLIRLDGNDAPSAVIRMGARIFGDGRNPKDGSSLAVTRRLARQMRRRRDRLLKRKARLEAALIALGFWPSDHDGRRRLATLDPYVLRRDGLDKPLAPDHFGRAVFHLNQRRGFQSNRRTDRRDSESGLIKSAIHRLREQLAAQGARTVGEWLAQRHERRESVRARLRGRSARDKAYDLYVDRAMVADEFDRLWAAQASFDPVFYDDSKRQQLRDTLLHQRPLRPVQPGRCTLIPDQPRAALALPSTQRFRIYQELNHLRLIGPHLSEAPLSLEQRDELAGLLERGDVTFVKVLKALKLPSATRFNLQDAKRDKLKGNATTRELSKPDCFGEAWHAFTPALQDEIVERLLTEPSETVLVDWLTTRTGVDEAAGERIAAAGLVAGYGNLSRTAIASVLPELRRAVVTYDEAVRRAGFDSHSVLSHAERTGEVMDALPYYGEALQRHVAFGSGSTNDPPEVRYGRIANPTVHIGLNELRKVVNALIRRHGHPSEVIVEVARELKQGREQREREQERQAQRQRDNEVFREQIAALPGRAGQPVPAADLQLMRLWTELNPGDAANRRCPYTGEQISMAMLFSNEVEVEHILPFSMTLDDSLNNKTVALRRANRDKGNRTPFDAFGHSPAGYDYAGILERAALMPRDKAKRFAPDGYQRWLREDDDFLARALNDTAYLSRIAKEYLSLVCPPNRVRVIPGRLTAMLRGKFGLNTVLSANGAKNRDDHRHHAVDAAVIGVTDQGLLQRFAAASADARERQLDRLVESMPLPWPTYREHVARAVDRVVVSHRPDHGYEGALHNETAYGLRADGRVTHRVMLDSFRSAAEIEKRTFADEALKAWLLQRTAGLSGKAFAERIETLQRERGIRRAKLVEPLTVIPIRDANRVHRHGTDAHGEPRAYKGYKGDSNYGIEIWRDERGRWQGTVISTFDAHRIVREHGGGEHGWRRLRHPRLAQNGRPLVMRLTNGDCIRLELGGRMPLLTVAKISKNGQVFMAEHHEANVDARNRDKDSGFNYVSKMAGSFQSARARRVTVSPIGEVRDPGFPG

SEQ ID NO: 6193 - protein, 1148 aa, synthetic construct
  REGION 1..1148: note = Synthetic
MWSARTTWRCSKSRSNCRTRCVEVLWCRGGIWSCPVERRQGLWGIAETGGRLGSKKTKTPPAGSSIWCIFLRVSVQSAYPSEVIGCEYSTIRRYDSIYQGVQMDEASVYRLALDLGSSSLGWAVLRLDRSGAPTAIIKAGSRIFSDGRNPKDGSSLAVTRRAARIMRRRRDRLLKRKARMHDQLMRHGFFPADAAGRKVLERLNPYQLRAKGLHQALTPGEFARALFHINQRRGFQSNRKTDRKDNESGALKQAISELRAQIHDSGCATVGEWFWKERMQQKPEGVHRQGVRARYRETPYTTDEGRQRIDKRYDLYVDRAMIEQEFDALWAVQAALQPGLFTDAACKELRYTLLFQRKLRPVKPGRCTLLPEEERAPLALPSTQRFRILQEVNHLRLLDEALREVPLTLAQRDALVAALESQGKLGFAPMRKLLKLPGTVKFNLEDEKRTELKGNATSAILARKDLFGPAWAGFDAALQDEIVWQLVSEEGEGRLIAWLQQHTGVDEARAEAIADTSLPEGYGSLSRKALERIVPALQREVCSYDKAVQAAGFAHHSDLGFDFEHSGDEVQQVGERIIASTGEVRPLFAFKQLPYYGKALQRHVAFGSGKPEDPEEKRHGKIANPTVHIGLNQVRTVVNALIRRYGRPSEVVVELARDLKQSREQQQETQRKQAENQRRNTRIRERIAETLGISPERVRSSDIQKWILWEELSFDVVDRRCPYSGEQISTTMLLSPKVEIEHILPFSQTLDDSLNNRTVALREANRIKRNRTPWDARADFEARGWSYEGILHRAERMPLRKRYRFAPDGYQRWLGEDKDFLARALNDTRYLSRVAANYLRLVCPKPQGVRVIPGRMTAMLRAKFGLNDVLGLDGEKNRNDHRHHAVDACVIGVTDQGLMQRFARASAQAREDGLTRLVQDMPLPWPSYRDHVERAVRHIWVSHKPDHGFEGAMMEETAYGIRKDGSIKPRRKADGSAGREVVNLIRITESRQPVRHGVDSQGQPLPYKGYVGGSNYCIEITANDQGKWEGAVISTFEAYRIVRASGWGRLRHCSHGQNGRPLMMRLMIGDAVRLALDGSEKTMRVVKISANGQVFLVAPNEANVDARNRDKADPFAYVSKKAGSFQSAKARQVSISPIGELRDPGFKG

SEQ ID NO: 6194 - protein, 1053 aa, synthetic construct
  REGION 1..1053: note = Synthetic
LTRMRYRLALDLGSTSLGWAILRLGSDGAPCAMVKAGVRIFPDGRNPKDGSSLAVTRRAARAMRRRRDRLLKRKARVMQALIELGFFPSDRIERKARERLNPYELRAKGLDHALTPHEFGRAVFHLNQRRGFLSNRKTDKKDSDSGAMKTALSGMRLALDANGTDGKPRTVGELLHRRFTDATKPPRERTVRARYREARVPKEGGGTRIDKSYDLYMDRAMVRAEFEALWATQARFDPARYDAAAKQALDYRLWHQRPLRPVRPGRCTLMPEQERAPLALPSQQRFRILQEVNNLRWLDASLREHTLTLEQRDAVVHALERGNASFDTRIPKLTGLSGAAKFNLADAKRNELKGNVTSLRLAKKDLFGDAWHRFDEAQQDEIVMQLLTEESEAALVAWLQARCGLDEARAERVANASGLPEGYGSLSREALARVLPELRRGVVSFAEAAKGAGFHHSRLAANEEVPGRTFPIEKIVEGTGEIQQLHVFKELPYYGEFLQRHVGFADPDATEADLPEKRFGRIANPTVHIGLNQVRKVVNALIRRYGHPSEVIVEVARDLKQSREQRMDAQKRQADNQKRNERLRQQAAGLRGCAPEQVKHADIERLVLWEELSFDIASRRCPYSGVQISAQMVLSPEVEVEHILPFSQTLDDSLNNKTLATRQANRVKGNRTPWEARHDFAAQGWMHDDILARAQQMPRGKRYRFAEDGYQKWQQGGEAGQGRSFLARALNDTRHMSRVAREYLSLICPQDTRVIPGQMTAMLRAKFGLNHVLGVDGEKNRDDHRHHAVDACVIGVTDQGLLQRFARASADARQRQLGRLVETMPLPWPTYAEHVRRAVNNIWVSHKPDHGHEGALHNDTAYGLLPDGYVRFHKSVEGARTLQTESLRVIEMSAPKAAERHGRLPNGEPRPYKGHKGDSNYCIEIDRGDDGRWDWQVISTFDAYQRVRRDGIAGLRNSRLSARGGPLVMRLMIGDCIRAEFKGRLRVLVVKKIKSNGGIFVAEHQEANVRQREDAKDTSLVYGSFSANTLRKAAGRAVTVSPAGDLHDAGFRP

SEQ ID NO: 6195 - protein, 1017 aa, synthetic construct
  REGION 1..1017: note = Synthetic
MALLRRYRLALDVGSTSIGWAVLRLASDTNTPTAIMKAGVRIFPDGRNPKDGTSLAVTRRQARSARRRRDRLLKRKNRMLRQLIELGFFPATVEARKELEKLNPYELRARGLDEALTPAEFARALFHINQRRGFKSNRKTDKNENESGALKTAIKKVKEKIENSEARTIGEYLYKRMLNGETVRARLRQTRMAQDNGRDKIEKNYDLYIDRSMIEDEFEQLWQAQAHWNPVLFNESNKALLKNTLLFQRNLKPVKPGRCTFLPELERAPLALPSAQLFRIYQEVNNLRYLDEKFNLIPLNRQQRDSIVEELNKNQKRSFDQIRKKLGFSGAVRFNIEDDKRQDLNGNKTASILAKKSFFGNHWFTFPVNKQDEIVQKLLAEEDEANLIEWLINNTGVDEAKAESLSSVALPDGYGSLSYEAIGRILPHLQEEVITYDKAVLAAGFEHHSMLDASRDGEVHEELPYYGIPLERHVGFGSGKPEDSLEKRYGKIANPTVHIGLNQIRIVVNALIKKYGHPTEVVVEVARDLKQSKEQKDKERKQQAENQRNNARRREQIAGILGISEERVSRSDIQKMILWEELAYDPMDRKCPYSGVQISASMLFSPEVEIEHILPYSRTLDDGMNNKTLCMRLANRYKANKTPYEAFGTQEIAGFNYDEMVQRSKGMKKEKSYRFLPDGYEIWLKNDKDFLARALNDTRYLSKLTREYIKLICPNTWVIPGQMTARLRNQFGLNDVLGLHGEKNRNDHRHHAVDACVIGITDRSLLQQFSRANQQAREKGLERLVENVTPPWETYREHVERAVNNIWVSHKPDHSHEGGMHNDTAYSLLDEGYVGYHKNNNGQKEFIREKLAVLKMTSDKARERHGVLPDGSLRPYKGYKGDSNYCLEIVKNAKGKWDGEIVSTFEAYQVVRKHGDAVLRNREQSISGKPLVMRLIKGDMVRCEHDEKMMTLRIISIKSTGVIALTPHHEANVDARNRNPEDPFKYIYKTPSSLQKSQGRKITISLIGQVNDPGFKG

SEQ ID NO: 6196 - protein, 1016 aa, synthetic construct
  REGION 1..1016: note = Synthetic
LPAMRYRLGLDLGSSSIGWCMVRLNHSNQPCAIIRMGVRIFPDGRNPKDGSSLAVTRRMARQARRRRDRLLKRKTQLLTALVRLGFFPKDAGERKALAQLDPYVLRRKGLYEPLSPAEFARALFHINQRRGFKSNRKTDAKDKERSLMKKAINELRERLRQEDCKTVGEWLARRHEQGLSVRARLRGRTAKDKAYDFYIDRSLIEQEFDTLWEIQQGFNPDIFTDQARDELRDILLFQRPLKPVKPGRCTLIPEDERAPLALPSTQRFRIYQELNNLRLINPDMSERPLSLDERDKLADLLEKGNLTFGKIRRTLNLDSTTGFNLEDEKRDRLKGNATSLVLRKAACFGEAWDRFDPAWQDAIVEKLLNEPSESVLMHWLTENTEINSEQAETLANISLPEGYGMLGRQALARILPELRKAVVTYDKAVTNAGFDSHSALSHFQQTGEIMDRLPYYGEPLQRHVGFGTGEPDDPPEKRFGRIANPTVHIGLNELRKVINGLIEKYGHPSEIIVEVARELKLSRRRKQEIEKEQAARQKRNKALVKEACEILGYEPNHIDGAKLRELSQKMQLWTELNPRDVVERRCPYTGEQISINKLLSPEVEIEHILPFSMTLDNSLNNKTVCLRRANREKGNRTPFDAFGKQAVEGYDYDGMLQRARHMPRAKAWRFGPDAMQRWLRDEQDFLARALNDTAYLSRIAHEYLTLVCPQVRVIPGRMTAMLRGKFGLSTLLGDSPTKNRNDHRHHAIDAAVIAVTDQGLLQRFAKASANAREKQLDRLVENMPLPWPAYQEQVQRAVNTIRVSHRPDHGYQGALHEATAWGLRKDGKAVRHETPEGGGSRKARIKSADAMIPISSTGDPERHGKDVDGKPRAYKAYLGGSNYCIEIITNEKGKWQGEVVTTYEAYQIIRKYGEDKGWKRLRNPKQSQSGKPLVMRLMNGDMISMVNNDTRCLMRVCQIKRSKSIIFAPHNEANVDARNRDKTDPFSYISKTPGSLQKSRARYVTVSPIGNMKVYR

SEQ ID NO: 6197 - protein, 1024 aa, synthetic construct
  REGION 1..1024: note = Synthetic
MFYRLALDLGSTSLGWAMIRLNENNEPIAIIKAGARIFSDGRNPKDGTSLAVTRRDARAMRRRRDRLLKRKARMMRALIEHGFFPADEAERKALERLDPYALRARGLDEPLTPPEFARALFHINQRRGFKSNRKTDTKESDSSVMKGAINSLRALLASGEAHTRTVGEWLHMRTLAGDPTRARRREVVVTKDDGKNKKLVSYDLYIDRAMVEKEFDELWKKQSSLNPAVYTSAIGAELKDVLLHQRPLKPVRPGRCTFIPTEERAPLALPSVQRFRIYQEANHLRILGRGLEPVALTLEQRNIVADALERNGKQTFTQLKKLLGIGGSATFTHEDVKRTELKGDGTSATLSKPDQFGKTWFDFDDTLQDEIVMRILTEESEVALVNWLIERTKIDEQHAQNIANVGLAEGYGSVSRAALARVLPELRRNVEPPLTYDKAVIAAGFEHHSNLSPAATGEILDELPYYGEPLQRFVGFADPRATENDPPEKRFGRIANPTVHIGLNQVRRVVNALIRKYGHPAEMIVEVARDLKQNKEQREEDSKRQAANQFRNARYRSVIAKQLNIDENQVRRDDLQKVLLWEELNFGDALNRKCPYTGESISLGMLLSDQVESEHILPFSMTLDDSLNNKTVALRRANRDKGNATPWQAFGERTVAGYDYNAILARAELMPKNKRYRFGKDGYQQWLREDKDFLARALNDTRYLSRVAREYVRLICPGARVIPGQMTAMLRGKFGVNNVLGVSGEKNRNDHRHHAVDACVIGVTDQGMLQKFASASASARERGLGRLVEMMPDPWPTYRTHVARAVNAIWVSHKPDHSHEGAMHDTTAYKPPHLDNAKMWRTRGINGQNPNEKKADSEAMISITDGNTANRHAKDEHGIARSYKGYVGNSNFCIDIVLNGKGKWEGEVVSTFDAYQIVRADSVTRLRDRVLSISGKPLVMRLIVNDSVRLKVNGVLRTMRVAKISGNGQVFMSDCHEANVAARNSDAKDEFGYVSKMAGSLHTAEARRVTISEIGEVRDPGFKG

SEQ ID NO: 6198 - protein, 1061 aa, synthetic construct
  REGION 430..433: note = misc_feature - Xaa can be any naturally occurring amino acid
  REGION 1..1061: note = Synthetic
MLRKMHYRLALDLGSTSLGWAMIRLDANQQPCAIIKAGVRIFSNGRHPKDGSSLAVTRREARTMRRRRDRLLKRKARMMRTLIEYGFFPAEEAQRKALETMDPYALRARGLDEALTPSEFGRALFHINQRRGFKSNRKTDKKDNDSGALKTAINTLREILKTENCRTVGEWLHKRNEAGQTVRARYHQNKTIKDDGKTKIDKYYDLYIDRAMIEHEFDELWKKQAELNPTLFSEAARIDLKDVLLHQRPLKPVKPGRCTFMPDEERAPLALPSTQRFRIYQEVNNLRILREGLKEEPLTLEQRDKLVAKLERGNQSFKSAIPKTIGVSGAVGFNLADAKKTELKGNTTSAILGKKEHLGEAWFTFNETKQDAIVLQLVKEENEAKLIRWLQDQTGIDEKHAEVIANVGLPEGYGSLCTKALARILPELRXXXXDVITYDKAVQAAGFKHHSQLGSNIEISGITFKIESVDQDSGEIKEFHIHKELPYYGEYLQRHVGFGSGKPEDSIEKRYGKIANPTVHIGLNQIRVVVNALIKRYGHPREVIVEIARDLKQSKDQRDEESKRQTENQKRNERLRKDIAGILGISEERVRRDDIEKMILWEELSFDPADRRCPYSCVQVSTTMLLSDEVEIEHILPFSQTLDDSLNNKTVALRQANRIKGNYTPWEAFGARSISGFDYAAILARAELMPKAKRYRFAEDGYQRWLKDDAGFLARALNDSRYLSKIAREYMSLICPNTRVIPGQMTAMLRAKFGLNDVLGLNGEKNRNDHRHHAVDACVITVTDQGLLQRFAKASASARERQLNRLVEKMPLPWENYREHVQRAVENIWISHRPDHAYQGGIFDSTIYGLRGKGKATYRQEIDGQRQRPILNREVVSFTDDKAKSQSGYRHRLHKDGTPKPYMGLWSRSNYCIEIIKTESGGWSSEVIERYRAYQIVAKFDEARLRHPTLSIEGKPLIMRLLIDDYVRAENNGKTQLLCVLKINSTGAITFILHNESNISARYFAKLAAQKDQKAGKAFNAPALEDNFFQKSISPESLRGFKARRVTISPIGELSDSGFKE

SEQ ID NO: 6199 - protein, 1058 aa, synthetic construct
  REGION 1..1058: note = Synthetic
MQNRMRYRLALDLGSTSLGWAMIRLNADNQPCAVIKAGVRIFSDGRNPKDGSSLAVTRREARAMRRRRDRLLKRKARMLRTLIEYGFFPAEEVQRKALETLNPYVLRAKGLDEALSPAEFGRALFHINQRRGFKSNRKTDKKDNDSGALKTAISKLRETLKTENYRTVGEWLYKRDLAGKPVRARYHQDKEIKEDGKTRINKYYDLYIDRAMIEHEFDELWRNQAELNPSQFNEKARDDLKDVLLHQRPLKPVKPGRCTLMPDEERAPLALPTTQRFRMYQEVNNLRILRNGLKEEPLTLQQRDTLITALEENNKCTFTKIKKLLGVGGAVKFNFEDPKHEELKGNTTSAILGKNEHFGPAWFKLNETEQDAIVMQLLTEENEGKLVHWLQNETGVDEQHAEAIANAGLPEGYGSLCAKALALILPELRKDVVTYDKAVQAAGFEHHSKLTTNSEIPGVTVKVEIIDQDTGEIKAFHIHKELPYYGEYLQRHVGFGSGKPEDSPEKRYGKIANPTVHIGLNQTRLVVNSLIKRYGHPSEVIVEVARDLKQSREQRKEEQERQAKNQKRNERLRKEAAGILNISEEQVHRDDIEKMILWEELSDDIADRKCPYSGTPISATMVLSDEVEIEHILPFSQTLDDSLNNKTVAMRKANRVKGNRTPWDARQDFANQGWNFEDIVARAGNMRKEKRYRFAEDGYQRWLKDDKGFLARALNDTRHLSKVAREYLNLICPNTRVIPGRMTAMLRGKFGLNDVLGLHGEKNRNDHRHHAVDACVIAVTDQGLLQRFAKASASAREQQLNRLVENMPLPWESYREHVQRAIENIWISHRPDHAYQGGIFDATIYGLRGEGKATYRQEIDGQRQRPILNRDVVSFTDDKAKSLNGYRHGLLENGSPKPYMGLWSRSNYCIEIIRTENAGWTAEVIERYRAYQIVAQFGEARLHHPTLSISEQPLVMRLLIGDYVRAEVDGITQLMCVLKINSTGAITFVLHNESNISARYTAKLAAQKGRKAGKPFNLSALEDNFFQKSISPDSLRGFRARRVTISPIGELRDPGFKE

SEQ ID NO: 6200 - protein, 1013 aa, synthetic construct
  REGION 1..1013: note = Synthetic
MRYRLGLDLGSTSIGWAMLRLDADNNPCAVIKAGVRIFSDGRNPKDGSSLAVTRRLARAMRRRRDRLLKRKQRMLGLLIKHGFFPADESERKALELLDPYELRARGLDQALEPGEFARAVFHINQRRGFKSNRKTDKKDNDAGALKSAISSVREALDSAGCRTVGEWLHKRKINGQSVRARYRAYDVISDSGKKKQEFKYDLYIDREMVKQELALIWEKQASLNPALFTEVARRDIEDCLLFQRPLKPVKPGRCTLLPSEERAPLALPSQQRFRILQEVNNLRWIGDDLTEQSLTKTQRDKVVEALEKNGRRTFNQLRKLLGIDAEFNLEDAKRSDLKGNATAAILSKDDHFGSVWHVLSLSQQDRIVTQLLTEENTGTLVAWLIENTEIEEATAQRIAETRLPEGYGNLSEKALSKILPQLYSEVVSYADAVIKAGFEHHSNISHAATGEILESLPYYGEYLQRHVGFGSGNLEDTPEKRFGKLANPTVHIGLNQLRVVVNELIRRYGHPSEVIVEVARDLKQSQEQRREEQRRQAENQKRNERLRSQAAELLGITPDRVKIDDLHKLILWEELNLGNAADRRCPYSGLQISAEMLLGPEVEIEHILPFSRTLDDSLSNKTVSLRQANRIKGNRSPWESKEDFERMGWSAEAMIERAKKMPKNKRYRFGETAWTEWDKEGQGFLARALNDTRYLSRIAREYLSLICPQQTRVIPGQMTALLRRKFGLNNVLSHDGEKNRDDHRHHAVDACVVASTDQRLLQQFAKASANARSSQVGRLVDDMPLPWPSFREHVQRAVNQIWVSHKPDHGFEGAMHNDTAYGLLEDGMVKVRKNVDGVRVTEITKLNVIPISDQRKIDRHGQLPDGSPKPYKGYKGDSNYCIEIVRGDKNQWSSEVITTFQAYQVARKVESEGQRDKNLSSNQQPLVMRLMKDDCVFVTDNTDEKRLLRVVKIGSNGQIFLAEHYEANVDARNRDKTDSFSYISKTAGSLKNFHARMVAVSPAGFLRDPGFRG

SEQ ID NO: 6201 - protein, 1010 aa, synthetic construct
  REGION 1..1010: note = Synthetic
MNKMKYRLALDLGSTSLGWAMVRLKNSEPCAIIKAGVRIFSDGRNPKDGSSLAVSRREARAMRRRRDRLLKRKARMMKTLVHHGFFPDDPLKRKLFETLDPYQLRARGLTEPLKPEEFGRALFHINLRRGFKSNRKTDKNESDDNALKRAISTLKKAIVDENCKTVGEWLHKRNTKGLTVRARYRQTKVEKDDGKSEIFKSYDLYVDRGMIETEFDTLWEVQSGFNPSLFNETARDELKDCLLHQRPLRPVKPGRCTLLPEEERAPLALPSQQRFRIFQELNNLRIIGKDLEDIPLSIEQRNTLADALETNSKRTFTQIRKLLTLSGASTFNLEDVKRTELKGNATSSILSKKESFGDRWFEFTQEKQDQIVSQLVSEENEAKLINWLMKETKVNENTAEKIAKQGLPEGYGSLCLKALDRILPVLQKEVITYDKAVIAAGFDHHSNISHASTGEILPELPYYGEYLQRHVGFGTGNPDDVPEKRFGKIANPTVHIGLNQVRTVVNALIKRYGHPSEVIVELARDLKQSQDQKKEENQRQGENKKRNDRIRKTISEVLKIDEEQVRVADTQKVILWEELSNDVSMRICPYSGKQISISMLLSDQVEIEHILPFSRTLDDSLNNKTVATRQANRIKGNRTPWEAVADFNAQGWPVEGMLDRAELMPRNKRYRFGPDGYSKWLKEDKSFLARALNDTRHLSRVAKEYLSLICPQNTRAIPGQMTAMLRAKFGLNDILGLNGEKNRNDHRHHAVDACVIAVTDQGMLQRFAKASESTRERQLNRLVETMPLPWETYRESVSRAVNNIWVSHKPDHGHEGAMHNDTAYSLLTDGKVGVHKMVDGVRTFFESALKVIPITDPKATNRHGTLPNGEPKPYKGYKGDSNYCIEIIINEKGKWEGEVISTFEAYQIVKNYGLKALSNPTLGISGKPLVMRLMTNDCLKIKIGIEQKIVRVTKISSNGQIFLAPLNEANVDSRNRDKLDPFSYISKMPGSLKTCNAIKVSISPIGILNH

SEQ ID NO: 6202 - protein, 1013 aa, synthetic construct
  REGION 1..1013: note = Synthetic
MGTMRYRLALDLGSTSLGWAMVRLNAQDDPCAVIKAGVRIFSDGRSPKDGSSLAVSRREARAMRRRRDRLLKRKARMMKTLLAHGFFPQDVLARKALERLEPLALRAKGLNQALQPAEFARALFHINQRRGFKSNRKTDKKENDSSALKKAIGQLREAMQATGCRTVGEWLFARHQKGLPIRARYRENRITRDDGKTKVEKSYDLYIDRAMIEAEFDALWTKQAELNPMQFHETARAELKDCLLHQRPLKPVKPGRCTLMPEEERAPLALPSQQRFRIYQEVNNLRLIREGLTEEPLTTAQRDQIMQALETKPKVTFAQMKKLLGFSGQFNLEDDKRTELKGNASSTTLSKKEHFGATWAGMDAAQQDRIVMQLLIEENEATLIQWLQDNTGVDEITAERIANAALPEGYGSLSAKALDKILPALQREVITYDKAVIAAGFDHHSHISHAATGEILPTLPYYGEYLQRHVGFGSGKPEDPPEKRFGKIANPTVHIGLNQVRTVVNALIARYGHPSEVIVEVARDLKQSQEQRKEEQKRQADNQRRNERMREQIAGLLNTAPERVRTTDLHKMILWEELNRDNAADRRCPYSGVQISAAMLFSDEVEIEHILPFSQTLDDSLNNKTVAMRQANRIKGNRPPWQAKDDFASQGWTTADMLARAELMPQKKRYRFGENGYDQWLREDKGFLARALNDTRHLSRVAKEYLSLICPQDTRAIPGQMTAMLRAKLGLNDILGLNGEKNRNDHRHHAVDACVIAVTDQGMLNRFASASASARERQLNKLVDTMPLPWDNYREHVQRAIDNIWVSHKPDHGHEGAMHNDTAYGLLGSDRVHVRKVIGGQRVREESTLKVIPFANVKASDRHGLLPDGQPRPYKGYKGDSNYCIEIVRNDKGKWEGEVISTFEAYQLVRQGGVKRLRHPSLSCSGKPLVMRLMIDDSVLISIDGAKHVLRLAYMASAGTMAFAPCHEANVDKRTRTKELAYIFKTAGSLQKSEGRRVTISPIGEVRDLGFRR

SEQ ID NO: 6203 - protein, 1038 aa, synthetic construct
  REGION 1..1038: note = Synthetic
MTKMRYRLALDLGSTSLGWAMVRLTNASQPTPVALIKAGVRIFSDGRNPKDGSSLAVSRREARAMRRRRDRQLKRKARMMRTLVAHGFFPGDDAARKALQLINPYELRAKGLDQALKPEEFGRALFHINQRRGFKSNRKTDKKDNDAGALKIAISKLRQSLVDEHCRTVGEWLQKRDATGQTVRARYRQQRVERTDGKTSILKSYDLYIDRAMIEAEFDALWRKQAELNPVLFHDTARDELKDCLLHQRALKPVKPGRCTLLPDEVRAPLALPSQQRFRIYQEANNLRVLREGMKEEPLTLAQRDQLAAALERNPKRSFIQIKKLLGLGGEVQFNFEDPKRQELKGNATSATLSKNEHFGASWFDFSEDHQDAIVMQLVSEENEAKLIVWLQAETGVDEARAEAIANAALPEGYGSLSAKALIRILPPLRGAVQTYDKAVQAAGFEHHSRLNTFSEVPGLTFDTGIERIDPQTGEVQRIHAFNALPYYGERLTRHVSFGTGAITDPPEKRFGKIANPTVHIGLNQVRVVVNAILKRYGHPAEVIVEVARDLKQSQEQRKEDNERQAKNQLRNERLRADAAGILKIAPERVRHADIQKLILWEELSFDPADRRCPYSGAQLSAAMVLSDQVEIEHILPFSQTLDDGLNNKTVATRQANRVKGNRTPWAARDDFAVQGWDYIGILHRAEQMPRFKRYRFGEDGYEKWLKDDKGFLARALNDTRYLSRVAREYLSLICPQDTRVIPGQMTAMLRAKFGLNDILGLDGEKNRNDHRHHAVDACVIAVTDQGMLQRFAQASASAREKQLNRLVEDMPLPWPTYREHVARAVHNIWVSHKPDHGHEGAMHNDTAYALLGGGMVSVRKTVDGVRQKEVGALKVIEFSDSSALQRHGQLPNGEPRPYKGYKGDSNYCIEIVRNEKGKWEGEVISTFEAYQLVREHGAERLRHPSLSLSGKPLVMRLVKDDTIRLTHADARRLVRLAHANAAGIMAFAELHEANVDKRNRSKQLSYIFKTAGSLQKSSARPVPVSPLGELRDPGFKE

SEQ ID NO: 6204 - protein, 1056 aa, synthetic construct
  REGION 1..1056: note = Synthetic
MTKLQQTGKTPAAAGLPSMRYRLALDLGAKSLGWAMIRLDADGQPCAIIRAGVRIFSDGRRPKDGTSLAEQRRLARAMRRRRDRLLRRKARVRRLLVEHGFFPKDPAEQRLLERLNPYELRARGLDEVLTGPEFARALFHLNQRRGFKSNRRTDRATEDKQMGPLKAAIADVRSAIDAAGDGGRARTVGEWLWRRMREGLPVRARFRELRVQQADNRTRKTTQYDLSIDRAMVEAEFDQLWHAQARMEPALCSEAARTAIKDALLYQRKLHPVTPGRCTFLPEEARAALALPSTQRFRLYQEVNNLRVLDADLHERSLTIDERDRVIEALETHIKRTFTALKKLLRLPASSQFNLEDVKRVELRGNITSALLSKPDLFGDQWFHYPPDDQDRIVEHLLTEESETVLIDWLITHTGVDAQRAKAVAAVTLPAGYGHLSVAAIRRILPFLRHSVTSFAAAAREAGFHHSVLSENEAVDGRTVPIELINTTTGEVRTWHVCRQLPYYGEVLGRHVAFGSGKPEDPAEIRYGRIANPTVHIGLHQVQVVVNALLKRYGHPREVVVEVARELKQSWEQRREDQQRQADAQKRNDRLRADVASVFGLPHRVTSADIQKLILWEELSGDVLDRRCPYSGERLSMAMVLSDQVEVDHILPFSRTLDDSLNNKTLAIRGANRLKGNRTPWEARHDFEAQGWSDEGMALRAGRMPKQKRYRFAENGYQRWLQEDKDFLARALNDTRYLSRVALEYVRLTCPQDTRVIPGRMTAMLRARFGLNSVLGVTGDKNRDDHRHHAVDACVIGVTDHALLKRFADASASAKEHRLDRLVESMPLPWPSYRAHVERAVTHLWVSHRPDHSYQGAMHNDTAYSLRAEGRVAWHAYVDGRRERYEDRLTVIPITHAVHHARHGTLPDGTPRPYKGYKGDSNYCMEIVRGPKGRWLGRLVTTFEAYQAVRRSHGDAAVLRHPTRSLTGESLVMRLMKNDMVRLELDGETHTMRVVAIGANIILAELHEANADARNRDKDHAFRYTYKTADTLRQARGRRVTVSPIGDLTESGFRTD

SEQ ID NO: 6205 - protein, 1014 aa, synthetic construct
  REGION 1..1014: note = Synthetic
LPAMRYRLGLDLGSSSIGWSMVRLDQNSQPCAIIRMGVRIFPSGRNPKDGSSLAVTRRVARQARRRRDRLIKRKAQLMATLVRLGFFPDDAGERKALAQLDPYELRRKGLYEPLAPAEFARALFHINQRRGFKSNRKTDAKDKEGGLMKKAINELREHLKQEDCKTVGEWLARRHEQGLSVRARLRGRTAKDKAYDFYIDRSLIEQEFDILWETQQQFNPDVFTDQARDELRDILLFQRPLKPVKPGRCTLIPEDERAPLALPSSQRFRIYQELNNLRLNNPDMSERPLTLEERDLLADKLEKGNLTFKTIRRTLKLDSATDFNLEDEKRDRLKGNATSLVLRKAACFGKAWDEFDLAWQDAIVEQLLNEPSESVLIHWLTENAEINSEQAETLANISLPEGYGMLGRQALVRILPELGKAVVSYDKAVINAGFDSHSALSNFQQTGEIMDALPYYGEPLQRHVGFGTGEPDDPPEKRFGRIANPTVHIGLNELRKVVNGLIAKYGHPSEIIVEVARELKLSRKRKQEIERDQAARQKRNKTLVEEASKILGYAPEHIDGAKRRELSQKMQLWTELNPKDVVERRCPYTGEQISIERLLSPEVEIEHILPFSMTLDDSLNNKTVCLRRANREKGNRTPFEAFGKQPIEGYDYDGMLQRARLMPRAKAWRFGPDAMQRWLRDEPDFLARALNDTAYLSRIAREYLTLVCPQVRVIPGRMTAMLRGKFGLSTLLGGSPTKNRNDHRHHAIDAAVVAVTDQGLLQRFANASASARERQLDRLVENMPLPWPTYREQVQRAVDTIRVSHRPDHGYQGALHEAHAWGLRKDGNAVRHETPEGGGVRETKIRSADALIPISSTADPDRHGKDADGNVRPYKAYIGGSNYCIEIVANEKGKWQGEVVTTYEAYQIIRKYGEEEGWKRLRNPRQSQSGKPLVMRLMKNDLVMMKLYGAHTLMRLCKVGQSKQMFFAPHNEANVDARSREKSFQYISKMPGSLQKTDARYVTVSPIGDMKVYR

SEQ ID NO: 6206 - protein, 837 aa, synthetic construct
  REGION 1..837: note = Synthetic
MWNLRYRLALDLGSTSLGWALFRLDVCNRPMAIIKAGVRIFSDGRNPKKGASRVVARGAARAMRRRRDRLLKRKARMQTKLVEHGFFPAGIDARKALERLDPYALRAKGLREALAPGEFARALFHINQRRGFKSNRKTDKKDNDSGALKKAITQLRQQMVEQGSRTVGEYLWARLQRGQGVRARYREKPFTTDEGKKRIDKSYDLYIDRAMIEQEFDALWAAQATFNPALFHEAARADLKDTLLHQRRLRPVKPGRCTLLPEEERAPLALPSTQRFRIYQEVNHLRLLDESLCEMALTLEQRDAVVAALESKAKLSFEQIRKLLKLSGSVQFNLEDAKRTELKGNATSAALARKELFGAAWSGFDAALQDEIVWQLVTEEGEGALIAWLQAHTGVDEARAQAIAEVSLPEGYGSLSRKALARILPALRAAVITYDKAVQAAGFDHHSQLGFEYDPGDVEAQVNSETGEIRPVFKQLPYYGKALQRHVAFGSGKPEDPDEKRYGKIANPTVHIGLNQVRTVVNALIRRYGRPAQVVIELARDLKQSREQRQEAQRKQADNQRRNARIRRSIAEVLGISEERVRASDVQKWICWEELSFDVADRRCPYSGVQISAAMLLSDAVEVEHILPFSKTLDDSLNNRTVAMRQANRIKRNRTPWDARADFEAQGWSYDGILQRAERMPLRKRYRFASDGYERWLGDDKDFLARALNDTRYLSRVAAEYLRLVCPGSSTRVIPGQMTALLRAKFGLNDVLGLDGEKNRNDHRHHAVDACVIGVTDQGLMQRFATASAQARAPDRLIVAMQSRGVPFPAPDADRMAELVRSGDWARLKAADEGTRP

SEQ ID NO: 6207 - protein, 840 aa, synthetic construct
  REGION 1..840: note = Synthetic
MNYKTRVFGPSVSGSICAINNASARVRALKNVPTGSGKQTTAYDFYLNRFMIEYEFDRIWEKQSQMNPGLFTNERKAILKDIIFYQRPLRPVEPGRCTLMPDNPRAPLALPQQQDFRIYQEVNNLRKIDPTTLLEVTLTLPERDRIVELLQRKPALTFDAVRKALCFNGTFNLEGENRSELKGNLTNCALAKKKLFGESWYSFDAHKRFEIVEHLLQEESEEKLVSWLKRECNLSEESAKNTASVRLPAGYGALCREALDLILPYLKAEVITYDKAVRKAGMNHSELTLAQETGEILPELPYYGQYLKRHVGFGTGKPEDSAEKRYGKIPNPTVHIALNQLRTVVNALIRRYGKPTQIVIELARELKQNKKAKDQYRIEMNHNQIRNKRIRTDISKVLGINPENVKRKDIEKQILWEELNLKDATARCCPYSGKQISAEMLFTDEVEIDHILPFSRTLDDSKNNKVVCIREANRIKGNRTPWEARKDLEKRGWSVEAMTARAQAMPKAKRFRFAEDGYKVWLKDFDGFEARALTDTQYMSRVAREYLQLICPSQTWSVPGQLTGMLRRFLGLNDILGVNGEKNRDDHRHHAVDACVIALTDRSMLQRISTASARAENKHLTRLLESFPAPWATFNEHVTRAVKSICVSHKPEHAYQGAMNEQTAYGLRPDGYVKYRQNGKVEHKKLNVIPQVSVKGTWRHGLNSDGSLKAYKGLKGGSNFCIEIVMGEGGHWEGDVITTYEAYQIVRAKGEAALYGSVSRSGKPLVMRLMQKDIVEMTLADGRCKMLLYKIGQNKQMFFYRIENAGGGKEDVSKRPGSLQKTLAKKIIISPIGDFRKERL

SEQ ID NO: 6208 - protein, 1009 aa, synthetic construct
  REGION 1..1009: note = Synthetic
MGKMRYRLALDLGSTSLGWAMLRLNERDEPCAVIKAGVRIFSDGRNPKDGSSLAVTRRNARAMRRRRDRLLKRKARMKQALIELGFFPADEAQRKALETLNPYTLRAKGLDQALTPAEFARALFHINQRRGFKSNRRTDSKEKDSGHLKKAVGELRKAIEAENLRSVGELLERRRIAGLGQRARPKLNIRTGAVLGYDLYIDRAMIEQEFDALWAKQAELNPAQFTQTAGARLKDVLLFQRKLRPVTPGRCTLLPSLPRAPLALPSSQRARIYQELNHLRILNASLGEQALTLAQRDTLAAALDRHAKRSFTQIKKLLGLSGAVQFNFEDPKRQELKGNTTNAILGDAKHFGPAWFDFNEAKQDVIVQRLVTEESEAALIDWLQAETGIDESLAERIANAGLPEGYGSLSAEALARLLPALRAEVITYDKAVIAAGFEHHSQLSPSATGEILPTLPYYGEALQRHVGFGTGAPEDPPERRFGRIPNPTVHIGLNQVRTVVNALIERYGHPSEVIVELARDLKQSREQREEENKRQAERQTRNRKYRSEIAAHLSISEERVKADDLQKVQLWEELNLKNAADRCCPYSGAQIGFAMLFNGEAEIEHILPFSMTLDDSLANKTVALRQANRIKGNRTPWQAFGEHPQPGFDYAAMLLRAEAMPKNKRYRFAADGYQQWLRDDAGFLARALNDTRYLSRVAREYLSLICPQGTRVIPGQMTAKLRGKFGLNDMLGLRGEKNRNDHRHHAVDACVIGVTDQGLLQRFAQASASARERALDRLVDDMPLPWASYREHVARAVARIWVSHRPDHGFEGSMFKETAHGIRPDGSVVQRTRADSEAGRTVEYVAPVRAPQQLARHGLDDKGQPRAYKGYVPDGNHGIEIVRSESGRWQGEVTATFEAYRVARERGVDALSHPTQSLSGRPLVMRLMIDDFIKLEIDGRLRVMRIASINAAGRLSLADHQEANVDARNRDREGDWRYTYKQAGSLQAAKARRVTISPDGRLNDPGFAG

SEQ ID NO: 6209 - protein, 648 aa, synthetic construct
  REGION 1..648: note = Synthetic
MRCDYSFTAARTFNTSTVAATSCTRIMAAPRSAASIANAKLPDGYGNVSRQALGRILPELKRAVITYDKAVVAAGFESHSALSHSQQTGEILPELPYYGEPLQRHVGFGTGNPADPAEKRFGRIANPTVHIGLNQLRKVVNALIKRYGHPSEVIVEVTRELKQSREKRMEIQKEQAARQAQNTRWKEEIKEITGFDASVIDLQKMKLWTELNPGDVAGRCCPYTGSPISLTMLFSDEVEIEHILPFARTLDDSLNNKTVALRRANRDKGNKTPFEAFGHSPPGYDYEAILKRASAMFRDKAKRFAPDGYQRWLKEDKDFLARALNDTAYLSRIAREYLSLVCPHNRVRAIPGRLTALLRAKFGLNDVLGLRGEKNRNDHRHHAVDACVIGVTDQGLLQKVAQASSSTRERQVNKLVETMPEPFARFRDHVSRAIESIVVSHRPDHSYEGRLHNDTAYGLLGDGMVQYTRVVEGQRIREPEKLNVIEFAEPKANHRHGTLPDGSPRPYKGYKGDSNYCIEITRNQKAKWEGRAISTFDAYQIVRNQGLGALRNPAQSLNGLPLVMRLMKHDCVQLSIDGSKWLYQVAWVRSDGRIALAPLNEANVDARDRSKEDLFSYLVKTPGTLQQLKASFVTISPIGDVRALPSEG

SEQ ID NO: 6210 - protein, 714 aa, synthetic construct
  REGION 1..714: note = Synthetic
MPSKMRYRLALDLGTTSIGWAMLRLNQHDKPHAVIRAGVRIFNDGRVPKTGEALAVQRRLARQQRRTRDRSLRRKNKLINMLVRFGFFPENPAERKSLERLNPYELRAKGLEQQLKPEQFARALFHLAQRRGFKSNRKTDRGDTESGVMKAAIAETKQEIETLGCRTIGEYLYKRLQSGLGTRARLRDKPKVKGGSTKAYDLYTERSLVEKEFDVLWNVQSRFAPELFTLEKREALRDTIFHQRDLRPVKPGRCTLFPEEERAPLALPSQQRFRICQEVNNLRKIDEHLCSVELTRTEKAKLVQALSLARKKTFEQLRKTIGYEGQFNLEDAGAGRAELKGNETSVAIGKIIGKDWLNYSLSEQDKLVLMLLNIESESELIDKLQEEFGLSEAVAKKLSGTSLVSGYGALSRKAIDLILPFLEQGMTYDKAVAAADIPSHSDLTWQVKREVTDQLPYYGEVLQRHVGFGTGDPKDAPEVRFGKIANPTVHICLNQLRLIVNLIIKRYGRPDEVVIEVARDLKLSREKKNEIARKQKKNQEKRDQVRKEIAAILECDESLVTGEDIEKWLLWEELNPGRALDRCCPYTGKQISAVDLLSKSFEIEHILPRSRTLDDSRSNKTVSYWKANRLKSNMTPWEAREIFEAQGWSYEDILKRAENLPPNKRYRFGADGYKIWLREDSDFLSRELTDTQYISRIAREYVSLVCPKNTYLIP

SEQ ID NO: 6211 - protein, 1045 aa, synthetic construct
  REGION 1..1045: note = Synthetic
MKTEYQKSGSVLGLDIGPTSVGWALIEENEQQPCRLIDMGVRIFEAGVEGDIESGRDESRAAKRRMARLHRRQLERASRRLKVLAEELQRRSLLPPGDVSTPDARKRFFDELDKLLAQGLDNPALLPFILRARALHERLDPHETGRALYHLAHKRGFLSNRKSQPKEDEELNTIAQAVGQLRQAMQETGAQTPGEHFAALLRNNGRVRGHHTFRNMNAQEFDLIWDTQRAFHPDVLSDEARKSIGKKIFFQRPLKSNKGLTGRCELEGARRAPLALLVSQRFRMLQKVNDLRLVSPDGLQRELTASERAELLRHLELQQNMKFTAIRKKLKLQGKFNFEIGGEESLPGNRTAARMASVFGQQRWQSMTPGEQDLAVQHVRSIRKPEALERAAADYWKLDPNAARDFAKIPLEEGHVMLSQKAMVKLLPLMERGMPFATARKELYGAAPPPRAYDKLPPVHSPEMPAVTNPAVRRALTEMRKVVNAVTAKYGKPGLIRIELARDMKRPRKARQQISKRIRANKNKRDAARQQLLKEASGALGSAWEPKRSDIEKWLLRDECGGICPYTGKPISFHSLFVEPEFDIEHIIPFSRSLDNSFLNKTLCCATENRIKSKRTPWEAYGGTARWDEIIGRVRKFTGDANVAKLQRFQIRDADKEIDGFASRELNDTRYISRLAVQYAGLLYGAGADGVDPSGRRRVQAARGQITAHLRDVYELNSLLGDGGEKYRGDHRHHAVDALCVALTTPRAVKQLSDAAAAGEDRRRAWYDTRLITDPWPGFLDDARNAVNAIVVSHCPSRKVNSAMHDETVYSKPHADPMGRACVHVRKPLAALTDKMVDNIVDDRVREKVRQALNGRAPKDAFKDSASLPFFETRDHRRIPIKTARIRVYQSVNSLGRNAAARNVVPGSNHHVEIFAVEQEKGGVKWEGRMVTTIEAMARLHPKSRIPVVNRAHENGGKFLFSLSPGDTVRVTLDGEQKLLRLRTISKNNQGRLRLDAVCIREARKKAEIMQDKKWIIFPTLHALADMQFQKVTVTPLGEVFPCND

SEQ ID NO: 6212 - protein, 1036 aa, synthetic construct
  REGION 1..1036: note = Synthetic
MSIILGLDLGPNSIGWALIDSEQEKIISSGVRIFQEGVNNLNKGKEESKNATRRTKREIRVQNRRRRIRRQKLIPFLKELNLMPNDNETEFFKINPYEIRKKALYSQLSNFELGRVFFHLNQRRGFRSNRKTEVLAETAKDIEKEKETGKVKTSISNLEKEIKDGGFITLGEYLASLNPHEKRIRDRYTNRDMYLNEFDIIWEKQSKYYPDILTQENKSILRDQIIFYQRPLKSQRNKVGKCLFEPNHRRAAKSNPIFQEFRMLQQINSLTIYGGNRIEEHEQKLTFEEREKLIEYLSENYSINLDKPKTLIEVLGLDKRIKYRINLESYGKVDGLKTYCSIKKALGKELFSKYNDLELYKMWDVLYFATDREWLKTHAIKKWHFNEETAEKFSRINLEDKFGNLSTKAMRKMLPYLREGKLYHEAAELAGYKHSFWDKEVEIMDLLPEPEQVANPIVMQTLHQVKKVVNELIETYKKPDIIRVELGRDMKQPLKKRLEIEKINNEIRKKNNTIRDILIKDFNIERPTRDDIIKYKLWEECKFTCPYTGRSISKEQLFDSKEFEVEHIIPYSHSLDNSFMNLTLCEKRANEEKGNMTPYEYFLTKNIPESVIKQRVKHFPQPKARKFFAKEIEIDFINRQLNDTRYASKLAKDYLKHITPEVTCSTGSSTALLRYYWGLNSILSKSKGDNETDEIKNREDHRHHAIDAIVIACTDHSKLQRLSTYHGTDSTRYKDMKEDEKLKKHFPYPWKDFRNDIVNTIQNIIVSHRLNIRVSGALHEEILYGKLKDAFGNERMSESGYPVFAVRKTLKRLTQAEIHKIIDPEVKATIIERLEELGIDVSEKKFNIPKNAFAEPIYLTGKKTGIKTQIKSVRVERVTNAAFNIRGYNLWVEPGNNHHIIIFSENGKVCGKVVTLFEAYQRRSKKLPIIDKNLGPDKEFLYSLRINDLVIMGDIPNGFETLDQSTYHLIFDKVYRVRSIDRNNIIDFRKHFISILETLDKNGKKVYPGRLFAVPSTLNCKKIVISPIGIIEFSND

SEQ ID NO: 6213 - protein, 1081 aa, synthetic construct
  REGION 1..1081: note = Synthetic
MQILENITLGFDLGTSSIGWAILKTNQDKTVNEILDAGVWLFNAPETDDKERRITNQIRREKRLARRTVRRKRQRMNAIRELLYQAQLISTNSKEIISTLQKQKKTNPWLLRIQGLERQLTHEEFAITLYHISKHRGFKSNRKGGDKANVGEDKKLLGAMEKLENTLEKSFAYTLAHGLVKNPSSSIRLRNIAEEYGKTPKRIWLEDEIHEIFTKQREYQPNLATSELEENYIKIAFSQRELQDSIDLIGACPFEQGEKRASKQSPSFERFRFLQSLAHLKIYSPNQSQKSRKLTSDEIDKLDAQFGVRASFTYKKFREILDMPEEDYFEGISRKNSAGKDEESSDIITKRSASASGTSIFKKILGKLYDTVSVEELDKAASIISFYESASNLEKALESLAVSTEVKGILIQSVRENKFSKFKGAAHISAKACRALIPFLKQGMVYSEACEAAGYDHTAPDMSPLIQLKKETKNLSTSLIRRKISEKLTDKDSHIINSPVACKAVIEGIKQFVAIVNNHSSLNGCLPGKVHVELARQLGKSITERNKLDNAIKDGTARKQKEEEEFLELFPEYTPSKNALLLYALAKEQEFKCLYTGEPINPRLLFDGISYQVDHILPWSRFGDDSYQNLTLCTANANQAKKNNTPYEWMTSGEKNVPDFSYYSARVNLCSQLSRKKKRNYLLKNAQEVEETFRNRNLNDTQWASKVFLQCLDLFYPDENSVKTSRRIYARPGQLTSKIRQAWDAELYKKDEKGRRLTDDRHHAVDAIVVGCISESLLNRFTQENKQATDMGLKRPFKTFFQPFDNFRQQLANSYNKTVVARAEIVKVSGQKHLDTIRAFDKTSGVVFKRLSPTDLLISIKEQSEVLGLEEALKQKIKDPERNKAIIQDLIKWQVDNCPKDNLPKGPNGDPIRKIKVTTKDKIEVIVRSGSAARGDMARVDVYSKASKKGKKQYYIVPIYPHQINEDQPPHKAITAHKPESEWPVMDTSYHFEFSLHRRSYIKVTTSKNEVIEGYYVGIHRLTGSITISDHKSSGSKQTIGSRNLLKIEKYQIDRLGKYHFIKQEKQLWHGKIYTSANQQE

SEQ ID NO: 6214 - protein, 1071 aa, synthetic construct
  REGION 1..1071: note = Synthetic
MGESMRIAENLVLGVDLGIATLGWAILDSVDRCIVDAGVWTFNSPETDKEKTPTNQIRQQARSMRRVIKRRRQRMNQIRELLVSHSLLSHAGKGVVAEQLAQSKASPWLLRTEGLSRKLAGEELAACLYHIGKHRGFQSNRKGGDNAAAGEDQKALKAMEGLGNQIAGYRTFGEALFKDPELSKHKRNTPNNYGRTPRRDWLRHEVALLFDQQRQFGSDFATPELQAGFSTLAFTQRPLQDQADRVRDCPFEHGEKRASKHAPSFEKFRFLSKLVHLRLYMRGMDDWALSPEDIQTLEAKFGSVVKFTYKTVRDILDLDPNVRFRSVAKEDESNDIATRKSGSAVGTRALRLALGPWFDRLSSEQLDAAMFAIAFHEMNDSVATALGKFGLPQPALDRLNAAVANNDFKDVKGAAHISAKACRAVILGLRTGAVYSDACEVAGYDHSAPDASPLAQLKKQAAGLSPSEIRRLFSALMSDPKQTLIGSPVARKALTEAVKQFVALVNDHPALQGRLPGKVHVELARDVGKSATERNDIKNGIEKRNRTLDKAALDFETTFGRAPRRGTQDLLTFELAQEQGWKCLYTGEAIAPTRLFDGQTYQVDHILPWSRFGDDSFINLTLCLARANQAKKHRTPYEWATSGEAGAPDLDLFLARVETCKEMRGRKKRNYTLKNAAEVEALFRARNLNDTRWACKLYLQSLQLFYSSDEDARRLYARPGSLTSKARKAWGLERLKKDADGNRVEDDRHHALDAITVAAMSESMLQALTQAHQQAEDIGAARPFSRFDPPWPEFRGQAVAALGKILVARAEERRVSGQAHLETVRGLDEEAEVVFERLSPEKLLDQVKKDAEKSGWPAALEKRFARPERSRAIIGALLAWQEAGRPADKPPRGPTGDRIEKIKVIAPTARLAVKVRGGTADRGDMARVDIFSRPTPKGKKQYFLVPIYPHQVAGESTPPNRAVQAYASEIEWPIMDSSYQFEFSLVQKSWVEAIRSDGTVIEGYFRGLDRSTGAIAISPHITMQQVTKSIGARTLLNLSKYQVSRLGTKHSIAKEARTWRGEVFISGNQPE

SEQ ID NO: 6215 - protein, 884 aa, synthetic construct
  REGION 1..884: note = Synthetic
MTKVNARTMGEYFARYNPFDDSGQKIRSLYTLRAMYEQEFELLWVAQAKHYPDILTHSFRQTLLYDSYGVFWQRPLKSQDHLVGDCTLEAGEKRAPWVLLDAQRFRYLQKLNDTKVIPPDGGTPHALSPEQHALLAAELDREAALTMTRAKELLGLSNRYRFNMGEGGETRFVGNRTAARFSEILGDRWPQLPSDQQARLVADYLKSKDLPSPMQRSITEHGLDDKTAKKLAAIKLELGYCNFSRKALKKLLPHLREGFNLHDSIVNACYERPRPAPLDLLPPLMDNEKITYPPLLQAYGALRKDIRNPVVQRALTELRKVINAIVRRYGKPSVVRIELARDMKKNDEQRREIWKRNREQESRRDKAAAELLKECNIANPTRSDIEKVLLWQECGGATALCPYTGKPMTLTELFGTHPKFDIEHIIPFSISLDDSFLNKTLCDADYNRRVKANKIPFQLPSVDEMIARIERWPKSDTRELKLERFKMEDTADIEGFINSQLNDTRYASRLAMDYVSMLYGGKVDATGRTCVQVGKGQITHHIRNVWRLNTILNDGGQKSRDDHRHHAVDAVAIALTEPKTIKNLSDIAKRAKDRGERWFGREKPLFPWQSFMHDVVASIHGMTVSHRVSHKVNTAFHEQTIYSRQKDHDGKKCVHIRRTLGGNLRKSDLLNIVDDRIRQIVFEKIRSLGHNPDKIDDAKLQKMFGTSETLPVLQSKDGRSIPVKKVRVRKTESIITVGNNGRERNVSPGSNSHIEVFEVTDKKGKVKWDGWTVNSFEALQRQKSKQPVVNRIGKDETWKFKMSLAGGDIIELKSDENKRDLYVVKVVTVTRVGGKEYARIQYSAINDASKNPKNESSLLNPLYNELQCRKVFITPLGDIHCAND

SEQ ID NO: 6216 - protein, 1087 aa, synthetic construct
  REGION 1..1087: note = Synthetic
MANENKKFILGLDIGTNSIGWALLRAEKQGERLVPVGIERTGVRIFEAGVSGNIEQGRTESHAKARREARMLRRGVFRDAQRLKRAFRMLQKAGLLPGDPHRPAERDRIIKKLDAELRTTWEKKLTAEGMDAAAVKIAVHHNLPYFLRARGLDEKLEPYEVGRAFYQLAQRRGFKSARKNIKSKDEADSDPNMIEKAAKGLQAEMAKVNARTMGEYFARYNPFESYDLKIRGLYTLRAMYEQEFGLLWNAQAAYHPEILTPAFRQELLYDVYGVFWQRSLKDQSHLVGECNLETGEKRTPWALLDAQRFRYRQKLNDTRIIPPDGGESYRMSPEQYDILAGELEREAALTMTKAKELLGLTTRYRFNLGEGGETRFVGNRTAAKFIEVLGDRWLQLSSEQQNRLVADYLKSKDEPNPMQRSIEELSLDDKQARKLASIKLEPGYCNFSRKALEKLLPHLQEGFNLHDSIVHACYEKPQPAPLDLLPSLMDNAKITYPPLLRAYGALRQDIRNPVVQRSLTELRKVVNAIIRKYGKPAVVRIELARDMKKNDEQRREIWKRNRDVESRRTKAAAELLKECNITDPTRSDVEKVLLWQECGGPTALCPYTGKPMALSDLFGTHPKFDIEHIIPFSISLDDSFLNKTLCDADFNRRVKQNKIPGQLPGVGEMIERIERWPKSDTRDLKLERFKMTDMADIDGFLNSQLNDTRYASRLAMDYVGMLYGGKVDGAGRTRVQVGKGQVTHHIRNVWRLNTILNDGGQKSRDDHRHHAVDAVAIALTEPKTIKSLTDIAKRARERGERYFGREKPLFPWQSFMHDVTASIRRLTVSHRVSHKVNTAFHEQTIYSREKEYDGKKCVHIRRTLGGNLRKSDLPNIVDERVKEAVFARLRQHGFDPEKIDDSKLQKIFGTSENLPMLTTRTGRHIPIKKVRVRKMETVMTVGSNGKERNVSPGSNSHIEVFEVTDKKGKVKWDGWTVNSFEALQRQKNKQPVVNRVGKDKDWRFKMSLAGGDVIELQTTENKRELFVIKVISVARVNGKEYPRIMYTPINVAKPVKQESSLLDPLRKQLKCRKVAISPLGEIHDAND

SEQ ID NO: 6217 - protein, 1171 aa, synthetic construct
  REGION 1..1171: note = Synthetic
MTQKYSYSPKKYSLGLDIGTSSIGWAVLDLDKERIHDLGVRIFEKPEHPKSGDSLAKPRRDARSARRRLKRRRQRLNNLKQFFIDQNILTRDRIEEVLSDKSKFNKLDVYSLRSKALTEELSPEELFKVMYQIAKRRGFKSNRKVEEESEKEGGRVSKALKTNEKFLAENGYKTVGEALSRDENFASHKRNKRDDYTNSFSRSDFLHELEKIIEVQKRYALKNVSDTAINEMLYGLDDDKNVVNVSAIMYQRPFMTEELIEKMVGNCTFEENEKRAPRASYSFEIFRLASDLSHLVFIPRDASKRQAKRENLEIRLSSEQINKVIEAAKNQKSLTYKKVRSIAGISEDYVPKYTHGKKKDGDEFGEGNAFGGLKAYHDIKTALKNLPEDWAKIDNESTINQIAYILTTQKSDEGIKAELNALPISDDAKNAIIKIKATNFGSFCHLSIKALQKITPHILNGMTYDKACEAAGYDFKKQSASLEQITNPVVKRAISQTLKVVRAIERKYGKPYFIKVETARDLAKDLEERKKIKKENEENQGYNEDIKSIIADGYEASPKTKGGKQLLSHLKELSVPLNKNADFNGQQIIKVKLYREQNGICPYSGKPIDFDTMLQDDNAYQIDHIVPFSRSNNDGITNKVLVLTEENQKKSNKTPFEYFGADENRWKEFVARVESIYKTRDIKTDDKATNAINYKYNGYAMKKKQNLLLQDYKNDSWNVRALNDTRYITRFIQNYLRQNVDFAGDKGKQHVIAPNGTTTAYLRKRWGLAKDRSEDVLHHAKDAAVVAAISPKIIYQANLFSKEQEMKLYLNNAKTIDKKQQILLQSTDENTGEITDEATFTQTQKDLAQAEYFKLRSDKETKNRFPDPWTDFSKEIRKRSLNTDITTLQNELRGLDNYDEDFRLSVKPIFVSREIRHKIRGEAHESKLRSNRNRNGQNLIRVPLTELTLQRLENSLAKEEFDSQKNKNGSSLYEKLLARLNECNGDAKKAFNPPFKLYKGPKQDKNGNPISPVAAVKVYDKRGVVSVGRKANAPVALAEMVRIRVYKKDDQIYMIPDYRINILENKEPMELLKPFNGVSKIDNSFNFIGYLYKGDLITIQKDDQTFVGYFVQFEGDNRITIKSHLAADSSRNSKSTVKRESLSGINYLKIHKVDVLGDVHFSKGVVWPGAS

SEQ ID NO: 6218 - protein, 1159 aa, synthetic construct
  REGION 1..1159: note = Synthetic
MAEKSSYSPKKYSLGLDIGTSSIGWAVLDLDKERIHDLGVRIFERPEDPQNGDSLAKPRRDARSARRRLKRRRQRLNNLKQFFIDQNILTRDRIEEVLSDKSEFNKLDVYALRSKALTEELSPEELLKVMYQIAKRRGFKSNRKVEEESEKEGGRVSKALKTNEKFLAENGYKTVGEALSHDENFASHKRNKRDDYTNSFSRDDFLHELEKIIEVQKSYALKSVSDTAINEMLYGLDDDKNVVNVSAIMYQRPFMTEELIKKMVGNCTFEENEKRAPRASYSFEIFRLASDLSHLVFIPRDASKRQAKRENLEIRLSSDQINKVIEAAKNQKSLTYKKVRSIAGISEDYVPKYTHGKKKDGDEFGEGNVFGGLKAYSDIKAALKNLPEDWAKIDNEPTINQIAYILTTQKSDEGIKTELNALPISDDAKNAIIKIKATNFGSFCHLSIKALQKITPHILNGMTYDKACEAAGYDFKKQSASLEQITNPVVKRAISQTLKVVRAIERKYGKPYFIKVETARDLAKNFKERNAIKKENEENQGYNEDIKSIIADGYEASPKTKGGKQLLSHLKELSVPLNKNADFNGQQIIKVKLYREQNGICPYSGKPIDFDTMLQDDNAYQIDHIVPFSRSNNDGITNKVLVLTEENQKKSNKTPFEYFGADENRWKEFVARVESIYKTRDIKTDDKATNAINYKYNGYAMKKKQNLLLQDYKNDSWNVRALNDTRYITRFIQNYLSQNVDFAGDKGKQHVIAPNGTTTAYLRKRWGLAKDRSEDVLHHAKDAAVVAAISPKIVYQANLFSKEQEMKLYLNNAKTIDEKRQILLQSTDENTGEITDEAAFTQTQKDLAQAEYFKLRSDEETKNRFPGPWTDFSKEIRKRSLNADIATLQNELRGLDNYDEEFRLSVKPIFVSRMPRRKATGSAHKETIRSPKVKDGDQRTVRMPLKKVKRKDVENSTLKESDKWLYKKLLERLDACDDNPEKAFAEPIYKNDKKTDKNGNKLSPVSTIKVYSTQPSGFYINDDKAFVNNGSMVRLDVYQKPNKKGKIEHFFVPVYAHQVGKNRPAPTKILPAPKGFTDVDETFTKVCSLYPNDYVRCYFGNEIKEGYYVKYGINNGAMQVIFHSSVSKDKDQLIQISPRSANLIERYDISILGDNYRWL

SEQ ID NO: 6219 - protein, 1156 aa, synthetic construct
  REGION 1..1156: note = Synthetic
MRYSLGLDIGTSSVGWAILDLDKERIHDLGVRHFDVAEKIENHKAVSLAKPRRDARSARRRLKRRRQRLNNLKKFFVDQNILTKNQVEEVLDPESDYNRLDVYVLRSKAVTEELSPEELLKILYQIAKRRGFKSNRKVVEESDKEDGRVTKALKANEQFLIENNYTTVGDALSHDIKYAAHKRNKRNDYTNSFARSDFLCELENVIKVQQHYALKNIPAQAINDLIYGVSDGQVTNISAIMYQRPFTTKDLIEKMVGDCTFEKNEKRAPKASYSFEMFRLASDLVHLAFIPRNLSKRQARHDGLEIRLSPEQISKVIDTAKEQKSLTYRKVRSIAGISEDYVPKDTRGKKKDGDEFGEDNTFGGLKAYNDVRLALKDLPEDWAKIDNEPTINKIAYVLTTQKTDDGIRAELSQLPISDQAKEAIVKIKPTNFKAFGHLSIKALQKITPHILEGMTYDKACETAGYDFKKQSASLEQITNPVVKRAITQTLKVVRAIECKYGKPCFIKVETARDLAKSYKDRQRIEKDNKDNQGYNEDIKSIVADGYEASPKTKRGKQLLSHLRELNVPLNKNADLNGQQIIKVKLYREQNGVCLYSGKEIDFETMLRDDNTYQVDHIIPFSRSNDDKMTNKALVLTKENQDKGDKTPFEYFGADEKRWKEFTTRVESLYKTRDIKTSDKATNATNYKYNGYAMKKKQNLLTQAYKNEGWGASALNNTSYITRFVQNYLRQEVFPGETRQCVIAPNGTTTAYLRKRWGLAKDRSEDILHHAKDAAVVAAIDAKIVYQANLFSKEQEMKKYLANANTIEEKRQILLELTEKDTGEITDEEAFSKAQKDLAEAEYFKLRSDEKTQNRFPQPWPDFGKEVMKRTLNTDIATLQNELRGLDNYDDEFRLSIKPIFVSRMPRRKATARAHKETIFSPKIENNDQRTVRKPLSELTAKLLEKSVLVESDKLLYHQLRELLDKTATYDKDGKRTDHPEKAFSKPVYKGNRRTDKNGNQLSPVSTIKIYATKPDDSGKYINNQCGFVDNDSMIRVDVYMKYVDSREYPFFVPVYAHSIKNHSRKIRPALRGFSTIDETFKFVCSLYPNDYVKIKFDDTEKNVEGYYIQYGSSNAAIDILPMQAARKDQRIVCSARLATKIERLDINVLGDNYRWD

SEQ ID NO: 6220 - protein, 1155 aa, synthetic construct
  REGION 1..1155: note = Synthetic
MAQKSSYSPKKYSLGLDIGTSSIGWAVLDLDKERIHDLGVRIFERPEDPQNGDSLAKPRRDARSARRRLKRRRQRLNHLKQFFIDQNILTKYRVEEVLDYKSDFNKLDVYDLRAKALTEELSPEELLKVLYQITKRRGFKSNRKVVEESDKEGGRVTSALKTNEKFLADNNYTTVGEALSRDEKFALHKRNKRDDYTNSFARDDFLRELEAIIKTQQNYILKNVPEPAINELIYGIDDGQVTNVSAIMYQRPFMTKELIEKMVGKCTFEDGEKRAPKASYSFEVFRLASDLSHLVFIPRDASKRQAKRENLEVGLSPEQIKQVIELAKSQKSLTYKKVRSTAGISEDYVPKDVRGKKKDGDEFGEENVFGGLKAYNDIRLALKDLLEDWVKIDNESAINQIAYILTTQKADEGIRDELNLLPISDKAKEAIVKIKPTNFKAFGHLSIKALQKITPHILEGMTYDKACEAAGYDFKKQSASLEQITNPVVKRAITQTLKVVRAIERKYGKPYFIKVETARDLAKNFKDRNAIKKENEENQGYNEDIKSIITDGYEASPKTKGGKQLLSHLKEFNVRLNKNADFNGQQIIKVKLYREQNCVCLYSGKPIDFETMLHDDNAYQVDHIIPFSRSNNDGMTNKVLVLTEENQKKGNQTPFEYFGADEKLWKEYVARVGSTYQTREVKKGDKDAGINYKYNGYAMKKKQNLLLQDYKNDSWNVRALNDTRYITRFIQNYLRQNVDFAEGEEKQRVIAPNGTTTAYLRKRWGLAKDRAEDVLHHAKDAAVVAAIDQKIVMQANLYAKHHEIKALLAATKTMEEKTDKLTGEITDEDEFDKAQRRKAAILVLSSKHFPQPWDNFGKEVMKRTLNTDIATLQNELRGLDNYDEDFRLSVKPIFVSREIRHKIRGEAHESKLRSNRNRNGQNIIRIPLTELTLQRLENSLVKEEFDSQKNSNGSSLYEKLLARLNECNGDSKKAFNPPFKLYKGPKQDKNGNPISPVAAVKVYDKKGVVSVGRKANAPVALAEMVRIRVYKKDNQIYMIPDYRINILENKETMELLKPLKKVSKIDNSFNFIGYLYKGDLITIQKDSQTFVGYFVQFEGDNRITIKNHLAVDSSRDSKSTVKRESLSGINYLKIHKVDVLGDVNFSEGIVWPGAS

SEQ ID NO: 6221 - protein, 1133 aa, synthetic construct
  REGION 1..1133: note = Synthetic
MAQKSSYSPKKYSLGLDIGTSSIGWAVLDLDKKRIHDLGVRIFERPEDPQNGDSLAKPRRDARSARRRLKRRRQRLNHLKQFFVDQNILTKDQVEEVLSYKSDFNKLDVYELRSKALAEELSPEELLKVLYQIAKRRGFKSNRKVVEESDKEGGRVTSALKANEKFLADNNYTTVGDALSRDEKFAPHKRNKRDDYTNSFARDDFLRELEFIIKNQRNYALKNIPEQAINELIYGIDDGQATNVSAIMYQRPFMTRELIEKMVGNCTFEKDEKRAPKASYSFEMFRLASDLSHLVFIHRDASKRQAKRENLEVRLSPEQISKVIDAAKSQKSLTYKKVRSTAGISEDYVPKDVRGKKKEGDEFGEDNTFGGLKAYSDIRLALKDLPEDWAKIDNESAINQIAYILTTQKADEGIQAELDSLPLSDKAKEAIVKIKPTNFKAFGHLSIKALQKITPHILEGITYDKACEAAGYDFKKQSASLEQITNPVVKRAITQTLKVVRAIERKYGKPYFIKVETARDLAKNFKDRKAIENENKENQARNQSIIQTLNENGVVTPTGQQIIKVKLYREQNGVCLYSGKSIDFETMLRDDDAYQVDHIVPFSRSNNDGMTNKVLVLTEENQKKGNQTPFEYFGADEKRWKEYVARVESTYKTRDIKTADKATNAINYKYNGYAMKKKQNLLLQDYKNDSWNVRALNDTRYITRFIQNYLRQNVDFAESEEKQRVIAPNGTTTAYLRKRWGLAKDRAEDVLHHAKDAAVVAAINQKIVYQANLFSKEQEMKLYLNNAKTIDEKRQILLQSTDENTGEITDEATFTQAQKDLAQVEYFKLRSDEETKKRFPDPWPGFSKEVMKRTLNTDIATLQNELRGLDNYDEDFRLNVKPIFVSRMPRRKATAQAHKETIRSPKVKDGDQRTVRMPLNKIKRKDVENSVLKESDKWLYDKLLERLDAHGDNPEKAFAEPIYKNDKKIDKNGKKLSPVSTVKVYSTQPSGFYINNGKAFVNNGSMVRLDVYQKPNKKGKIEHFFVPVYAHQVGKNKPTPTKILPAPKGFTDIDETFTKICSLYPNDYVQCHFGNEIREGYYARFNINNGAMQVMPHDAANKSNDSLIQISPRSANLIERYDIAILGDNYRWL

SEQ ID NO: 6222 - protein, 1139 aa, synthetic construct
  REGION 1..1139: note = Synthetic
MELSKYSLGLDIGTSSVGWAVIDLEKERIHDLGVRIFERPEDPQNGDSLAKPRRDARSARHRLKRRRQRLNYLKRFFVNEKILTQAQIAEVLDPKSTYNKLNVYTLRDKALNYELTAEELFKALYQISKRRGFKSNRKVVEETDSEGGRVSKALTINEQLLAEKGYKTVGQALAQDEKYTEHKRNKRDSYTNSFARADFIHELEEIIKAQRSYALKSVSDEALRNLIYGVDSDGLLTNRSAIMYQRPFMTEGLIKKMVGECTFEKGEKRAPRASYSFELFRFANDLTHLVFIPKSTNKHQAKREQLQLTLNPEQIAAVVAEAKKTAKITYKKVRQVAGISEEYAPEYVRGKINKDDPYGEKNEFGKLKAYHDIKKALKSTPEDWTKVDNESTLNEIAYILTTEREDAGIIKKLSRLALSDEATYAILKINPKNFRSFGHLSIKALQKITPYILNGLTYDKACEKAGYDFRRKSASLEQITNPVVKRAISQTNKVVQAIIRKYGKPYFIKVETARDLAKNFKDRKAIENENKDNQAFNSEVKEIIEHGYNIKPKTKRGKNLLEFLRENNVPLSQNIDANGQMITKVKLYREQNGKCLYSGDPIDFQAMIHDDNAYQIDHIVPFSRSNNDGLTNKVLVKTEENQEKANRTPFEYFGGDEARWKQFAARVNATYQTRDVKTSDKATNSENYKFNGYAMRKKQNLLIEEYKNDSWNARALNDTRYITRFVQNYLRQTIDFAEGDDKQRVFAPNGTITSYLRKRWGLNKVREENVLHHAADATIVAAIDQRIIYRANLYAKRGEITEFLAAAKTMDEKTDKLTGEILDDDEFMKAQHRKDALQVLSDKHFPEPWSGFRDEVDLRTRNINRESLRKKLQGAHLYDEDFLSQIRPIFVSRMPRRKATAQAHKETIRSPKVKDGDQRTVRMPLNKVKIKDVENSVLKESDTWLYNKLISLLEINADNPEKAFAEPVYKNDKKFDRHGKPLMPVSTIKVYSTQPSGFLINKGKAFVNNGSMIRLDVYQKQNQKGKIEHFFVPVYAHQIGKNQPMPTKILPAPKGFTDVDETFTKVCSLYPNDYVLCRFGDKIKEGYYVKYNISNGDLQVINQTSADKDASNLIHISPRSATLIKRYDISILGDNAPRL

SEQ ID NO: 6223 - protein, 1130 aa, synthetic construct
  REGION 1..1130: note = Synthetic
MPKDITKKDFFMAEKSSYSPKKYSLGLDIGTSSVGWAVLDLDKKRIHDLGVRIFERPEDPQNGDSLAKPRRDARSSRRRLKRRRQRLNHLKQFFVDQNILTKNQVEEVLNYKSNFNKLDVYALRAKALTEELSPEELLKVLYQIAKRRGFKSNRKVVEESDKEGGRVTSALKTNEKFLADNNYATVGDALSRDEKFAPHKRNKRDDYTNSFARDDFLHELEAIIKTQQNYILKNVPEQTISELIYGIDDGQVTNVSAIMYQRPFMTKELIEKMVGNCTFEKDEKRAPKASYSFEVFRLASDLSHLVFIPRDASKRQAKRDNLEVRLSPEQISKVIDVAKSQKSLTYKKVRSTAGISEDYVPKDVRGKKKEGDEFGEDNTFGGLKAYSDVRLALKDLPEDWTKIDNESAINQIAYILTTQKADEGIRAELDSLPLSDKAKKAIVKIKPTNFKAFGHLSIKALQKITPHILEGMTYDKACEAADYDFKKQSASLEQITNPVVKRAIAQTLKVVRAIERKYGKPYFIKVETARDLAKNFKDRKAIENENKENQGRNQSIIQTLNENGIVTPTGQQIIKVKLYREQNGICLYSGKSIDFETMLHDDNAYQVDHIVPFSRSNNDGMTNKVMVLTEENQKKGNQTPFEYFGADEKRWKEFVARVESIYKTRDVKTSDKAANAINYKYNGYAMKKKQNLLLQDYKNDSWNVRALNDTRYITRFIQNYLRQNVDFAEGEEKQRVIAPNGTTTAYLRKRWGLAKDRAEDVLHHAKDAAVVAAIDQKIVMQANLYAKRHEIKALLAETKTMEEKTDKLTGEITDEDEFDKAQRRKATILVLSSKHFPQPWDNFGKEVMKRTLNTDNATLQNELRGLENYDDEFRLSIKPIFVSRMPRRKATAQAHKETIRSPKVKDGDQRTVRMPLSKIKRKDVENSALKESDKWLYDKLLKRLDTYGDNPDKAFAEPIYKNDKTFDKNGNQLSPVSTVKVYSTQPSGFYINNGKAFVNNGSMVRLDVYQKPNKKGKIEHFFVPVYTHQVGKNKPIPTKILPTPKGFTDVDETFTKVCSLYPNDYVRCYFGNKVMEGYYVKWNISSGVMSIISHYSPGKSKDKLREISPRSATLIERYDISVLGDNYRWL

SEQ ID NO: 6224 - protein, 1171 aa, synthetic construct
  REGION 1..1171: note = Synthetic
MLILLTLLITVIWLYNHTQLSTKGILHMAQKYSYSPKKYSLGLDIGTSSVGWAVLDLDKERIHDLGVRIFERPEDPQNGDSLAKPRRDARSARRRLKRRRQRLNHLKQFFIDQNILTKDQVEEVLNYKSDFNKLDIYALRSKALTEELSPEELLKVLYQIAKRRGFKSNRKVVEESDKEGGRVTSALKANEKFLADNNYTTVGDALSRDEKFALHKRNKRDDYTNSFARDDFLCELEAIIKTQRNYALKNVPEPAINELIYGIDDGQVTNVSAIMYQRPFMTKELIEKMVGKCTFEDGEKRAPKASYSFEIFRLASDLSHLVFIPRDASKRQAKRENLEIRLSPEQIKQVIDLAKSQKSLTYKKVRSTAGISEDYVPKDVRGKKKDGDEFGEENVFGGLKAYNDIRLALKDLPEDWAKIDNESALNQIAYILTTQKADEGIRAELDTLPLSDKAKEAIVKIKPTNFKAFGHLSVKALQKITPHILEGMTYDKACEAAGYDFKKQSASLEQITNPVVKRAITQTLKVVRAIERKDGKPYFIKVETARDLAKNFKDRNAIKKENDENQGYNEDIKSIITDGYEASPKTKGGKQLLSHLKELNVPLNKNADFNGQQIVKIKLYREQNGVCLYSGKSIDFETMLRDDNAYQVDHIVPFSRSNNDGITNKVLVLTEENQKKVDRTPFEYFGADEQRWEKFVALVETTYKTRDVKTSDKATNAINYKYNGYAMKKKQNLLLQDYKNDSWNVRALNDTRYITRFIQNYLRQNVDFAEGEEKQRVIAPNGTTTAYLRKRWGLAKDRAEDVLHHAKDAAVVAAIDQKIVMQANLYAKRHEIKALLAATKTMEEKTDKLTGEITDEDEFDKAQQRKAAILVLSSKHFPQPWDNFGKEVMKRTLNTDIATLQNELRGLENYDDEFCLSVKPIFVSRMPRRKATAQAHKETIRSPKVKDNDQRTVRMPLNKVKSRDVENSVLKESDKWLYNKLLERLDTHDNNPEKAFAEPIYKNDKKFDKNGKKLSPVSTIKVYSTQPSGFYINDGKAFVNNGSMVRLDVYQKPNKKGKIEHFFVPVYAHQIGKNKPAPTKILPAPKGFTDVDETFIKICSLYPNDYVRIYLKNKILEGYYSGYDISVGTMILYPHFTPSKDIKVANRVSARSATLIERYDIAILGDNYRWL

SEQ ID NO: 6225 - protein, 1183 aa, synthetic construct
  REGION 1..1183: note = Synthetic
MLVLLKLSITVIWLYNHTQLSTKGISRMAQKSSYLPKKYSLGLDIGTSSIGWAVLDLDKERIHDLGVRIFERPEDPQNGDSLAKPRRDARSARRRLKRRRQRLNHLKQFFIDQNILTKYRVEEVLDYKSDFNKLDVYDLRAKALTEELSPEELLKVLYQITKRRGFKSNRKVVEESDKEGGRVTSALKTNEKFLADNNYTTVGEALSRDEKFALHKRNKRDDYTNSFARDDFLRELEAIIKTQQNYILKNVPEPAINELIYGIDDGQVTNVSAIMYQCPFMTKELIEKMVGKCTFEDGEKRAPKASYSFEVFRLASDLSHLVFIPRDASKRQAKRENLEVGLSPEQIKQVIELAKSQKSLTYKKVRSTAGISEDYVPKDVRGKKKDGDEFGEENVFGGLKAYNDIRLALKDLLEDWVKIDNESAINQIAYILTTQKADEGIRDELNLLPISDKAKEAIVKIKPTNFKAFGHLSIKALQKITPHILEGMTYDKACEAAGYDFKKQSASLEQITNPVVKRAITQTLKVVRAIERKYGKPYFIKVETARDLAKNFKDRNAIKKENEENQGYNEDIKSIITDGYEASPKTKGGKQLLSHLKEFNVRLNKNADFNGQQIIKVKLYREQNCVCLYSGKPIDFETMLHDDNAYQVDHIIPFSRSNNDGMTNKVLVLTEENQKKGNQTPFEYFGADEKRWKEFMARVESTYKTRDVKTSDKATNAINYKYNGYAMKKKQNLLLQDYKNDSWNVRALNDTRYITRFIQNYLRQNVDFAEGEEKQRVIAPNGTTTAYLRKRWGLAKDRAEDVLHHAKDAAVVAAIDQKIVMQANLYAKRHEIKALLAATKTMEEKTDKLTGEITDEDEFDKAQQRKAAILVLSSKHFPQPWDNFGKEVMKRTLNTDIATLQNELRGLDNYDEDFRLSIKPIFVSREIRHKIRGEAHESKLRSNRNRNGQNIIRIPLTELTLQRLENSLAKEEFDSQKNSNGSSLYEKLLARLNECNGDAKKAFNPPFKLYKGPKQDKNGNPISPVAAVKVYDKKGVVSVGRKANAPVALAEMVRIRVYKKDNQIYMIPDYRINILENKETMELLKPLKKVSKIDNSFNFIGYLYKGDLITIQKDNQTFVGYFVQFEGDNRITIKNHLAVDSSRDSKSTVKRESLSGINYLKIHKVDVLGDVNFSEGIVWPGAS

SEQ ID NO: 6226 - protein, 1113 aa, synthetic construct
  REGION 1..1113: note = Synthetic
MKSMKYSLGLDIGTASIGWAVIDLEKQRIHDLGVRIFEKPENPKDGDSLAKPRRDARSARRRLHRRRHRLNNLKQFFVQQKILSDPQIKDVLDPRSKFNSVDVYKLRSEALTRELTPEELFKVLYHIGKRRGYKSNRKADEESDPEGGRVIKALSINQQLLADNKYQTVGQALAQDKAYQTHKRNKRDSYTNSFARADFLHELEEIVKAQKQYALHDVSQQSIRELIYGVNDNGELTEINAIMYQRPFMTEELIKKMVGECTFETGEKRAPKASHSFEVFRFAVDLSNLVFIPKSATKHHARKQGLRVQLNEQQIQDVINEAKKVRKITYKKVRNVAGLDEEYTPEYVRGKVSSEDPYGENNAFGSLEAYHDIRAALKDLPDDWQKVDNEDTLNQIAYILTVQRADDAIKKSLEPLPISDAAKKALLKIKPKNFRTFGHLSIKALQKITPHILAGKTYDKACEAAGYDFRKKAADLSQITNPVVKRAISQTNKVVRAIIRKYGKPYYIRVETARDLAKSYKDRQTIEAENKENQANNELVVERLKELGCITPTGLQVIKLKLYDEQNGKCLYSGKPIDLTTMLADDNAYQIDHIVPFSRSNNDGLTNKALVLTAENQNKADRTPYEYFGYDEQRWRAYCAQVEATYKTRDIKAAQGKDKAIAYKQNGYAMRKKQNLLIQEYKNDSWNVRALNDTRYITRFVQNYLRQTVDFADGDEKQRVFAPNGTLTSYLRKRWGLSKNREEDVLHHAKDAAVVAAIDQPVILRANLYAKKGEITNYLLAVKTMEEKTDKLTGEITDESGFNQAQRRKNALEVLSEDHFPKPWTDFDKEVRKRTLPKDTATVQNELIGLKNYDDAFRLQVQPIFVSRMPRRKATGKAHKETIRSPKAKDDDQRTVRMPLNKVKSKDVENSTLKESDKWLYNTLKDRLRQHGDNPEKAFAEPVYKNSKKQDKNGRPLSPVSTIKVYSTQPSGFYINDNKAFVNNGSMTRLDVYKKASKKGKTEHFFVPVYAHQVGKNRPTPTEILPKPKGFSHVDETFTKVCSLYPNDYIRCIFGDGRVEEGYYRGYNVANGQMDLLFHADANSDNIMRKNKRSAISIERFDISILGDNAPRS

SEQ ID NO: 6227 - protein, 963 aa, synthetic construct
  REGION 1..963: note = Synthetic
MKKFALHKRNKRDDYTNSFARDDFLCELEAIIKTQRNYALKNVPEPAINELIYGIDDGQVTNVSAIMYQRPFMTKELIEKMVGKCTFEDGEKRAPKASYSFEVFRLASDLSHLVFIPRDASKRQAKRENLEVRLSPEQIKQVIELAKSQKSLTYKKVRSTAGISEDYVPKDVRGKKKDGDEFGEENVFGGLKAYNDIRLALKDLPEDWAKIDNESAINQIAYTLTTQKADEGIRTELDTLPLSDKAKEAIIKIKPTNFKAFGHLSIKALQKITPHILDGMTYDKACEAAGYDFKKQSASLEQITNPVVKRAIAQTLKVVRAIERKYDKPYFIKVETARDLARNFKDRNAIKKENDENQGYNEDIKSIITDGYKASPKTKGGKQLLSHLKELNVPLNKNADFNSQQIVKIKLYREQNGVCLYSGKSIDFETMLRDDNAYQVDHIVPFSRSNNDGMTNKVLVFTEENQKKADRTPFEYFGTDEQRWEKFVALVETTYKTRDVKTSDKATNAINYKYNGYAMKKKQNLLLQDYKNDSWNVRALNDTRYITRFIQNYLRQNVDFAEGEEKQRVIAPNGTTTAYLRKRWGLAKDRTEDVLHHAKDAAVIAAIDQSIVRQANLFAKRGEIATLLAAAKTMEEKTDKLTGEIIDEDEFDKAQRRKDAAIVLSSKYFPQPWDNFGKEVMKRTLNTDITTLQNELRGLDNYDEDFRLNVKPIFVSRMPRRKATAKAHKETIRSPKVKDSDQRTVRTPLNKIKRKDVENSVLKESDKWLYNKLLERLDTHDNNPEKAFAEPIYKNDKKFDKNGKKLSPVSTIKVYSTQPSGFYINDGKAFVNNGSMVRLDVYQKPNKKGKIEHFFVPVYAHQVGKNRPTPTKILPTPKGFTDVDETFTKVCSLYPNDYVRCYFGNKIKEGYYVKYGINNGAIQVIAHGTTSKDKDHLIQISPRSANLIERYDISVLGDNYRWL

SEQ ID NO: 6228 - protein, 1157 aa, synthetic construct
  REGION 1..1157: note = Synthetic
MTQRSSYSPKKYSLGLDIGTSSIGWAVLDLDKERIHDLGVRIFERPEDPQNGDSLAKPRRDARSARRRLKRRRQRLNHLKQFFVDQNILTKDRVEEVLNYKSDFNKLDVYGLRAKALTEELSPEELLKVLYQIAKRRGFKSNRKVVEESDKEGGRVTSALKTNEKFLADNNYTTVGEALSCDEKFAPHKRNKRDDYTNSFARDDFLRELEAIIKTQQNYTLKNVPEQTINELIYGINDEQVINVSAIMYQRPFITKELIEKMVGNCTFEKNEKRAPKASYNFEVFRLASDLSHLVFIPRDASKRQAKRENLEVRLSSEQISKVIDLAKNQKSLTYKKVRSTAGISEDYVPKDVHGKKKEGDKFGEDNTFGGLKAYNDIRLALKDLPEDWAKIDNESAINQIAYILTTQKADEGIRAELDSLPLSDKAKEAIVKIKPTNFKAFGHLSIKALQKITPHILEGMTYDKACEAAGYDFKKQSASLEQITNPVVKRAITQTLKVVRAIERKYGKPYFIKVETARDLAKNFKDRNAIKKENEENQGYNEDIRSIITDGYEVSPKTKGGKQLLSHLRELNVRLNKNADFNGQQIIKVKLYREQNGVCLYSDKEIDFETMLRDDNAYQVDHIVPFSRSNNDGITNKVLVLTEENQKKGNQTPFEYFGADEKRWKEYVARVESTYQTREVKKGDKDTGTNYKYNGYAMKKKQNLLLQDYKNDSWNVRALNDTRYITRFIQNYLRQNVDFAEGEEKQRVIAPNGTTTAYLRKRWGLAKDRAEDVLHHAKDAAVVAAIDPKIVYQANLFSKEQEMKLYLNNAKTIDEKRQILLQSTDENTGEITDEVAFTRAQKELAQAEYFKLRSDEETKNRFPSPWPDFSKEIMKRTLNTDITTLQNELCGLDNYDEEFRLSVKPIFVSRMPRRKAVAQAHKETVRSPKVKDNDKRTVRMPLNKVKRKDIENSVLKESDKWLYDKLLERLNAHDNNPEKAFTEPVYKNDKKFDKNGKQLSPVSNIKVYSTQPSGFYINNGKAFVNNGSMVRLDVYQKPNKKGKIEHFFVPVYAHQVGKNKPTPTKILPAPKGFTDVDETFTKVCSLYPNDYVRCYFGNEIKEGYYVKYGINNGAMQVIAHGTASKDKDHLIQISPRSANLIERYDIAILGDNYRWL

SEQ ID NO: 6229 - protein, 1117 aa, synthetic construct
  REGION 1..1117: note = Synthetic
MAQKSSYSPKKYSLGLDIGTSSVGWAVLDLDNERIHDLGVRIFERPEDPQNGDSLAKPRRDARSARRRLKRRRQRLNHLKQFFVDQNILTKDRVEEVLDYKSDFNKLDIYALRSKALTEELSPEELLKVLYQIAKRRGFKSNRKVVEESDKEGGRVTSALKTNEKFLADNNYTTVGEALSRDEKFAPHKRNKRDDYTNSFARDDFLCELEAIIKTQRNYALKNVPEPAINELIYGIDDGQVTNVSAIMYQRPFMTKELIEKMVGNCTFEDDEKRASKASYSFEVFRLASDLSHLVFIPRDASKRQAKRENLEVRLSPEQIKQVIELAKSQKSLTYKKVRSTAGISEDYVPKDVRGKKKDGDEFGEENVFGGLKAYNDIRLALKDLPEDWAKIDNESAINQIAYILTTQKADEGIRAELDMLPLSDKAKEAIIKIKPTNFKAFGHLSIKALQKITPHILDGMTYDKACEAAGYDFKKQSASLEQITNPVVKRAITQTLKVVRSIECKYGKPYFIKVETARDLAKNFKDRKAIENENKENQARNQSIIQTLNENGIVTPTGQQIIKVKLYREQQGKCLYSGNPIDFETMLRDDNAYQVDHIVPFSRSNNDGITNKVLVLTEENQKKADRTPFEYFGADEKRWKEFAARVESIYKTRDVKTSDKATNAINYKYNGYAMKKKQNLLLQDYKNDSWNVRALNDTRYITRFIQNYLRQNVDFAEGEEKQRVIAPNGTTTAYLRKRWGLAKDRAEDVLHHAKDAAVVAAIDQKIVMQANLHAKRHEIKALLAATKTMEEKTDKLTGEITDEDEFDKAQRRKAAILVLSSKHFPQPWGDFSKEVMKRTLNADIATLQNELRRLENYDDEFRLGIKPIFVSRMPRRKAAAQAHKETIRSPKVKDNDQRTVRMPLNKVKRKDVENSVLKESDKWLYDKLLERLDAHDNNPEKAFAEPVYKNDKKFDKNGKQLSPVSTIKVYSTKPDDSGKYINNRRGFVDNDSMIRVDVYMKNIDGREYPFFVPIYAHSVNHPTRKIRPTLRGFSEIDETFKYICGLHPNDYVKIKFDDERKNVEGYYIQYGSSNAAIDLLPMYASGKDQRITCSARLAIKIERYDISILGDNYRWL

SEQ ID NO: 6230 - protein, 1113 aa, synthetic construct
  REGION 1..1113: note = Synthetic
MNNLKYSLGLDIGTTSVGWAVIDLEKQRIHDLGVRIFERPENPKNGDSLAKPRRDARSTRRRLHRRRQRLNHLKQFFIDQSILTDDQIKNILEPNSDFNKLDVYHLRAEALKRELTPEELFKVLYQISKRRGYKSNRKVDEESDAEGGRVIKALKVNQQLLANNKYQTVGQALAEDKAYQAHKRNKRDSYTNSFARADFLHELEEIIKTQKPYALRNVSQQDIQKLVYGVSNDGELTEVDAIMYQRPFMTEELIKKMVGECTFEVGEKRAPKASYSFEVFRFVSDLSNLVFIPKDATKRQAKKQNLHLKLSPEQIEAVLDEARKVRSMTYKKVRKTAGISDDYAPEYVRGKVTQKDPHGEGNKFGELKAYHDIRSALKDFPDDWQKVDNEDTLNQIAYILTVQRVDDAIKKSLEPLPISEKGKEALLKVKTANFKAFGHLSIKALKKITPFILGGLTYDKACEAAGYDFRKKSADLSQITNPVVKRAISQTNKVVQAIIRKYGKPYYIKVETVRDLAKSYKDRKTIEAKNKENQANNQKIIELLKEHGCVAPTGIQIVKFKLYKEQDGKCLYSGKPIDLKTMLADDNAYQVDHIVPFSRSNNDGLTNKVLVLTAENQNKADHTPYEYFGHDEQRWRSYCAQVEATYKTLDIKAAQGKDKAANYKYNGYAMRKKQNLLIQEYKDDSWNVRALNDTRYITRFVQNYLRQTVEFADGDEKQRVFAPNGTLTSYLRKRWGLSKDREEDVLHHAKDAAVIAAIDQSVILRANLYSKKGEIANYLYAVKAMEEKTDRLTGEITDDFGFDQAQRRKSALEVLSSNHFPEPWPDFGKEVRKRTLLKDTETLQNELVGLENYDEAFRRRVKPIFVSRMPRRKATGQAHQETIRSPKIKDNNQRTIRISLNKVKTKDVENSVLKESDAWLYNTLKDRLKQHDDNPEKAFVEPVYKNGKKQDKNGQPLSPVSTIKVYSTQPSGFYINNNKAFVNNGSMVRLDVYKKANKRGKTEHFFVPVYTHQVGKNRPTPTEILPKPKGFSHVDETFTKVCSLYPNDYVRCVFDGSRAEEGYYVKYNISSGAMTLNGHYSASKEQVKSVSARSASVIQRYDISILGDNAPRS

SEQ ID NO: 6231 - protein, 1152 aa, synthetic construct
  REGION 1..1152: note = Synthetic
MAQKYSYSPKKYSLGLDIGTSSVGWAVLDLDKKRIHHLGVRIFERPEDPQNGDSLAKPRRDARSARRRLKRRRQRLNHLKQFFVDQNILTKDRVEEVLDYKSDFNKLDVYGLRTKALTEELSPEELLKVLYQIAKRRGFKSNRKVVEESDKEGGRVTSALKANEKFLADNDYTTVGEALSRDEKFALHKRNKRDDYTNSFARDDFLCELEAIIKTQRNYALKNVPEPAINELIYGIDDGQVTNVSAIMYQRPFMTKELIEKMVGKCTFEDGEKRAPKASYSFEIFRLASDLSHLVFIPRDASKRQAKRENLEIRLSPEQIKQVIDLAKSQKSLTYKKVRSTAGISEDYVPKDVRGKKKDGDEFGEENVFGGLKAYNDIRLALKDLPEDWAKIDNESAINQIAYILTTQKADEGIRVELDALPLSDKAKEAIVKIKPTNFKAFGHLSIKALQRITPHILEGMTYDKACEAAGYDFKKQSASLEQITNPVVKRAITQTLKVVRAIERKYGKPYFIKVETARDLAKNFKDRNAIKKENEENQGYNEDIKSIITDGYEASPKTKGGKQLLSHLKEFNVRLNKNADFNGQQIIKVKLYREQNCVCLYSGKPIDFETMLHDDNAYQVDHIIPFSRSNNDGMTNKVLVLTEENQKKGNQTPFEYFGADEKLWKEYVARVGSTYQTREVKKGDKDAGINYKYNGYAMKKKQNLLLQDYKNDSWNVRALNDTRYITRFIQNYLRQNVDFAEGEEKQRVIAPNGTTTAYLRKRWGLAKDRAEDVLHHAKDAAVVAAIDQKIVMQANLYAKHHEIKALLAATKTMEEKTDKLTGEITDEDEFDKAQRRKAAILVLSSKHFPQPWDNFGKEVMKRTLNTDIATLQNELRGLENYDDEFRLSIKPIFVSRMPRRKATAQAHKETIRSPKVKDGDQRTVRIPLNKLTLDTLEKSVLVESDRVLFNQLKDLLDKTATYDKKGKRTDHPDKAFAESVYKNDKKFDKNGKKLSPVSTIKVYSTQPSGFYINNGKAFVNNGSMVRLDVYQKPNKKGKIEHFFVPVYAHQVGKNKPTPTKILPAPKGFTDVDETFTKVCSLYPSDYVKCYFGDNVEEGYYVTYDSGSGRITVMDAASPNKEGINRHRISPRSATLIERYDIAILGDNYRWL

SEQ ID NO: 6232 - protein, 1155 aa, synthetic construct
  REGION 1..1155: note = Synthetic
MLSITTLWLYNYAKRHHKKDLFMTEKSSYLPKKYSLGLDIGTSSVGWAVLDLDKERIHDLGVRIFERPEDPQNGDSLAKPRRDARSARRRLKRRRQRLNHLKKFFVDQNILTKDRVEKVLNCTSDFNKLDVYGLRSKALTEELSPEELLKVLYQIAKRRGFKSNRKVVEESDKEGGRVTSALNTNKKFLADNNYTTVGEALSCDEKFALHKRNKRDDYTNSFARDDFLRELEAIIKTQQNYTLKNVPEQTINELIYGINDEQVINVSAIMYQRPFITKELIEKMVGNCTFEKNEKRAPKASYSFEVFRLASDLSHLVFIPRDANKRQAKRENLEVRLSPEQISKVIDVAKSQKSLTYKKVRSTTGISEDYVPKDVRGKKKEGDEFGEDNIFSGLKAYNDIRLALKDLPEDWAKIDNESAINQVAYILTTQKADEGISAELDSLPLSDKAKEAIVKIKPTNFKAFGHLSIKALQKITPHILEGMTYDKACEAAGYDFKKQSASLEQITNPVVKRAITQTLKVVRAIERKYGKPYFIKVETARDLAKNFKDRKAIENENKENQARNQSIIQTLNENGVVTPTGQQIIKVKLYREQNGVCLYSGKSIDFETMLRDDNAYQVDHIVPFSRSNNDGITNKVLVLTEENQKKGNQTPFEYFGADEKRWKEFVARVESIYKTRDIKTSDKATNAINYKYNGYAMKKKQNLLLQDYKNDSWNLRALNDTRYITRFIQNYLRQNVDFAEGEEKQRVIAPNGTTTAYLRKRWGLAKDRAEDVLHHAKDAAVVAAIDPKIVYQANLFSKEQEMKLYLNNAKTIDEKRQILLQSTDENTGEITDEATFTQAQKDLAQAEYFKLRSDEKTKNRFPTPWPDFSKEVMKRTLNTDIATLQNELRGLDNYDEDFRLGVKPIFVSRMPRRKAAAQAHKETIRSPKIKDNDQRTVRMPLNKVKRKDVENSALKESDKWLYNKLLERLDAYGDNPDKAFAEPIYKNDKKFDKNGKKLSPVSTVKVYSTQPSGFYINDGKAFVNNGSMVRLDVYQEPNKKGKIEHFFVPVYAHQVGKNKPTPTKILPAPKGFTDVDETFTKVCSLYPNDYVRIYLKNKILEGYYSGYDISVGTLILYPHFTPSKDIKVANRVSARSATLIERYDIAILGDNYRWL

SEQ ID NO: 6233 - protein, 1168 aa, synthetic construct
  REGION 1..1168: note = Synthetic
MKPSKYSLGLDIGTTSVGWAVIDLEKERIHDLGVRIFERPEDPQNGDSLAKPRRDARSARHRLKRRRQRLNYLKRFFVNEKILTQAQIAEILDPKSTYNKLDAYALRDKALNHKLTAEELFKVLYQISKRRGFKSNRKSVEETDREGGRVSKALTINEQLLAERGYKTVGQALAQDEKYTEHKRNKRDSYTNSFARADFIHELEEIIKSQRKYALNNVSDEALHSLIYGVDSDGLLTNSSAIMYQRPFMTEELIKKMVGECTFEKGEKRAPRASYSFEIFQFANNLVNLVFVPKNTNSRQAKREHFRLTLSPEQIAAVVAEAKKTASITYKKVRQVAGISEEYAPEYVRGKINKDDPYGEKNEFGKLKAYHDIKKALKSTPGDWMKVDNESMLNKIAYILTTEHEDVEILNKLSELPLSDEAKCAILKINPKNFRSFGHLSIKALQKITPHILSGLTYDKACKKVGYDYRKKAANLEQITNPVVKRAIAQTNKVVRAVIRKYGNPYFIRVETARDLAKNFKDRKAIENENKDNQAFNSEVKEIIEHGYNVKPKTKRGKNLLEFLRENNVPLSQNIDANGQMITKVKLYREQNGKCLYSGDPIDFQTMIHDDNAYQVDHIVPFSRSNNDGLTNKVLVKTEENQEKANRTPFEYFGGDETRWKQFVARVNAIYQTRDVKTSDKAINSENYKFNGYAMRKKQNLLIEEYKNDSWNTRALNDTRYITRFVQNYLRQTVSFAEGDDKQRVLAPNGTITSYLRKRWGLSKVREEDVLHHAADAAIVAAIDNRIICQANLFSRDQELKLYTQTIKSIEEKKRILLKSTDQETGEITEEDQFSQAQREKAELEYIKQSMDENSKHRFPEPWVNFAKEIRKRTLDTDTETLRNELCGLEGYDDEFRSQVQPIFVSRRQNHKIKGSLHDERIRSSRNRERKNVIRISLQELTLEKLDRSIAKEEYDTQKKHSGDSLYERLLNRLNEYATYNNKGKRTDHPDKAFTEPFYKSNKSEDKNGKIIAPVRSLKIYDKQTIIRLDRGTAMAEMTRLRIYKKNKQIYIIPDYAINILKGRESMSLLTPLKGVSCIDSSYAFVGFLYKKDCMLFRKGNHMYAGYFVQFESDNRITIKRHLAPDSNRSNKEMVMRTKISGISDLKICHVDILGDKRPETGIVWPGA

SEQ ID NO: 6234 - protein, 886 aa, synthetic construct
  REGION 1..886: note = Synthetic
MYQRPFMTKELIEKMVGDCTFEKNEKRAPKASYSFEVFRLASDLSHLVFIPRDAGKRQAKRENLEVRLSPEQISKVIDLAKNQKSLTYKKVRSTAGISEDYIPKDARGKKKEGDEFGEDNTFGSLKAYSDISSALKELPEDWAKIDNESAINQIAYILTTQKADEGIRAELNTLPLSDKAKEAIVKIKPTNFKAFGHLSIKALQKITPHILEGMTYDKACEAAGYDFKKQSASLEQITNPVVKRAITQTLKVVRAIERKYDKPYFIKVETARDLAKNFKDRKAIENENKENQARNQSIIQTLNENGIVTPTGQQIIKVKLYREQNGVCLYSGKSIDFETMLRDDNAYQVDHIVPFSRSNNDGITNKALVLTEENQKKGNQTPFEYFGADEKRWKEFAARVESTYKTRDIKTADKATNAINYKYNGYAMKKKQNLLLQDYKNDSWNVRALNDTRYITRFIQNYLRQMIDFAKGEEKQRVIAPNGTTTAYLRKRWGLAKDRAEDVLHHAKDAAVVAAINPKIVYQANLFSKEQEMKKYLTNVKTIDEKREILLASTNKNTGEITDETTFTKAQRDLAIAEYFKLRSDEETKNRFPSPWPDFSKEVMKRTLKTDIATLQNELRGLDNYDEEFRLDVKPIFVSRMPRRKATAQAHKETIRSPKVKDNDQRTVRMPLNKIKRKDVENSVLKESDKWLYDKLLERLDAHDNNPEKAFAEPVYKNDKKFDKNGKQLSPVSTVKVYSTQPSGFYINNGKAFVNNGSMVRLDVYQKPNKKGKIEHFFVPVYAHQVGENKPAPIKILPAPKGFTDVDETFTKVCSLYPNDYVRIYLKNEIREGYYVKYNVANGAMQLLPNYATGKNQNTFVQVYGKNAQAIERYDVSVLGDNYRWL

SEQ ID NO: 6235 - protein, 819 aa, synthetic construct
  REGION 1..819: note = Synthetic
MKPSKYSLGLDIGTTSVGWAVIDLEKERIHDLGVRIFERPEDPQNGDSLAKPRRDARSARHRLKRRRQRLNYLKRFFVNEKILTQAQIAEILDPKSTYNKLDVYALRDKALNHKLTAEELFKVLYQISKRRGFKSNRKSVEETDREGGRVSKALTINEQLLAERGYKTVGQALAQDEKYTEHKRNKRDSYTNSFARADFIHELEEIIKSQRKYALNNVSDEALHSLIYGVDSDGLLTNSSAIMYQRPFMTEELIKKMVGECTFEKGEKRAPRASYSFEIFQFANNLVNLVFVPKNTNSRQAKREHFRLTLSPEQIAAVVTEAKKTASITYKKVRQVAGISEEYAPGYVRGKINKDDPYGEKNEFGKLKAYHDIKKALKSTPEDWVKVDNESTLNEIAYILTTEREDVEILKKLSGLALSDEATYAILKINPKNFRSFGHLSIKALQKITPHILSGLTYDKACEKAGYDFRRKSANLEQITNPVVKRAISQTNKIVQAVIRKYGKPYFIKVETARDLAKNFKDRKAIENENKDNQAFNSEIKEIIEHGYNIKPKTKRGKNLLEFLRENNVPLSQNIDANGQMITKVKLYREQNGKCLYSGDPIDFQAMIHDDNAYQIDHIVPFSRSNNDGLTNKVLVKTEENQEKANRTPFEYFGGDETRWKQFAARVNATYQTRDIKTSDKAINSENYKFNGYAMRKKQNLLIEEYKNDSWNTRALNDTRYITRFVQNYLRRTVSFAEGDDKQRVLAPNGTITSYLRKRWGLSKVREEDVLHHAADATIVAAIDQHVIYRANLYAKRGEVIRFLAAAKTMNEKTNKLTG

SEQ ID NO: 6236 - protein, 1144 aa, synthetic construct
  REGION 1..1144: note = Synthetic
MAQKSSYSPKKYSLGLDIGTSSVGWAVLDLDKERIHDLGVRIFERPEDPQNGDSLAKPRRDARSARRRLKRRRQRLNHLKQFFVDQNILTKDQVEEILNYKSDFNKLDVYALRAKALTEELSPEELLKVLYQIAKRRGFKSNRKVVEESDKEGGRVTSALKTNEKFLADNNYTTVGEALSRDEKFALHKRNKRDDYTNSFARDDFLCELEAIIKTQRNYALKNVPEPAINELIYGIDDGQVTNVSAIMYQRPFMTKELIEKMVGKCTFEDGEKRAPKASYSFEIFRLASDLSHLVFIPRDASKRQAKRENLEIRLSPEQIKQVIDLAKSQKSLTYKKVRSTAGISEDYVPKDVRGKKKDGDEFGEENVFGGLKAYNDIRFALKDLPEDWAKIDNESAINQIAYTLTTQKADEGIRTELDTLPLSDKAKEAIIKIKPTNFKAFGHLSIKALQKITPHILDGMTYDKACEAAGYDFKKQSASLEQITNPVVKRAIAQTLKVVRAIERKYDKPYFIKVETARDLARNFKDRNAIKKENDENQGYNEDIKSIITDGYKASPKTKGGKQLLSHLKELNVPLNKNADFNSQQIVKIKLYREQNGVCLYSGKSIDFETMLRDDNAYQVDHIVPFSRSNNDGMTNKVLVFTEENQKKADRTPFEYFGTDEQRWEKFVALVETTYKTRDVKTSDKATNAINYKYNGYAMKKKQNLLLQDYKNDSWNVRALNDTRYITRFIQNYLRQNVDFAEGEEKQRVIAPNGTTTAYLRKRWGLAKDRTEDVLHHAKDAAVIAAIDQSIVRQANLFAKRGEIATLLAAAKTMEEKTDKLTGEIIDEDEFDKAQRRKDAAIVLSSKYFPQPWDNFGKEVMKRTLNTDITTLQNELRGLDNYDEDFRLNVKPIFVSRMPRRKATAKAHKETIRSPKVKDSDQRTVRTPLNKIKRKDVENSVLKESDKWLYNKLLERLDTHDNNPEKAFAEPIYKNDKKFDKNGKKLSPVSTIKVYSTQPSGFYINDGKAFVNNGSMVRLDVYQKPNKKGKIEHFFVPVYAHQVGKNRPTPTKILPTPKGFTDVDETFTKVCSLYPNDYVRCYFGNKIKEGYYVKYGINNGAIQVIAHGTTSKDKDHLIQISPRSANLIERYDISVLGDNYRWL

SEQ ID NO: 6237 - protein, 1153 aa, synthetic construct
  REGION 1..1153: note = Synthetic
MKPSKYSLGLDIGTTSVGWAVIDLEKERIHDLGVRIFERPEDPQNGDSLAKPRRDARSARHRLKRRRQRLNYLKRFFVNEKILTQAQIAEILDPKSTYNKLDVYALRDKALNHKLTAEELFKVLYQISKRRGFKSNRKSVEETDREGGRVSKALTINEQLLAERGYKTVGQALAQDEKYTEHKRNKRDSYTNSFARADFIHELEEIIKSQRKYALNNVGDEALHSLIYGVDSDGLLTNSSAIMYQRPFMTEELIKKMVGECTFEKGEKRAPRASYSFEIFQFANNLVNLVFVPKNTNSRQAKREHFRLTLNPEQIAAVVTEAKKTASITYKKVRQVAGISEEYAPGYVRGKINKDDPYGEKNEFGKLKAYHDIKKALKSTPEDWVKVDNESTLNEIAYILTTEHEDVEILKKLSGLALSDEATYAILKINPKNFRSFGHLSIKALQKITPHILSGLTYDKACEKAGYDFRRKSANLEQITNPVVKRAISQTNKIVQAVIRKYGKPYFIKVETARDLAKNFKDRKAIENENKDNQAFNSEIKEIIEHGYNIKPKTKRGKNLLEFLRENNVPLSQNIDANGQMITKVKLYREQNGKCLYSGDPIDFQAMIHDDNAYQIDHIVPFSRSNNDGLTNKVLVKTEENQEKANRTPFEYFGGDETRWKQFAARVNATYQTRDIKTSDKAINSENYKFNGYAMRKKQNLLIEEYKNDSWNTRALNDTRYITRFVQNYLRQTVSFAEGDDKQRVLAPNGTITSYLRKRWGLSKVREENVLHHAADAAIVAAIDNRIICQANLFSRDQELKLYTQTIKSIEEKKRILLKSTDQETGEITEEDQFSQAQREKAELEYIKQSMDENSKHRFPEPWADFAKEIRKRTLDTDTETLRNELYGLEGYDDEFRSQVRPIFVSRMPRRKAAAQAHKETIRSPRVKDNDQRTVRIPLSKIKIKDVENSVLKESDAWLYSKLISLLEANDNNPEKAFAEPVYKNDKKFDKHRKPLMPVSTIKVYSTQPSGFLVNKGRAFVNNGSMIRLDVYQKQNQKGRIEHFFVPVYAHQVGKNQSTPTKILPAPKGFADVDETFTKVCSLYPNDYVRCYFKNTIEEGYYLAYDSASGRITVLNHSAANKEGDNRVRISPRSATLIKRYDISILGDNAPRS

SEQ ID NO: 6238 - protein, 897 aa, synthetic construct
  REGION 1..897: note = Synthetic
MVGNCTFEENEKRAPRASYSFEIFRLASDLSHLVFIPRDASKRQAKRENLEIRLSSDQINKVIEAAKNQKSLTYKKVRSIAGISEDYVPKYTHGKKKDGDEFGEGNVFGGLKAYSDIKAALKNLPEDWAKIDNEPTINQIAYILTTQKSDEGIKTELNALPISDDAKNAIIKIKATNFGSFCHLSIKALQKITPHILNGMTYDKACEAAGYDFKKQSASLEQITNPVVKRAISQTLKVVRAIERKYGKPYFIKVETARDLAKNFKERNAIKKENEENQGYNEDIKSIIADGYEASPKTKGGKQLLSHLKELSVPLNKNADFNGQQIIKVKLYREQNGICPYSGKPIDFDTMLQDDNAYQIDHIVPFSRSNNDGITNKVLVLTEENQKKSNKTPFEYFGADENRWKEFVARVESIYKTRDIKTDDKATNAINYKYNGYAMKKKQNLLLQDYKNDSWNVRALNDTRYITRFIQNYLSQNVDFAGDKGKQHVIAPNGTTTAYLRKRWGLAKDRSEDVLHHAKDAAVVAAISPKIVYQANLFSKEQEMKLYLNNAKTIDEKRQILLQSTDENTGEITDEAAFTQTQKDLAQAEYFKLRSDEETKNRFPGPWTDFSKEIRKRSLNADIATLQNELRGLDNYDEEFRLSVKPIFVSRMPRRKATGSAHKETIRSPKVKDGDQRTVRMPLKKVKRKDVENSTLKESDKWLYKKLLERLDACDDNPEKAFAEPIYKNDKKTDKNGNKLSPVSTIKVYSTQPSGFYINDDKAFVNNGSMVRLDVYQKPNKKGKIEHFFVPVYAHQVGKNRPAPTKILPAPKGFTDVDETFTKVCSLYPNDYVRCYFGNEIKEGYYVKYGINNGAMQVIFHSSVSKDKDQLIQISPRSANLIERYDISILGDNYRWL

SEQ ID NO: 6239 - protein, 1142 aa, synthetic construct
  REGION 1..1142: note = Synthetic
MAQKSSYPPKKYSLGLDIGTSSVGWAILDLDKERIHDLGVRIFERPEDPQNGDSLAKPRRDARSARRRLKRRRQRLNHLKQFFVDQNILTKNQVEKVLDYKSDFNKLDIYALRSKALTEELSPEELLKVLYQITKRRGFKSNRKVVEESDKEGGRVTSALKTNEKFLADNNYTTVGEALSRDEKFAPHKRNKRDDYTNSFARDDFLCELEAIIKIQRNYALKNVSEQAITELIYGINDEQVTNVSAIMYQRPFMTKELIEKMVGECTFEKDEKRAPKASYSFEVFRLASDLSHLIFIPRDASKRQAKRENLEVRLSPEQISKIIDVAKSQKNLTYKKVRSTAGISEDYVPKDVRGKKKEGDEFGEDNTFGGLKAYNDIRSALRALPEDWAKIDNESAINQIAYVLTTQKADEGIRDELNLLPISDKAKEAIVKIKPTNFKAFGHLSIKALQKITPHILEGMTYDKACEAAGYDFKKQSASLEQITNPVVKRAITQTLKVVRAIERKYGKPYFIKVETARDLAKNFKDRNAIKKENEENQGYNEDIKSIITDGYEASPKTKGGKQLLSHLRELNVPLNKNADFNGQQIVKIKLYREQNGVCLYSGKSIDFETMLRDDNAYQVDHIVPFSRSNNDGMTNKILVLTEENQKKADRTPFEYFGADEQRWEKFVALVETTYKTRDVKTSDKATNTINYKYNGYAMKKKQNLLLQDYKNDSWNVRALNDTRYITRFIQNYLRQNVDFAEGKERQRVIAPNGTTTAYLRKRWGLAKDRAEDVLHHAKDAAVVAAIDQKIVMQANLHAKRHEIKALLAATKTMEEKTDKLTGEITDENEFDKAQRRKAAILVLSSKHFPQPWGDFSKEVMKRTLNTDIATLQNELRGLENYDDEFCLSVKPIFVSRMPRRKATGSAHKETIRSPKVKDSDQRTVRMPLNKIKRKDVENSILKESDKWLYKKLLERLDAHDNNPEKAFAEPIYKNDKKFDKNGKKLSPVSTVKVYSTKPDDSGKYINNRRGFVDNDSMIRVDVYMKNIDGREYPFFVPIYAHSVNHPTRKIRPTLRGFSEIDETFKYICGLHPNDYVKIKFEDERKNVEGYYIQYGSSNAAIDLLPMHASGKDQRITCSARLAIKIERYDISVLGDNYRWL

SEQ ID NO: 6240 - protein, 1161 aa, synthetic construct
  REGION 1..1161: note = Synthetic
MLVLLKLSITVIWLYNHTQLSTKGISRMAQKSSYSPKKYSLGLDIGTSSVGWAVLDLDKERIHDLGVRIFERPEDPQNGDSLAKPRRDARSARRRLKRRRQRLNHLKQFFVDQNILTKNQVEEVLDYRSDFNKLDVYALRAKALTEELSPEELIKVLYQIAKRRGFKSNRKVVEESDKEGGRVTSALNTNKKFLADNNYTTVGEALNRDKKFASHKRNKRDDYTNSFARDDFLHELEAIIKTQRNYTLKNVPEQAISELIYGIDDGQVTNVSAIMYQRPFMTKELIEKMVGNCTFEKDEKRAPKASYSFEVFRLASDLSHLVFIPRDASKRQAKRENLEVRLSPEQISKVIELAKSQKNLTYKKVRSTAGISEDYVPKDVRGKKKDGDEFGEENAFGGLKAYNDIRSALKDLPEDWAKIDNESAINQIAYILTTQKADEGIRDELNLLPISNKAKEAIVKIKPTNFKAFGHLSIKSLQKITPHILEGMTYDKACEAAGYDFKKQSASLEQVTNPVVKRAITQTLKVVRAIERKYGKPYFIKVETARDLAKNFKDRKAIENENKENQARNQSIIQTLNENGIVTPTGQQVIKVKLYREQQGKCLYSGNPIDFETMLRDDNAYQVDHIVPFSRSNNDGIANKVLVFTEENQKKGDQTPFEYFGADEKRWKEFVARVESIYKTRDIKTSDKATNAINYKYNGYAMKKKQNLLLQDYKNDSWNVRALNDTRYITRFIQNYLRQNVDFAEGEEKQRIIAPNGTTTAYLRKRWGLLAKDRTEDVLHHAKDAAVVAAIDQKIVYQANLFSKEQEMRLYLDNAKTIDEKRQILLRSTDENTGEITNETTFTQAQKDLAQAEYFKLRSDTETKNRFPAPWPDFSKEVMKRTLNTDIATLQNELRGLDKYDEEFRLSVKPIFVSRMPRRKATAQTHKETIRSPKVKDGDQRTVRMPLNKIKRKDVENSVLKESDKWLYDKLLEKLDTHGDNPEKAFAEPIYKNDKKFDKNGNQLSPVSTAKVYSTQPSGFYINDGKAFVNNGSMVRLDVYQKPNKRGKIEHFFVPVYAHQVGKNKPTPTKILPAPKGFTDIDETFTKVCSLYPNDYVRCYFGNKIEEGYYTAYDSGSGQITIIDASSPNKEGLNRHRISPRSANLIERYDISVLGDNYRWL

SEQ ID NO: 6241 - protein, 1185 aa, synthetic construct
  REGION 1..1185: note = Synthetic
MLVLLKLSITVIWLYNHTQLSTKGISRMAQKSSYSPKKYSLGLDIGTSSVGWAVLDLDKERIHDLGVRIFERPEDPQNGDSLAKPRRDARSARRRLKRRRQRLNHLKQFFVDQNILTKNQVEEVLDYRSDFNKLDVYALRAKALTEELSPEELIKVLYQIAKRRGFKSNRKVVEESDKEGGRVTSALKTNEKFLADNNYTTVGEALSRDEKFAPHKRNKRDDYTNSFARDDFLCELEAIIKTQRNYALKNVPEPAINELIYGIDDGQVTNVSAIMYQRPFMTKELIEKMVGKCTFEDGEKRAPKASYSFEVFRLASDLSHLVFIPRDASKRQAKRENLEVRLSPEQISKVIELAKSQKNLTYKKVRSTAGISEDYVPKDVRGKKKDGDEFGEENAFGGLKAYNDIRSALKDLPEDWAKIDNESAINQIAYILTTQKADEGIRDKLNLLPISNKAKEAIVKIKPTNFKTFGHLSIKALQKITPHILEGMTYDKACEAAGYDFKKQSASLEQITNPVVKRAITQTLKVVRAIERKYGKPYFIKVETARDLAKNFKDRNAIKKENEENQGYNEDVKSIITDGYEASPKTKGGKQLLNHLKELNVRLNKNADFNGQQIIKVKLYREQHGKCLYSGNPIDFETMLRDDNAYQVDHIVPFSRSNNDRITNKVLVFTEENQKKADRTPFEYFGTDEQRWEKFVALVETTYKTRDVKTSDKATNAINYKYNGYAMKKKQNLLLQDYKNDSWNVRALNDTRYITRFIQNYLRQNVDFAEGEEKQRIIAPNGTTTAYLRKRWGLAKDRTEDVLHHAKDAAVVAAIDQKIVYQANLFSKEQEMRLYLDNAKTIDEKRQILLRSTDENTGEITNETTFTQAQKDLAQAEYFKLRSDTETKNRFPAPWPDFSKEVMKRTLNTDIATLQNELRGLDKYDEEFRLSIKPIFVSRMPRRKATAQAHKETVRSPKVKDGDQRTVRMPLNKIKRKDVENSVLKESDKWLYDKLREKLDTHGDNPEKAFAEPIYKNDKKFDKNGNQLSPVSTIKVYSTQPSGFYINKGKAFVNNGSMVRLDVYQKPNKKGKIEHFFVPVYAHQVGKNKPTPTKILPAPKGFTDIDETFVKVCSLYPNDYIRIYLKNEIREGYYVKYNVANGAMQLLPNYAPGKNQNTFVQVYGKNAQAIERYDISILGDNYRWL

SEQ ID NO: 6242 - protein, 1136 aa, synthetic construct
  REGION 1..1136: note = Synthetic
MYHITGKGYNDVMKYSLGLDIGTSSVGWAVLDLEKERIHDLGVRIFERPEDPQNGDSLAKPRRDARSARRRLKRRRQRLNHLKQFFIDQNILTKDQVEEVLDPESDYNKLDVYALRSKALTEELTPEELLKVIYQIAKRRGFKSNRKVVEESDKEDGRVTSALKTNEKFLTENGYATVGDALNHDEKFAPHKRNKRDNYTNSFARNDFLRELEAIIRAQRNYALKDVSEQAINELVYGINDGQVTNVNAIMYQRPFMTKELIEKMVGECTFEKGEKRAPKASYSFEVFRLASDLSHLVFIPRDTSKRQAKRENLEIKLSSEQIRKVIDAAKNQKGLTYKKVRSIAGISDDYVPKDVRGKKKDGDEFGEGNTFGGLKAYSDIRSALKDLPEDWAKIDNETMINQVAYILTTQKADQGIRTELNQLPLSDKAKEAIIRIKPTNFKAFGHLSIKALQKITPHILEGMTYDKACEAAGYDFKKQSVSLEQITNPVVKRAITQTLKVVRAIEHKYGKPYFIKVETARDLAKNFKDRKAIENENKENQARNQSIVQTLNENNIVTPTGQQIIKVKLYREQNGVCLYSGKPIDFETMLRDDNAYQIDHIVPFSRSNNDGMTNKVLVLTEENQKKSNKTPFEYFGADDQRWKEYAARVEAIYKTRDVKTADKATNVVNYKYNGYAMRKKQNLLLQVYKNDSWNVRALNDTRYITRFIQNYLRQMVDFAEGEEKQRVVAPNGTTTAYLRKRWGLAKDRTDDVLHHAKDAAVVAAIDMGIVYQANLFSKEQEMELYLANANTIDKKRQILLQSTDKDTGEITDENAFLKAQKDLAEAEYFKLRSDEETKNHFPQPWSDFSKEVMKRTLNTDIATLQNELRGLDNYDDEFRLSVKPIFVSRMPRRKATARAHKDTIRSPKAKDGDQRTVRMPLSKVKRKDVENSVLKESDQWLYDKLLERLDNHDDNPEKAFAEPIYKNDKKYDKNGKQLSPVSTIKVYSTQPSGFFINKGKAFVNNGSMVRLDVYRRPNKKGKIEHFFVPVYAHQVSKNKPAPTKILPAPKGFTDIDETFTKVCSLYPNDYVRIYLKNEIREGYYVKYNVANGAMQLLPNYAPGKNQGTFIQVYGKNAQAIERYDINVLGDNYKWD

SEQ ID NO: 6243 - protein, 755 aa, synthetic construct
  REGION 1..755: note = Synthetic
MKVDNESTLNEIAYILTTEREDVEILKKLSELALSDKATYAILKINPKNFRSFGHLSIKALQKITPHILSGLTYDKACEKAGYDFRRKSANLEQITNPVVKRAISQTNKVVQAVIRKYGKPYFIKVETARDLAKNFKDRKAIENENKDNQAFNSEIKEIIEHGYNIKPKTKRGKNLLEFLRENNVPLSQNIDANGQMITKVKLYREQNGKCLYSGDPIDFQAMIHDDNSYQIDHIVPFSRSNNDGLTNKVLVKTEENQEKANRTPFEYFGGDEARWKQFAARVNATYQTRDVKTSDKAVNSENYKFNGYAMRKKQNLLIEEYKNDSWNARALNDTRYITRFVQNYLRQTVDFAEGDDKQRVFAPNGTITSYLRKRWGLNKVREENVLHHAADAAIVAAIDQHVIYRANLYAKRGEIIGFLAAAKTMNEKTNKLTGEILDDDEFMKAQRRRDALQVLSDKHFPEPWSGFRDEVDLRTRNINIESLRKKLQGAHLYDEDFLSQIRPIFVSRMPRRKATAQAHKETIRSPKAKDNDQRTVRMPLNKVKLKDVENSVLKESDAWLYNKLISLLEANDDNPEKAFAEPVYKNDKKFDKHGKPLMPVSTIKVYSTQPSGFLINKDKAFVNNGSMIRLDVYQKQNQKGKIEHFFVPVYAHQIGGNQPTPTKILPAPKGFTDIDGTFTKVCSLYPNDYVRCRFGNKIKEGYYVKYNISNGDLQVINQTSVDKNASNLIHISPRSATLIKRYDISILGDNAPRS

SEQ ID NO: 6244 - protein, 1195 aa, synthetic construct
  REGION 1..1195: note = Synthetic
MGKRILGLDLGTNSIGWAVVDEVDGGFEIVKRDDGFEYRGVHIFQEGVKTEKGVESSKASERTGHRAARRIKFRRKLRKIQTLKALSEAGYCPALSIDELKDWQSKKIYPENPAFRAWCKTSEADSKNPYYFRWLAASEVLNLDKEEDRFKIGRVFYHMAQRRGFKSNRLDSTPDEESGVVKTEIAELSKKMGERTLGQYFWEDCYREGKPTRKVHTSRDDHYLAEFEVICEKQSIPADLKEKLLKAIFFQRPLKSQKGSVANCPFEPNKKRCPVSHPLFEEFRMLQVLNNIKIKFSESEEFRVLSEEEFEKAKAKFFRVSKANFDFKDISKELSKGKNKGAIFNYKDYQSLAGCPTISRLKTIFGEDYQSAISERYTGNRENKSAQDILNEVWNVLFSFNDEENVVSWATVNLGLDAEMAKKFAMIQLKQGYASLSLKAISKILPYLEQGLIYSHAVFFANLKKVVGTTIEEDPGLKADIEGLIDTHTQLTRALRSANELLREFKQSPYQFEQKYDLRDRTEFSDSVAAVVQCQINEHNGEFVPVPRLEERVAGYLVDRFGVPEGRTKSLYHPSKEETYKPAKRADDGKLYLESPCISSIKNPVFMRAMHRLKAVVNELLKQGVINDQTIVHVEMAREMNDANKRTALRRWNKKNENKRKGYAEQIEKDLERKAGDDEILKYKLWEEQSHRCIYCGNEISASQMLSAETEIEHTIPRSLCCDNSQENKTITHRECNRKKKNRIPFDCEDYDQILSRVQHWKDEADRLHFQVEKKVGASRAAATKEAKDSAIQARLLLQYERDYLREKYRRFTMEEVKAGFKNSQLVDTRIITKYARLYLNSLFKTVHSVSGKTTDACRKEWGLEEKSRDNHTHHTVDAIVCACLTRNQYDKLAAFYHDYESYEQNDPSVPRKPHLKKPWETFAEDMKVLKNEILVSHYVPNHLLKQTKKLLRKRGKVVTGKNGNPIVMQGKTARGSLHQDTFYGAIKRLDKESGKESTKYVVRKSLADLSESDLKKIVDDRVREIAQAGREKETCIIKAIEKLKKQRATSTEEREAELDAEIAEMESQLNGLYCLPNKNGAPVPIKKVRVYSPLTNPIELKGQRDVSQKKGREHKQKYYVGNDGNHQLAIYEGKNEKGKFGRTYRIANNLMASTGYVFPDKFGEMDLISVVHNGQLVLLFKESKEELICAYPQS

SEQ ID NO: 6245 - protein, 1342 aa, synthetic construct
  REGION 1..1342: note = Synthetic
MGKRILGLDLGTNSIGWGVVDDLGGGQFELVKRGVHIFPEGVKIEKGNESSKAAERTGYRSTRRLKFRRKLRKIETLKVLSEAGFCPTLSVEELKAWQSKKVYPENLAFRDWCKTSDPKDKNNGGFENPYYFRWLAATQMLNLDDETDRFKLGRVFYHMAQRRGFKSNRLDSTPEREDGVVKKDISELSEKMNGRTLGQYFWEECYQKGAKIRKVHTSRDDHYLAEFEFICEKQGVSDGLKEKLHRAMFYQRPLKSQKGLVAKCPFEPQKKRAPSSHPLFEEFRMWQTLNNIKIKTQDDDALRPLTEDEKTLIRPLFFRVSKSHFDFKDIAKAILKSLNPKKQKHAYVKSRDASSAHVLFNYRDDHSVSGCPLSAGLMRLFGDDYTQGLFDAYCGNKQDKVGNSKSNEDLLHEIWHVLFSFDDAEKVKEFAKAKLGLDEEGAEKFSKIKVPQGYGALSLKAIMKILPYLKQGLLYSHAVFFANLDQVIGVSANENESLKADISKLIDEHNQYSAEARCVNEFIREYKESPQAFEAKYDLRNVQGFEGELSKELRDSSESICQKIRIQTSGSNGNGEYTPVKRLDERVGDYLVKEFGVSTHALEQLYHPSAIETYKLAEKHPDGKYYLGDPRISSIRNPVFMRAMHRVKAVVNELLKQEVISEQTQVHVEMARELNDANKRAAIKKWQWNNEKRRKEYKAAIEEVLSGQGIDREASEDEILKYQLWEEQEHVCAYTGATIKSSDFIGENPRFDIEHTIPRSQSCDNSQENKTLCDREYNRTVKKNQIPFDCPDYEKILQRVEHWQDRVDELNKLIEKQRPKSKYASTKEAKDNAIQKRLVWEFERNYLREKYRRFTMEEVTRGFKNSQLVDTRMITKYARLYLKTVFPMVHTVNGKTTDDFRRCWGIEKSRDNHAHHTVDAIVVACVTRDQYDKLAHYYHEYESYGQNDPSIPTKPHFYKPWETFTEDMKSLKNEILVSHYAPNHLLKQTKKRAKVRGKMVMQQGKTARGSLHQETFYGAIKRMEKDKKGGVEEVVKYVVRKPLADLSDSDLKKIVDDRVREISIAGRKEESRLKKEIEVLAKKKATSDEVGELVIEQQIQSLESQLSGLFALPNKNGNPTPIKKVRIYSNLTNPIELKAQRDVSIKRPASHKEKYYVNNDGNYILAIYEGENSKGKLVRNSLIIENLKAVNSERGSLVPAEKEGLPLKCIIRGGMLVLLLKEDENSSDFWNMTHIQRAGRLYIIRGLDNDGIKLYFHQEARQTTEVLQHMNNVITESNRRNNIVDKKGDLKISKLTTPKGGDVLERSSDFPYVKFRPSNFNALLEGVDFRINALGDIEFMEE

SEQ ID NO: 6246 - protein, 1072 aa, synthetic construct
  REGION 1..1072: note = Synthetic
MGKPNVKSLSPYIIGLDLGSNSVGYSAVQTQGWEQLEDPTKFGIFLTGSHVFEEAGQDDNGKRTLNNQERRRHRLGRRTLRRRIQRRDDLYSIFANIKALPTDEAERDAVLTRHTHQGRNVQPLVLRTRALDEALTLEEFAKAICHLNRCRGYLSTRDLMANDIPAAYRKESQYADADEEDEQDEEDGEKLGIVLGGIKASYKAIRDGEARTYGELMTKVAENGVYTRHYTKRFSKPAKNETGRIPEPDTKKLPYRSDRALIKAEFHRIFDKQSHYHPGILTQELRVKLERIIFGQLPLQDTESLRKTCPAYEGSYCAPKTSDAFQRSRILQDLFNNFVVGTRPKKSKANGPVFEVQNTFTEAQLANLLPDLMDGIDLTIEEILKRVGLPEGEMTVTKKSGVAKRGKVFGHQTRRLLRELTNDAYSEWSAEDKAKVQDIINSAPWPNDAYNGLVRLGIMEDRTCAKIALAPFPAGYGEYSTKFLNKISERMIQTGEYEAIAKQKLFVPIREERAKRLKEQDLNPDADVEIKSSLIKLPKDLGLRNPIVERGIRRAVWVLNQLIYRYGIPEKIRVELPRDLTLSADKKKKIEDEIEKHRQSREKTITRLKGLGIEPTDINVKKARLLEECDYTLLYENEKTSYAHLDELEIDHAYPRSRLYVNDNRNLVLCRKSTNATKGNQLLWDFLGDDFARFQTRVKQCKNMSRGKQSWLCKTEEPDEEWLASQLAATGYIARELTSILTQLGVKVEISSGKATALLRYHWGLEKLFPDWIGYAKHIKKNKKDGVDEEFRQDSRTKNRSDHRHHAIDALVVALTDISTFQQISRAHRDLAPGEYKVDWNQTCPIRELRKFMKAHLDDIVVTSHTIKKVTGELHKQMPQREDLKNLPDHLKVGLPKSAITANGKLIRYDRDGKAAQVYPLGNNHHLTIYRSLEIDKKGEYDFHAEITTMIEVARRFRKKEPVYQASGDLLRRGYAKWVTLEKGEVVEFEDKPGVFYRVSALSAGSSFEAVFQLLSVATMDAGLRNQKWNGHEPILRFQSLKGVLQITRKVRLNAFGEVVHEVNPNENPQFH

SEQ ID NO: 6247 - protein, 1062 aa, synthetic construct
  REGION 1..1062: note = Synthetic
MSPEVKSYSEYILSLDLGSNSVGYAAIQTQGWDTLEDPSKFGVFLTGSHIFEEAGEDDKGKRTLKNQDRRRYRLGRRTYRRRVYRREELYKIFSQLGALPSDESQRDAVLTRHTHEGRNVQPWVLRARALDEALSLEEFAKAICHLNRHRGYLSTRDLMADKIPAEFRQKSQYAEEVDEEAEEDGEKLGVVLGGIKASYSAIASGQARTYGELMMKIASDGKYTRHYTKRFDKSQKDKTPEPETKKLVYRSDRALIRAEFHRIFDKQSNYHPAQLTQELRKQLEHIIFNQKELTGSEDKRKPCPAYEASLCAPKTSDAFQRSRIVLELFNNFTVGDKPKNSKLAVKTTLLRHTFSADQLSRLLPDLMDGIDLTVEEIISRAGADQGEITLNKRSGPKKFEKVYGHQTRRLLRELTEGAYANWNDETKSKVQDIINSAAWPSDAYTALIKLDIAEPSVCAKIALGPFPAGYGGYSTKFLNKISERMIETGEYEAIAKEELFKPIIEERLKRIRAADVNVLPDEESRTSLIKLPKDLGLRNPIVERGIRRAVWVLNQIIYRYGLPEKIRVELPRDLTMSAKNKYDLEVEIEKNRKGREAAIVRLKGNGIPVTDKNIRKARLWEESGGMLLYEGKNAPFSALEELEIDHAYPRSRLYINENRNLVLCEKSTNAAKGDQLLWNFLGEDFAKFETRVKQCKNMRSGKKRWLCETKVPDEQWLASQLAATGYIARELSKILVQLGVKVEVTPGKATALLRYHWGLENLFPAWDSYAEHLKSGGAEVDFSPSPKKKDRSDCRHHAIDALVVALTDVRTYQLISQAHKNLKPNESLKWGETCPIPNLRKYMIQHLDDIVVTRYTIKKVTGELHKQTPQREDLKKLDEALRTGEPRSTKVATGKLIRYDRDGKAAQVYPLKNNHHLTVYRGLEPNKKGAFEFKAEVTSLIEVAQRAKKKEPIYQHSGELASRGFAKWMTLEGGDIVEFLDLPGAFYRVRGLSLGAAFDAEFQLITSATMNKALRGKSYKDQQPLVRLQSVSKLGAIARKVQLNAFGEVIHEVNPHENPQFH

SEQ ID NO: 6248 - protein, 1001 aa, synthetic construct
  REGION 1..1001: note = Synthetic
MDRVLGIDLGTQSVGWALVDAPTVDGEIGSVVAMGSRVFPAGAETAGGKTKTTAQERRGARSMRRQIARRRKRKNLLRHELARVGLLPVNRAEQDVLFVDTHENQVAELIARAQRERVELYDLGRIAFHLSTRRGFLSLRKGGGGFGEEGNEEETEMSRFRRIQEAEFLRIWELQAESHPELTRALLFGTRGRLTYPIKPIEQARYLDHEALGPCDEFGVHGLVFFQRAVYWGEGTIGQCPLINGEVRCPRADRLAQRYRINLDLNNLRWRNGRDQVDLTTEQRELGFSKLWSQKQVKFSSLAKAMKLPADTEFNLARGGKDALAGNETDAALRAKGALGSSFDDLVENDKDRIVHILLGSGSVDELAARIEGETSLDSEKALLAADVRLPGGRMRFSRKALRRLLPEVEAGYRLSGKGADEFALQRAGFGNPFDRSAESNAVTIASAGIHIDALIPPVPRDITNPVVRTALTELRKVLRAIARTHGRFDVIRIEFAREAALSQDEIARKLREQNDNRKRNEAAQTEIEEAGGSPHDRVLARKVTLWHEQGEVCLYSGKQITLAQILSDNATEVDHILPRWRSLDNSYMNQAVCLTAENRDKGDRIPFEWLSSDPERWGGVVARAEALPQPKRNRVLQEELDQDQAIAEAALAQTRFAARQSRDWLEAAGFRVEPTRGQYTAELRRRWGLDKDASDHRRHARDAVAIALCDKRTLFYLANALKARANSFATREEASAGLEEPWPGFRADEQVAYDSILVSHKVRRKIRGKLHEETLYGPVGDGQVVIRRPLSAIDGAKKLGEVRDPGVRMALEESLSARGIDPTDKSFGRDPFPEATPPRLPGNTPIRSVRCLINRPAARRRGRHTVELVNLGNNYGGAVYRKASGGWGVIVTPMIDAIARVQRQELFTDLPDGSELLFTLAEGEVIRIQVATDKVAAGLYVVVRIDGGAHNRFGALELAASPTSADRNSAMKLLSAKALESGNARKVTVDAVGVEQRATG

SEQ ID NO: 6249 - protein, 998 aa, synthetic construct
  REGION 1..998: note = Synthetic
MMKGLPMSDPKLVFGFDLGIASLGFAAVDLERHELIHMASHLFPAPQEPKTKASLAAKRRGYRSNRRNLERDKTRRNRCRRLLIDAGLVPEGVDPKWFETRQGDADIVVLRHRALIERITDRELARVLLYLCKHRQYIDQGKGGAEGSEDGKVLKALAGNRVLMEQGDAETFGEVLYRRHDAGERTRNAAGDYELTIPHELIRHEASLIIDRQIGFGNGKLDDSFKASYLSIVSSLKSTYERDLRIYGNVGACTYRKDKVRAAKATLTSEIEECREKLAHVRIVGEGGTFPLPGAVRRAAVASVFDPMGKKGQTSLTYAMLRKLMNSLGADGPESMRETDHFKGLNDEKGERAVLFSAKRFAVIKASLGEDLGLLESLMADSSLYDDIAEALTFASSRESYERRLSDLGVDDRLEPAALDAVRGLPYGSAVFNGYGNRSRDALEILSGCLLEDGIDSLYQAEEVGGLLQKRVEDRRGKASLLPPYKTYDPTCTNPVVLRAAARFRAAFNEAVRAYGIPDAVRIELGRDLKCSATEKAKISKGQKRNKDENDKARAAVAEILGVEQEEVVGREIAIFRFYESQSGRDIYVDEPIDLERALKEPKYVEIDHILPFSRSCDDSKSNKVLCLSKSNQDKAGKTPFEWIAGSDESDPRWIAFCNRVEAARKSIGGGKARKLTKVNFDDAAESGFIDRNLNDTRYLSCAIKNWVETSIAFPTPNNQHVFAVSGGATSILRRQWGLNFGTGGEKDRDDDRHHAVDAAVIAMCDPVLVKKCAKHGERRRFLSRDERDRLMGESMPWSTFADEVRARREFVIPTRSTSHTLRGCATDDTVYGYRGEKAKSKKGTMPLLSKGGKVKPSSTAIRCGDGFKMQGDMAFIRLWLDPDAGSNGKWLVEPVYCSDYPSLARDTYTPRYCAPTYGHRSNWPEIPANLMENCSPVVIYKGEALLIDGEPYRFVRFSVSTNCLIAVPIKMTRGKVGVESGERFLPSTDGIARSLSS

SEQ ID NO: 6250 - protein, 1035 aa, synthetic construct
  REGION 1..1035: note = Synthetic
MTERTNNLTLGLDLGSNSLGWALIENEDNGQKRIIDKGVRIFEAGLDNLEQDGRGESRNAARRDARSSRRRLERLSRRLVKLAGILQENGFLPEGNIGDPSKRNGLFTELDRKLDNPYKLRAKGLDNKLEPFEFGRAMYHICQRRGFLSNRKELPKKKEEEGKVKAEIGELQKKIDESGARTLGEYFSKVNPHEERIRTWYTSRRMYEDEFNRLWDSQKNYYLNILTDDLKKQAHHAIFFQRALKSQKNLVGKCEYERTQRRAAWAILDAQEFRYLQRINDLEIILNNERRLLSPDERVKLINELERNSSLKFSSTRKATLTIKKILELPKSASFNLEKGGEENLHGNKTATTLREIFKDRWDEFSRKDKDQIVEDILSIQNSDALARRGTKKWGLDEEAAKKFGNISLQSGYCSFSRKALLKILPKLREGFRLNEILREAYPDRWEMQSEPRDILPPVKNEDIPEIRNPIVERTLSELRKVVNAVIKKHGKPESIRIELARDLRQNAKQRERTFKSMRENEKQRKSAAEEILKECGLANPSRNDILKFILWKECSGHCPYTDNYIGPSDLFSSQPNFDIEHIIPFKRSLDDSFMNKTLSHVATNRNIKKDMTPYEAFSSRPEWDDIISRVKKFNNQEKLKRFKMTEKEVEEFLSDFSSRQLNDTRYATKRAKEYLGLLYGGLKEDAAQGTEKVQAVGGQITAYLRNVWGLNSILKDGPGKSRDDHRHHVVDAIVIALTEQRWVNELSNAAKNAPKAGKRRFAAVMPPWNGFWDDVKNSVSSVIPSHQITKKVKGALHAETFYGRPYKDGKGKQFTKTRVALEKLTPKNVENIVDKIVKQKVKDKLKELGKAPKEAFKNPDKNSNLPLIKTKTGKEIRIKKVRIEMPFETHLRVGEGYRERYVRSCPDSNHHMEIYKDLATGRWDGEVVSLFKAHQRLRSKQPIIRKHHGEEKKFLFSLAGGETIELDTEDGKRGLFVVRTVPQSKQIVFVPINDSRKRKDIGTTGLTAYPESLKERHCAKVLITPLGEVRRASD

SEQ ID NO: 6251 - protein, 1029 aa, synthetic construct
  REGION 1..1029: note = Synthetic
MKLEKGKARATILGLDMGPNSLGWAIIETDTNNNPKSLLNAGVRIFKAGLDDLETDGLGKSRNLARREARGRRRLLRRHRQRLIELGISLQKHGLMSNTFDFKDDDERHNFFLNLDKKIESPYSLRAKALDHKLELFELGRVLYHLCQKRGFLSNRKSAPKDEDSKKGVVKTSISNLEKDIAESGSRTLGEYLASLDKDKKRIRGFYTSRKMYENEFELIWNKQADYYPEILTNELKKQIQHSIFYQRPLKSQSHLIGECELEPGHKRAPICLLISQRFRYLQTVNNMRVLEDNGFKERELTGAEREKIINILEYKGKVTFATIRKELKLPKGTKLNLEAGDAKETRGNSTTEKMVSIFGLDQWKAFSDIQRDKIIEEWRSIVKDDTLKRRAIKLWGLSEEKATEFSRLNLEEGYIGFSKKAIAKLMPFLEKGISLQTAIQECYPERFKKELEPVSQLPPIDKSGLGELRNPIVGRSLTELRHLVNTIIKEYGKPDIIRIELARELRQTPKQREETIKKNRGNEKARKEAADLLLKEAGITEPKNSDIIKAQLWIECGQRCPYTGQQISAEALFGEHPQFDVEHIIPYERSLDDSFVNKTLCYADENRRVKHKKTPYEAYYGTPKWDEILSRVKAFNSRLAKEKYRRFCMTPEEVDALCEDFTARQLNDTRWTSKWAKRYLGLLYGGTNEMGIDNQGKLKVQAVTGQITAKLRYAWGLNDILGDDNTKSRDDHRHHAIDAITVALTTPGMVKELSLAAQRASNNIGRLAKDMVRPWDLFYRDVENKVKEIVVSHRLERRVRGALHQESYYGQNKDSKGKPYICIRKPIGALSENDVDNIVHATIRKIVRDKLREIGKPPKDAFKDESNWPKDSQGNRIRRVRIKVGGSEVFRLKHGFVKSDTNHHMAIFKDDKTGKWDCEVVSLYKAYQRLTNNQPIVRRDFGEGKTFVFSLAGGDIIELDDIGQNTRSLYVVRTVPQSKQIYFVPIHDARPLKYIGKTGLTALPSTLAERHCRKVIVTPLGEVRYAND

SEQ ID NO: 6252 - protein, 1270 aa, synthetic construct
  REGION 1..1270: note = Synthetic
LFNGRGSYENYLICCSISINFINLRIIMNNSQNMKRILGLDLGVASIGWALVNEAESSDEQSSIVRLGVRVNPLTQGQDGEKDNFERGKSVSTNSGRTLKRSMRRNLQRFKLRREALIDCLKRNNFINDETILHEQGNKTTFETYMLRAKAATERVSLEELARILLMLNKKRGYKCSRKDLTVNDSTSVDKVKDEEQENYLAKIECRSNELHGLTVGQYLIDKLKEEPNYSFKNKIFYRSDYLHEFEVIWKTQSQFHKELSFELKKEIRDKIIFYQRRLKSQKGRVNYCELERWPIEDKDGKTRILGAKVCPKSSPLFQEFKIWQILNNVIVTDTSTEEQRRLEPEEKDILWNELNLKRKLTRKEVLKLLFNGSKSHTINFEELDGNKTQAILRGAYQKIIERRSSQSYNFAKMKSRQIMEVLKSEFVKLGFDLRILTFDSSLPGMELERQPMYRLWHLLYSYEGDASESGIDSLIKKIMAQCGMDFEAAEVLANVVFEQGYGSLSVKAMRRILPFMKEGNDYSTSCEMAGYRHSSRSLTKSEIESKQLVEQLPLLPHNSLRNPVVEKILNQMVNVVNEIMACYGRPDEIRLEMSRSLKSNAKQREKMSNDIRKNERENKDVDETLKKEFGLKYVSRNDRIRYKLYKELEKNGYKTLYSGTYIAKDKLFSKDFDIEHIIPQASLFDDSLSNKTLELSYVNKEKGKRTAFDYVAEKYGGKGVAEYRSKVMDLPLPETKKKRLLMSASEIPSDFLARDLNNTSYIARKAVEILENVVKTVVTTTGAITARLREDWQLVDVIKELDWEKYNKLGMTEVIQGRDDGQRIRRINGWSKRDDHRHHAMDALVIAFSRRSIINYFNNLKAHKDENENCKRRIMVAPMPKSVFRTEAKKHLECVLISIKSKNKVMTSNINKIKRRGGIICKVQLTPRGQLHDETVYRRVKKYSTGYMSVGKAFDKEKIMTVANKEYREALLARLDEYGGDAKKAFTGKNRLEKNPVFVAGSGTRCVPSKVKVVMFRYDYTSRKKITPDLNIDKVLDKEVKDTLMDRLNAYEGKDVKEKAKKAFVNLDENPIYLKNGNVIKRVTVSGISNGVALHDKRDYDGKLVLDSGGNTQPVDFVSTGNNHHVAVYRDAKGNLQSKVMSFFEATARVSQGLSVIDKDYHKDEGWQFLFTMKRNEYFVFPDEDSDFDPNNIDLTDEGNYTEISKHLYRVQKLADNDYWFRHHLETSIKDDARLKGMSYKRISSLKNLERVVKVRVNHIGQIVSVGEY

SEQ ID NO: 6253 - protein, 1111 aa, synthetic construct
  REGION 1..1111: note = Synthetic
MAKNRVVLGLDIGIGSVGWALVNLEEEEYDYQTYEGEHKKKLKISGGEIIDSGVRTFQPPHNEQKSLAKIRGEKRRARLTGRRKTKRMKRFVSLAKEFGLIEPNIRFKQACRKMIPPASTDKNKWSPWNIRKEALSRKLTNEEFFRALYHIARHRGVSFLTKAEESEKPSGSSEEGKVKKGLQNIREQLKESRCQTIGEMFAVNFLEGENVRLRNSENDYTKSIHRNLLKDETIIIFKKQKALGNESASDELLRRYLDEVLLYEAGIQEDKLLKMMNRCKFTGEICAPREGYLNERYVLLNRLNSLLIGGKPPTDEQRESIKKLAYKNKKLKFSQIRNFLDINENIRFNLCSYQMENPEYNQKLSCKVNEKEPLFEDKHQIKAAAIQSLDRETGTLEHVEDYSQEYKELIRKVYARRAEKYGSSKVQKIDFYYYILRAKLEIPSKYRFVQILNKYPKGEEEFKSKLEYLKQFESKQDFVELKGYHKIKDCITNTLGNDKWSEIADSPETIEAISEALVYHKTDETRGNYFKEKGIDEEIAKAALFINMKEVANFSKEAFQKLLPHMEEGKYFEDARIAAAENDPRFKDKEHEKQSILQPYHGDFENNPVVMRTFSQTRKLINAVIRKYSSEYPIDQINIEIATELASSQKKLNDIYKKQTRYRDQKEQAKELCREFGLNPEEGQNLLRFRLAMQQKYRCPYTGQYIHACPYSGEDISGSLLDCEIDHIIPISRSFDDSLNNKVLCTKKANQEKKNMLPFEYLSKDPKKWEEFVVRVGHMGTMPSAKKRKLLTKKFDEEDKDRFISRNLNDTRYAAKEIAGFLKKHLDFSKSQREDINEKSRVQLRSGRVTSFLRYHWGLKKHREENDLHHALDAIVVACSTQGHVYLASMIAKDLENKGKAINGRLKNCNFEPWESFREDVLKKLDDIFVSRMPRRKVTGEAHSQNPKSWRKANIKGRVQPFNKGFCGMGHIVRADFYKGPDGKNYAVPLYASDFAAKSPLPSKYLSKGDTPYEDWPELTNEFEFKFSLFKDDLVKFQDQMYYIDYIRGGRPVISLKKYDGSSFDEEGKSFTKEFSYKNAKLEKFEVDMMGKYYSVKKPEREGNSYEKEWK

SEQ ID NO: 6254 - protein, 1047 aa, synthetic construct
  REGION 1..1047: note = Synthetic
LQNAPDLSILFFRTSNLRKGGPMARYTLGLDLGSNSVGWAIVTQDGTRFKNRTPILAGVRVFPEGVADLDQKKERPRGQERREKRSQRRVHYRRRQRRALLRRALIEAGLCPTDPQARRAWIAQNPYPLRARGLDERLEPQEFGRALYHLCERRGFKSNRKSQSKEDNKITKDASALQQEIESAGCRTLGEYRDQRLDATNHSQRIRGRYTLRDMYEHEFDSLWESQRRFHADILTDDLKIKCYDAIFFQRPLRFDPQVIGDCELEPGEKRCPVSHWLAQRFRMLQEINHLRVMDAAGDRPLTRQERAALAAALGVKKEMDFGAIRKCLGFLGTQTFNLETEGKRKKLKGNGVEAALQNKVLRKWYKELPEEQRQAVYDALAEVQDPQELRRIAADQWRCNAEQLEQLLKFTPPGGYLRLSNKAIRRILPFLEPDHVCDKPCREMFPDSDPESGHVFSEAKTLAGYPPEPEIPTFESVPPIPRRGDKKAWAAAHPTLRHMGTALTNPLVRRALAETRKVVNAIVREFGKPEELVIELAREMKHTKDQRQQIHWDNVNRAEENEQIAKRLTSEFNIQNPSRDDILKYRLWQECREVCVYTGKTIPKNKLFSPEIQIEHIYPLDRSLDDSYLNKTLCFGHETNALKGNRTPYEAFADTPDFDPILKRAERLPWKKRRRFTVKEVAFDDFAQRQLNDTRFASRLACRYLRTLGVPVRPVKGQTTSKLAHYWGLYGVLGTDYSKARDDHRYHAIDAVTVALTTRSHLQRLSTVLGRSARRNPLDPPWDGFWNHVRDAVASINVSYRPAHKLAGSLHKDTALGPTQKRDTYVYRVSLEDLTTAMVADIRDPVIQRIVRERLKERGIEEKGSAALGKVLTEPTLAMPSGVPIKRVRIQTVEKTAIPIRKVNGQTVKFVLPGGNHHVEIYQKPDASWTGRCVSRFDACKRLRKGIPVVDRADQPDGAKFLFSLCINDMVQITDRDTGEVKLYRVQMTSHNPELDKPDVTLRLHSAARIEDKETALRLASWSAFQKQTPQKVQVDPLGRIHPCRD

SEQ ID NO: 6255 - protein, 1030 aa, synthetic construct
  REGION 1..1030: note = Synthetic
VKRLRNRVGYTGEYLDTSGVPCQYVHPAFAHYFLCRGKGPNMANYVLGLDLGANSVGWAIIAQDGGQTTDGKRVLTGVRVFPEGVDKLNTKKEKPRGQDRRLARGQRRMHQRRRHRRQKLLAVLRSAGLLPQDSGDLLNLLASDPYPLRAKGLDQRLGLHELGRALFHLSRRRGFKSNRKQEKSKEEGDVAKETAELRRKIDESGGRTLGEYLARLGEHFRHDSLESERIRNRYTLRSMYEVEFEKLWPAQVPHYPDVLTNELKEKVKDAIFFQRPLRFDPDVIGQCELEPGEKRCPRAHWVAQKFRMLQDINLLKVIDPTGEERPLNARERATLAEALAPKKEMTFDEIRRLLGFLESQTFNLEELSKRKSLKGNPVEAALSKKPLDKWYQDLPQGTREKVYDSLAEEQDEQKLRALAMTEWALNDAQADKLLKITLPTGHFKVSLKAIRKMMPHLQSGHIYSEAKELAGYGFVPQGEVRECLPPVEEAVKHLTNPLVRRALTEARKVVNAIVRDFGKPGEIVVELARDMKNTAEKRRELFWENVERREQNDEIRKRLVSEFNLASPSRDDVIKFRLWEECARTCPYTGRSIPANKLFTPEIQIEHIFPYSRTLDDSFMNKSLCYEDENRRKHNRTPYEAYSQDQPKYDGILQRTAKFPYTKRRKFSQKEVELDECVRRQLNDTRYVSRAAVGYLRVLYDDPQKVRCVKGGTTAELRHQWGLDEVLGLKGEKNRDDHRHHAVDAVVIALTTRSALQRLSSVKYNPQRPRFDPPWEGFREEVAASVTVINVSHRPTRRLAGALHEETAYGPGKEPNTFVHRVPVENLTGNQVSQIRDPVIRKIVQEAAKERGLGKALVNPPLRMPSGVPIRKVRIETVEKTAFHIRTDDQGRPIKCLLPGGNHHVEIFELPDGSWTGRAVSRFDANQRLLQGKPVVNRNPSDGARFVMWLCNNDMLLIDKNSQPLLYRVQNISVSSPLLVLRLHTAARTDDKEKTIKATRHLVATWDSFRKLAPKKVTVGFLGRVHPCND

SEQ ID NO: 6256 - protein, 1013 aa, synthetic construct
  REGION 1..1013: note = Synthetic
MARYTLGLDLGSNSVGWALIAQDGTLFDNRTPILAGARVFPAGVADLETGKEKARGQERREKRSQRRILYRRRTRRGDLRHALADAGLCPTGRDDVRRWLALEPYTLRARGLDERLHPREFGRALYHLCERRGFKSNRKTESKDDNKVTKGASALQAKIEAAACRTLGEYCAKRLASTDHRADSDQRIRGPYTLRAMYEQEFDSLWDSQRRFHPDLLTDDLKRRVHKTIFFQRPLRFDPKTIGDCELEQGEKRCARAHWASQRFRMLQEINHLRVMDTGGDRPLRREEREKLADALGQKKKMTFDQIRKCLGLRKDQPFNLEEQGKRDWLHGNEAQAALRGKALKAWYETLPEETRIQVWDALADVQDEDELRRTALGPWGCTEPQADQLIKISLTTGHFSLSLKAIRKMLPFLEPSHVCDDRCRELFPERDTEAGHVVSEAKQLAGYALLPEVQIHDRLPPAQTLFKQITNPLVRRALTETRKVVNAIVREFGKPEEIVLELARDLKHSRQQRQEIHWENRNRGKENDKIRERLQREFNILTPSRDDIIKYRLWEECQNVCVYTGQSIPKTKLFSPEVQIEHIYPLDRSLDDSYLNKTLCYGAEVNRRKGGRTPHEAYDGTPEYEQILQRAKTLPWKKRRRFEVKDVQFDEFARRQLNDTRYASRMAMQYLRSLGVPVRPVKGQTTNNLAHYWGLYGVLGTDYSKTRDDHRYHAIDAITVALTTRSHLQALARAMHSRHSRAAAHKLAPPWETFWDDAQAAVERINISFRPTRKLAGKLHEETAYGPTEKPNNYAYRVPVERLTPAMVAGIRDTVIRGIVRKRLKEHAIEEKGSGTLGKVLTEPTLRMPSGVPIKRVRIGTVEKTAIEIRRVNGQAAKFVLPGGNHHVEIFQKPDGSWTGRCVSRFEAHQRLRQGKGVVDHQGEQDWTFLMSLCINDMVQLTDPDTGEVKLYRVQKISSGSHMVVLRLHTAAEIEDEASDGPSDSCNQLRRWRMEKVQVDPLGRVFPCDERA

SEQ ID NO: 6257 - protein, 1192 aa, synthetic construct
  REGION 1..1192: note = Synthetic
MSLIFSFDVGKASLGYCVRKGYEIEELKSIIIPSEHADYVELFGGRKRQFRTREAHEKRQNWLRALWNDLGLEGLDSKDSRLVSEFRKSEDEEVCSGVLLRIKLLEGNKLQEWQIFKALWSAIQKRGYDDKLPWASSNSSRKEKKDELIDEVDSGEKSKPENDDDAENKKGIESYEKDLVENCGTDEKFHLPCYLEAAKLCLWKNGRIISHKITYEAEKVRKSAFVAPRHLIEKEIEQLLIKAAEQIPSIKEKEFDFVFFPNEESKRENKGIPVKGKGIDFVLYGQGQKQYASYYKDSEFNRKRGTEWDTQGLLSQKIPRFDNRIIGKCSLIPRLNTCNADDILAQEFKLIQSIRNLIRPNREALPHEKFIMVFQKLRNKLVIKDAPPSINFSLTEINKALKEVDLSQISEKNLHSKQTKSSFFKINNSGRSRLSRPALSCVSELILSGKPINRFVEEICEKGTLEHTAFGLLKNKEDKSKTEVQEKKYKHLITENNPLKGITQSELVNLSSRLGDSWSNYSIQDDREVQDLSKLSLDERKKLVEKELGKISNYVVKNRLQIVINTLNDLLKIHGEPDSVVIEMPRGEDSLDGSQNNLDYIKAQKDREKINKIYIEELAKLEKSPKYLERYKLWKEQRGVCVYTGQTILDSEIDSSKLDVDHIIPRAQNGNNSIINKVLVLKTANNEKLDRTPYEWLSSNPQKWAEFKEQFETGLLKHLPKFKKKLLLVDPSSEDGKKLIDNLNALQDTRFIAKLGKKLIGIFLGWNEGSEGSKRKLAVVKGSETAEFRREYDLNKLLGDDKEKNRNNNKHHALDAYCMSFANDEWVWTKSENGKQIRRKEHLETSEHVKKVKAEIKSWMEKVVPVDIIKGNPKKGDPKKKKPDETIYGLRLINKKLCIVRYRPLAPSKNDKDKKNDNAEKEEKLKPERIVDPFIREDLKNRFQSRNFDGKTQSEFFQKYLHPNPKRKQQNCEVKRVLYIECEINQEDLKRPLISNGRFCYQNFVDVSKNPSYSIDDLMNEKREKRKNNIQLKKIKQSRNYLIYKDLNSTKDNYGIRHVKGYESIKVAKEELEDKKFEVVNEHLFSGCLIKIHKDFEASVEIKKEKTKNKKTKNEDSTEEIQNDTKEAKTERKIMPSGIYILSSIGEATPRVSLESNNGDSMELLGRLNKLMELGFDLHEPNESKKEGRKLI

SEQ ID NO: 6258 - protein, 1453 aa, synthetic construct
  REGION 1..1453: note = Synthetic
MKKILGLDLGTNSIGWALYDKENKKILGMGSRIIPMGSEKLDYEKGKGITKNAERRAARSVRRMGKRYKMRRNKLLFVLNELEICPDQFKFRYKVRDNNGKLTDIYNDGFPKAKNIQDLELLPIKKGTLQLNSIEHFQLRVNAITKKVNLKDFGKILYKFNQLRGYSGGSYDEDNKNKIENLIDDPEEITQKKYEVITQKVEILQVKKSDKTFKAKSGENKGKEFNCYDITVNLNNEEINGTTTLQTLEAGKEEELEIRIKRTKKGEDISFTLPQKTNWRKQLESTEEILKSENLFVGELLLKDLKESKWKKIRNRVFLRNRYKLEFDKIWEIQANEYPILNNVPLEKLEIIAAYLFPGKSESQVKLRRSAIDGGLKYIIKEQIIYYQRPLKSQTDLIRKCKFETNETVIANTHPLFQEFRCWEQINKMYITSKIQTYNEKKKKTVYKYTDRYLTNDQKNEIYRKLQIQKNIGFSEVAKIIGLKMDKSEYLNGLNVKAKLKGCDTIINIKNILGDFFEELIQKDEIIFVKLWDALYNKTGNEYDINSDKVKALKDILNIYLNNSTAEEIALKLAINIKYPRKYSDLSSKAINRILPLLNCTPLNEIDFVKEKLEKIKQTIETGEINDEDTIESNIINYINNNPDLINSGGMMYSFATSMIYGKHSNINVIPSITNYHEIIYNKERNLRNPVVEQITNETMQVIKAIWKKYKFNPDELEIRVELARDLKNSAEERASIYKAYITNQRINESIKKKLIEIKQAPTQKNITQYKLWSLQRIEDYPKQSKEPTIEEINKLRIWEEQKCISPYTLKPIPLSKLFSDKRLYDIDHIIPKSRFFDDSLTNQVVCETNINEEKGNRTAWEYISQQNSKFEICSVESFIMHTNRNFHGRKKRNLLIENIPANIVERQIKDTQYLSTAVKNELAKIVGSENVKTTTGEVTAFLRSRWGLRKLFMELTESRFKQMELWDWNKDTNTPNSILVLNYYDEVKKMKIYEIKNWSKRYDHRHHSIDALVVALTEQKDIQRLNNLNKELQNWLTNNKKDIDLNVGDGETILEAYFNLDEEKRNKIQKKIEGFKVFEKPIPDLLEQVNEFLSSMVISHKPKDNLSIQKNEITGKKELKIRSALHEATFYGKHNGKDTKTVSISNLTVKEISKITDGILKNEIDSHRKKYESMKEAFTGEGLKFFNENRFQRKKPTELKPPVYKIKIYYSTMEKTESSLQRLYENNDKLSVKTGGNYLFIVMEKEVNNKIKRVFEIVSLYDAARIAKDELMINNENFKKRICEDYRLNHKEKPDKVLFTLQQNELVYFPENEEDPVLNFTKSEFEEWISNSLNKCKFAKRIYKVVKFSGKDCNFIPHIYANTISISKDLTDEQMNSLKTQYKDKKIPKKELNFEEFGSYGNSARTEVNESFVRELVFGKSKNNINAPLKKIQDYCIKIKIDWLGNINLPND

SEQ ID NO: 6259 - protein, 1433 aa, synthetic construct
  REGION 1..1433: note = Synthetic
MTKHILGLDLGTNSIGWALVKQDFDNKQGEILGMGSRIIPMGTDKQDYEKGIGITKNADRRTKRTIRKMNKRYKLRRNKLLYILHELEMLPEQFQFKNGIPEPNKIQELELLPIKKGMLQLDSLTHYKLRANAIDYVIDIKDFGKILYQFNQLRGYSGGNNEENTKNKQEDNFDDENESVKKYEVITQKVLIQNVELSDTKFKGRGKNKDLEFNKFNVTVLLDDEELEGETELQNLSEKINQEEELEIRIRRNKKAETTSVVFALPQKTNWRKQMEKTEEDLKQSNLLVSQLFVKDLEQNKWTKIRNRVILRNRYQEEFDAIWKTQSNYYSFLNDCAKDKLEKIANYLFPGKSESQGRLRKEAINGGLKYIIKNQVIYYQRPLKPQTELISKCQFEKEETVLPNSHPLFQEFRCWDQINRMYITSKQEVWNERKGKTVFQYSDRFLTTEQKQQIYQRLQIQKQVSFSDVAKIINLKSDKTEYLNGLNAKTKLKGCDTVITIKKALGEHFDELYLQDNFIVNNLWKAIFDNANNGNEYDVKSPKVSSIIEVLKPLNNNELVTEMALRIAQTIKFPRKYSSLSEKAIINILPLMQLNPSAVTERVKANFENIEHLIETGEILDDNLLEDYVISFVKNNPNAFQTGGFMYAFASSLVYGRHTQENIKPQIKDYHDIKYAERNLRNPIVSQLANETMQIVKSLWKQHQFNPEELEIRIELARDLKNSAAERDKIFKGQIKSQRINDSIKKRLQQENIPITDRNILKYKLYEQQKFMSPYTKNKIIPFSSLFDDRLYDIDHIIPKSRYFDDSLSNKVVCETHINEEKSNRTAWEYISQQNSRFDVCSESEYVQFVNDTFYGKKKKNLLLEKIPKDLVERSIKDTQYISVAVKNELAKIVGSENVKTTTGEVTDFLRSRWGLRDLFMRLTKERFKQMELWDINPETSVTNEEWVKMEFDERKNKKVLRIKNWSKRYDHRHHAIDALVVALTQQSHIQRLNNLNKYLQDELIKRKEEFHLEIKEGETVLETFFNLEESRREEIQKQIESSRFFDKPFDGLIEQAKNHLEAMTVSIKPKDKLGVKKNDEGKLQLKIRGALHQETNYGKTKDPKTKLLRDTKTIDLSNLKAKDIPQIIDEVLQKEVDAHKNKYESVKEAFTGEGLKAFNETRFQTKQPGKQKPPVYKVKVWYSNKETEESTLQRLYKNNEKLSVVTGDNYLFLVMEKDTKKGKERVFDIASLYDSADIAKSSLKDNDENFKQKISEAYRLTYGERNKLRGKIQENPDRVLFTLQQNDLVYLPENREDRVLSFSNEELKNWLSDIENKKVFSKRIYKVAKFGGKDCHFIPHNYANVISIPKDLSDEQKEILKEQYKGKAIPKKELNFMEFGSYRDCSPYEAGEVFTKSLTTDKNNKKSMVKPLKIQDTCIKLNIDWLGNVSKV

SEQ ID NO: 6260 - protein, 1396 aa, synthetic construct
  REGION 1..1396: note = Synthetic
MKKILGLDLGTNSIGWALIDKENQKILGMGSRIIPMGTDKLDYEKGAGITKNADRRMARTIRKMNKRYKLRRNKLLFILNELGILSDQFQFKNGIPEPTKLQDLELLPIKKGTLQLTSLSHYQLRVKALSEKIEAKDLGKILYQFNQLRGYAGGSNNEDDGKKKKEEITEEPEKKKSYEVITQKVKILSVEKADRNYKAKGGKNKGQELPLFNITFLFDDREKEGTTILQNLEVDKEEELEIRIKQTKNGENIIVALPQKTNWKKQMEATEEKIKTEKLFVGQLLLNDLLNSRWIKVRNRVIMRNRYQQEFDAIWEEQAKHHAILNDCPSDKLSSLASYLYPGSSESQNKLRTEAIEGGLKYIIKEQVIYYQRPLKPQTDLISKCQFEKDEKVIATSHPLFQEFRCWKQINQLYIRSKGEFYNEKKGKTIYKYTDRYLTNEQKNDLYLKLQNQKQVGFSEVAKIVGLKNDKTEYLNGLNVKAKLKGCDTTITIQKILGDEFDTIIKQDKEIILKIWDSIFDLNNSGNEYDVDSKIVSSLINILKASLEENKSITIALKLAQNINYPRKYANLSAKAINNILPLMQCRPVNINDTIRENFENIKHAIATGELKDGVEPYMVDYVNSNPNIIEIGGMMDSFAASLVYGKHTSANINATIKNYHDIKFNPKRNLRNPVVDQITNEALQVIKAIWKEHKFNPDELEIRIELARDLKNSAAEREKIYKAQLNNQKQNNKIKERLAEARMPITDENVVKYKLYKQQKYLSPYSGSTLELSLFNEYEIDHIIPKSRLFDDSISNKVLVEGFLNKEKDNRTAWEYISQQNTKHKIYSIEAFIDAVNENYFGRKKKNLLLEKIPTDFIERQIKETQYIALAVKTELAQIVGSNNVKSSTGMITDFLRSRWGLKKMFMELTESRFKQMELWDSSSKWVDRYFDEEKKRNVYEIKNWSKRYDHRHHSLDALVVALTEQSHIQRLNNLNKELQDWLLAHQDEIKLEVKEDETILEAFFNLEENRREEIQKSIEGFRKFDRPFDDLVNQARAHLEAMIVSHKPKDNLTIQLNDKTKKKEIKIRSALHEATLYGKLNGQDTKTMNISNLTAKDIEKIIDPVLKAEVNKHKNKGEYSSMKEAFSGEGLKAFNESRFQRKKPLSLKPPVFKLKIYYNTKEVKESSLQRLYENNDKLSVKTGSNYLFLVMEKKGGKAGEKERVFDIVSLYDAAEIARIEWKNQNKEFKKKIYENYLTINKADKVLFTLQQNELVYLPENVDDPILNFATDEFVQWISKKENKAKFNKRVYKVVKFTGKDCFFIPHNYANAISIAKDLTDEQKTRLRAQYGEKKIPKKELNFEEFGSFGTSAKTEVNENFVKILIDKNYSIEPIKIQDYCIKIKTDWLGNIFLT

SEQ ID NO: 6261 - protein, 1413 aa, synthetic construct
  REGION 1..1413: note = Synthetic
MKKILGLDLGTNSIGWALVDKEANKILGMGSRIIPMGTDKQDYEKGVGITKNATRREKRTTRKGNKRYKLRRNKLLFILDELDMLPEQFQFKNGIPEPAKLQDLELLPVLKKTKQLDALGLIELRVKALEAPIELKEFGKILYQFNQLRGYSGGNNDDSTKKKQDEDEDAVKKKYEVVVQKVDILEVKQSTDTFTVRGGKNKGEKQYYFDVKIIIDGEEIEGLTELQNLKEKEGQEEELEIRITRKKDDEVTYKFALPQKSNWRKAMELSEKTLKEENLFISQLRLRDLQQNKWAKIRNRVFLRNRYKEEFDKVWKTQAEYYPILKNCPKEKLEIIAYYIFPGNSESQQQLRKVAIEKGLEHIIKEQVIYYQRPLKPQDELIGCCRFEKNEKVIPTSHPLFQEFRCWKQINNLFVTSKTLVGNKYTYQNRYLTSEEKRAIYEKLQTQKEVGFATVVEILNMDKSKEKLDKEQKDYFLNGLNVKAKLKGCDTFLSFKKELGEYFNDFFSQDKQFVEQLWTVIFDVKNHDGSEYDVESKRVSSIVEVLRNYTNEETAKELSLKLAQKIKFPRKYASLSEKAIRNILPLMLPNPQSIPNSVQQRFRNMLSIIETGEIIDDPDSNLEDYVIDFVKNNPNVLRDGGIMEPFAISLVYGQHTAETIKPQIKNYHDIKFEERNLRNPVVEQLANETIQVLKAIWKQYKFNPEELEIRVELARDLKNSAAEREKIWNGQRKSKVINDKAKEILSENGIAITDENILKYRLYVQQKFMSPYTQKKIIPFSKLFDDKEYDVDHIIPKSRYYDDSFSNKVICEKYINEEKSNRTAWEYISQQNSKYKNENGEKEIVSANEFLSHVNDNYFGKKKKNLLAEKIPSNPVERQLKDTQYISVAIKSELAKIVGSDNVKTSTGEVTDFLRSRWGLRKLFMNLTESRFKQMELWDLDENGNPKTQWVNRYVDENNKNQYEIKNWSKRYDHRHHSIDALVVALTTQSHIHRLNNLNKYYQDELTARKEEFGIKVKEDESILDAFFNLEAERRNEIIGQIESSRYFEKPFDNLIEQVRGQLETMVVSHKPKDKLGIKIDENTNKKQLKIRGALHQETYYGKINGRDTKRVDISSLSLSDVSKIVIDNVLANEIIEHKKRYDSMKEAFTGEGLKAFNDKRIADGKRPAYKVKVWYNKEEKKESGLQRLYENNDKQSVITGDNYLFLVMEKNGKRIFDIASLYDSVSIATDSLKDNITDYKKKIAEDFRIKHKDKPEKILFTLQQNELVYLPIDKEDEVLSKSQNEFIEWISNSDNKKAFCKRIYKVVKFTGKDCFFIPHNFANAISVAKNLSKEELEKLKEKHGEKKIPKQEKNYEEFGSFGNCAKTEFNEDFLKKLILKKAFDGYPPIKIQDFCIKIQIDWLGNISLFKLL

SEQ ID NO: 6262 - protein, 933 aa, synthetic construct
  REGION 1..933: note = Synthetic
MKKILGLDLGTNSIGWALVNMNTEKILGMGSRIIPMGTDKLDYEKGVGITKNADRRTARTIRKMNKRYKLRRNKLLYILNELDMKPEQFQFKFGIPEPTKIQDLELLPIKKGTLQLNSLQHYELRVKSLSNPIGLKELGKILYQFNQLRGYAGGNNEDDVKGKKEDNNDEEYEKKNYEVITKKVEIKKVEKSERTFKIKGGLNKGTDLPIFNITIAIDGKEIEGSTSLQNLEPDKEEELEIRIKRTIKGENIIFALPQKTNWRKQMEATEEILNSSKIFIGELLLKDLNENRWAKIRNRVILRDRYKEEFDAIWNQQAKYHQILNECPKEKLEKIVSYLFPGSSESQETLRRAAIDGGLKYIIKDQVIYFQRSLKPQTELISKCQFETEERVLPTSHPLFQEFRCWDQINRVYVTSKIETFDEKKKKIIFKYDDRYLTKEQKLLIYTKLKNQKQVGYAEVARIIGLKNDKTEFLNGLNEKSKLKGCDTLLSFKKIIGDKFEYIIKKDIQIVEKLWNAIFNNTGNEYDEKSEKVSALSEVINPLIENSVTDLALKLAQNISFPRKYSSLSAKAINKILPLMVCGSIIINNTIREKIEKIKQIIETGEIDDDNSIEVYMIDYIKNNPNLIETGGMMYAFAASLIYGKHTADRIKPTITNYHQINYNKDRKLRNPIVEQISNETMQVIKAIWKQYKFNPAELEIRVELARDLKNSAIERKKIFDSQNKNNTINESIKRRLMEIKQEINNENIEKYKIWSKQQIEERPMQSDSPTVEEIEKIRIWENQKCVSPYTLKPIPLSKLFTREYDIDHIIPKSRLFDDSLGNKVVCESNVNEEKSNRTAWEYITQQSSKFEICNIQDYIKNVNAIFWGQRKKNLLLEKIPNNFIERQIKDTQYISIAVKNELAHIVGSDNVKTTTGEVTSFLRSRWGLKNCL

SEQ ID NO: 6263 - protein, 1454 aa, synthetic construct
  REGION 1..1454: note = Synthetic
MFSQRNNPYCDLLSICKNVNKISFCKFLLENSLFLFYFYSLILITNNVMKKILGLDLGTNSIGWALIDNEQKKILGMGSRIIPMGTDKQDYEKGVGITKNADRRTKRTIRKMNKRYKLRRNKLLYILHELGMLPEQFQLNNGIPEANKIQDLELLPIKKGTLQLDSLAHYTLRAKAINENVELKELGKILYSFNQLRGYAGGNSDDDSKKKKEEDNDENESIKKYEVFNQKVTIIKVKQSETKFQGRGKNKGQEFNKFDITVSFDDVELEGETELQNLKEKEGQEEELEIRIRRNKKGETKSVVFALPQKTNWRKQMEKTEEDLNQGNLYISQLILRDLKEIKWTKIRNRVFLRNRYQAEFDAVWETQSKKHDILENCSQTTIEKIANYLFPGTSESQQKLRNEAINGGLKHLIRNQVIYYQRPLKPQTELISKCQFEKDEQVLANSHPLFQEFRCWDQINRMYITSKQEVWNEKKKKTVFQYTDRFLTNDEKQKIYEKLQTQKQLGFGEVAKIVNLKNDKTGYLNGLNTKAKLKGCDTQIAIKKILGENFETLFQHDNEIVLKIWKAIFDNANNGNEYDPNSLKVSSIKDILKTLKDEAATEVSLKFAQTIKFPRKYASLSAKAINNILPLMQLNQPNVSDEIKTKFENIKNLVETGEIVNDIDNNLEDYVISFVQNNPKAIETGGLMYAFASSLVYGKHTAEKIIAQIKNYHDIKYENRNLRNPIVEQISNETMQVVKAIWKQYQFKPEELEIRVELARDLKNSAAERDKIWKGQRKNEDTNKKIKDTLQSEGIPITDRNVLKYKLYVQQNFISPYTQNKIIPLSTLFDDKLYDIDHIIPKSRYFDDSISNKVVCETNINEEKSNRTAWEYISQQNSKFEIRSVDNYIKHINDIFYGKKKKNLLLEKIPTNPVERQLKNTQYITVSVKNELAKVVGSDNVKTSTGEVTDFLRSRWGLKKLFMELTESRFKQMELWDLDENGNPKSEWIKRYVDEHGKNKYEIKNWSKRYDHRHHAIDALVVALTEQSHIQRLNNLNKYLQDELTNRKEEFKLEVKEDENILEAFFNLEEKRREEIQKQIESSRYFEQPFEDLVKQAKAHLEAMTVSIKPKDKLGIKTDEKGNKQLKIRGALHQETYYGKLNGKDTKIIDISKLSAKDISKIIDDVLKKEIDEHRKKYDSMKEAFTGEGLKAFNENRFQRKKPTELKPPVYKVKVWYSTKEDEESTLQRLYDKNKKLSVVTGDNYLFMVMEKNRKRIFDIASLYDSADIAKRALKEKDENYKQRICEDFRVKHKDKPDKVLFTLQQNDLVYLPENVEDQVLNKNDEEFKTWLNIIENKKKFSKRIYKVVKFAGKDCFFIPNNYANVISVSKDLTEEQKEALKKQYADKKIPKKELNFVEYGSYQNCSPYEAGENFVKSLNETDKKKKKELKLIKIQETCIKLKIDWLGNISKA

SEQ ID NO: 6264 - protein, 1418 aa, synthetic construct
  REGION 1..1418: note = Synthetic
MKKILGLDLGTNSIGWALVDTDEKKILGMGSRIIPMGTDKQDYEKGVGITKNATRREKRTARKGNKRYKLRRNKLLFILHELGMLPEQFQFKNGIPEPTKLQNLELLPVSKKTKQLDALGFIELRVKALEDPIELKDFGKILYQFNQLRGYSGGNNDDSTKKKQDEEEDAVKKKYEVVVQKVEILEVKQSDDAFTVRGGKNKGEKQCYFDVKIIFEGAEIEGLTELQNLKEREGQEEELEIRITRKKDDEVTYKFALPQKSNWRKAMELSEKTLKEENLFISQLRLRDLKQNKWAKIRNRVFLRNRYKEEFDKVWETQVEKHLILKDCPKDTLEKIAYYIFPGDSESQQQLRKTALEKGLKYIIKEQVIYYQRPLKPQTELIGNCRFEKEEKVIPTSHPFFQEFRCWKQINNLFITSKTLVGTKYTYQNRYLTSEEKWAIYEKLQTQKEVGFATVVEILNMDKTKGKLDKEQKDYFLNGLNVKAKLKGCDTFLSFKKELGEYFNDFISQDKQLVEQLWAVIFDVKNHDGSEYDVESKRVYSIVEVLRNYIDEETAKELSLKLAQKIKFPRKYASLSKKAIQNILPLMLPNPQSIPSSVQQRFKNIQTLIETGEINENLNCDLEDYVFDFVKNNPNVLEYGGIMESFAISLVYGKHTAETIKPQIKNYHDIKFEKRNLRNPVVEQLANETMQVIKAIWKQYKFNPEELEIRVELARELKNSAAEREKIWNGQRKSKVINDKAKEILSENGIAITAENILKYRLYEQQKFMSPYTQKKIIPFSKLFDDKEYDVDHIIPKSRYYDDSFSNKVICEKYINEEKSNRTAWEYISQQNSKYKNENGKLEIVSANEFLCHINDNYFGKKKKNLLAEKIPSNPVERQLKDTQYISVAIKSELAKIVGSDNVKTSTGEVTDFLRSRWGLRKLFMNLTESRFKQMELWDLDENGNPETQWVNRYVDENNKNQYEIKNWSKRYDHRHHSIDALVVALTTQSHIHRLNNLNKYYQDELTARKEEFGITVKEGEGILEGFFNLEAKRRDEILQKIESSRYFEMPFDNLVDQVKSQLETMVVSHKPKDKLGIKTDDFDKNTPDKILKKQIKIRAGLHQETYYGKLNGRDTKRVDISSLSLPDVSKILIDKVLANEIIEHKKQYGSMKEAFTGEGLKAFNDKRIADGKQPAYKVKVWYNKEEKKESGLQRLYENNDKQSVITGDNYLFVVMEKNRKRIFDIASLYDSVSIATDALKDGVNDFKKRIVEDYRIKHKDKPEKVLFTLQQNELVYLPNNIEERDFLLGMSVDEFRDWINIKANKKAFSNRVYKVVMFTGMDCKFIPHNYSNVISVPKELTKEQKDQLKKKYEEKKGIPKNELNFVEFGSYRDCSPYETGEIFVKSLVNKKQKQKPLKIQDSCIKIKIDWLGNIELA

SEQ ID NO: 6265 - protein, 1407 aa, synthetic construct
  REGION 1..1407: note = Synthetic
MKKYRIGFDLGIGSVGHTLLEFQEDGKVKILSMGSRIIPMGSDKIDYEKGQGISKNAERRLQKGIRKSNKRFKQRRNKLIYILDKLGMLPEQIVLKNGIPEAKKIQHLEILPITKGTMQLDSVTFLAMRVNALNKPMADIKDFGKILYRFNQLRGYSGGDNYEQADVRNYKKEEDEEEDNRKYRVEIAKVDVTNIEKLDSTFKYKNQDLNKYELTIIWDGEEITGETKLQDLELGEKELELRIKTNKKKEKSYEFALPRKTNWRKQMEATEELLTTQQKFISELLLEDLTSNKSNKIRNRVFLRNRYKDEFDKIWDTQSKKFDILNNCPRNILEEIANYLFPGQSATQVKLKQQSLEGGLKYIIKEQIIYYQRPLKSQTDLIRQCQFEDSEKVIANSHPDFQYFRCWDQINRLYITSKKEVFDAKKNKTKYQYHDRFLTKEQKNEIYNKLQIQKQVGFNDVAKIVALKNDKSEYLNGLHVKAKLKGCDTIISINKILKQFGFNEKQQPFYSDIWTILYNKTGNEYDIHSEKLSNLIDYLKAHFDYSTAEKLALELAQKIKFPRRYANLSLKAIANIVSLMKLSPADVPQNIKSNFENVLRLIQMGEITNELIAENYIINFVKDNPNAINEGGLMYSLAASLIYGKHTAKDVKKEIKDYHDIQYVSNRGLRNPVVEQLMNETMQITKALWKKFNLNADELEFRVELARDLKNSAAERENIFKAQLRNKKGNDAVKEILTSENIPLTDENILKYKLYKQQNLISPYSLKTMKISLFNEYEIDHIIPKSRYFADSISNKVLVEWYLNKEKGNRTAWEYISAQNSQHKIADVETYLAYVNENYFGKKKHHLLMEKIPNNLIDRSLKDTQYISVAVKNELAKIVGSENVKTTTGEVTAFLRGKWGLRELLMRLTEERFRRMELWDWDNEKDAPNVSWVNKYFDTELNKNIYSIKNWNKRYDHRHHAIDALVVALTEQGFIQRLNNLNKELQEWLETNKDRVKLNVKEDETVLEAFFNLKETEREIIQKQIPSFQKIERPIHDLIAQAQTHLETMIVSHKKKDKIDTKIDPKGKKQLKIRAALHEATYYGKTNGIDTKTIDISQLSAKDISKIIDRHLANEIDAHRKKYDTIREAFTGEGLITFNETRFQKKNSDKLKPPVHKVKIRYSNKETEESTLKSLYGIHSKKSVVTGDNYLFVVMQRNSKKDLPERVFDIASLFDSADIARAALKEGKENFKEIICESMRLTWGERNKIKDISQNPTKVLFSLQQNDLVYMPSEDDLVLNMTSDEFDEWIVIPENKKQFSKQVYKVVKFTGKDCFFLPHNIANPINVPRDLSKEKRDELKQIYKDKTIPKTELNYQEFSSFGNCLKVEHNDNFVKNIQGKEKQKERKIQDYCIKIETDWLGQIKIFK

SEQ ID NO: 6266 - protein, 1430 aa, synthetic construct
  REGION 1..1430: note = Synthetic
MTKHILGLDLGTNSIGWALVQQDFENKKGEILGMGSRIIPMGTDKQDYEKGVGITKNADRRTKRNIRKMNKRYKLRRNKLLYILHKLGMLPEQFQFKNGIPEPTKIQDLELLPIKKGTLQLNSLKHYQLRINALEKPIALEELGKVLYSFNQLRGYSGGNNDDDTRNKKKEEDNDDENDVIKNYEVITQKVLIKKIELSGSKFQGRGKNKGQEFNKFDVTVLIDDEELEGETELQNLSEKINQEEELEIRIRRNKKGDITSVVFALPQKTNWRKQMEKTEEDLKQGNLYISQLILQDLKQNKWTKIRNRVFLRSRYQAEFDAVWDIQSKAHSILNNCPKETIEKIANYLFPGKSETQEKLRQAAIKNGLKYIIKEQVIYYQRLLKPQTELISKCPFEKEETVLANSHPLFQQFRCWKQINNLYITSKQDVYNEKKKKNVFQYTDRFLTNDEKQEIFDRLQTQKQLGFSEVSRIVKLKSDKTEYLNGLNVKAKLIGCDTQITIKKVLGEHFETLNSIDKKAIEKIWEAIFNNANNGNEYDPNSLKVSSIKEVLNPLNDEDLATELALKFAQSVKFPRKYASLSEKAILNILPLMQLSPKNVSEQIKIKFDNIKDNIERLNKNESVDIQTGEIFNDLQDYVIDFVQSNPNALEKGGIMEAFAISLVYGKHTAEKISAQFKDYHEIQRVDRNLRNPIVEQLTNETMQVVKAIWKQYKFNPEQLEIRVELARDLKNSAKERDTIYKGQIKGQKTNERIKKVLTENNIDLTERNILKYKLYEQQKFMSPYTQNEIIPFSALFDDKLYDIDHVIPKTRYFDNSISNLVVCETNINEEKSNRTAWEYISQQNSRYKIQSTDAYLKHVNENYFGKKKRNLLLEKIPTNLVERQLRDTQYISIAVKSELAKIVGSDNVKTSTGEITSFLRSRWGLRDLFMRLTQDRFKQMELWDMNKETQKTNDDWVKLEFDERKNKKVLKIKNWSKRYDHRHHAIDALVVALTEQSHIQRLNNLNKYLQDELLKRKEEFNLEVKEDETILEAFFNLEKNRREKIQRQIESSRHFEKPFEDLVKQAQTLLEAMVVSIKPKDKLGIKKDDRGNAQLKIRGALHQETNYGKTKDPKTGLLRDTKTIDISKITAKDISQVIDEVLKIEIDDHRKKYDSMKEAFMGEGLKAFNENRFQTKKPTEHKPPVYKVKVWYSNKVTEESTLQRLYDNNDKLNVVTGDNYLFMIMEKAGKRVFDIASLYDSADIAKRALREKDENYKQRICEDYRIKHKDKPEKVLFTLQQNDLVYLPENIDDPVLNLNKDEFKGWLDNIENKSKFSKRVYKVVMFTGKDCKFIPHNYANTIIIKKDLTDEQIEDIKSRNEGKKSIPKNELNFVEFGSYRDCSPYEAGEVFIKSLTIDKNEKKSASKPLKIQDSCIKLKIDWLGNISKA

SEQ ID NO: 6267 - protein, 1443 aa, synthetic construct
  REGION 1..1443: note = Synthetic
MKKILGLDLGTNSIGWAVVNADENGNPVKIEGMGSRIIPMGSDKIDYEKGVSITKNADRRAKRCARRMGKRYKMRRNKLLFILNELGMLPDQFQFKDGFPEAKHLQTLELLPIRKHTLQLDSLQHYELRAKALNEKIELKELGSILYQYNRLRGYAGGGDDETEKKNVTKDDDQEDLKKYETRVQKYIIKEVEKSELTFKAKGGKDKGKELPVYNITVLEDDNEIIGTTQLQNLEEKIGQEIELEIRIKRTKKSTTITFALPQKTNWRKQMEETEKTLKEKGFFPCQLFVEDLRKNKWTKIRNRVILRQQYIKEFNAVWEQQAKFYPFLNNCSQETLEHILNYIFPGEKETQEQLRKDGLKNGLKYIIEKQVIYYQRPLKSQSDNIGKCQFEKEEQVVPVSHPLFQEFRCWDQINRLYITSKESVWSEKKKRDILQYKNRYLTDEEKITIYNKLQSQKQAGFYDVAKIVKLKNDNTEYLNGLNVKAKLKGCDTAISIQKILGASGIQNANIEAIWQAIYDNVHEGSEYDPSSKRVQSIVSALPEKNEDESRLDIALKLAQTIKFPRKYASLSKKAIENILPLMRLNPQPQEIPDIVRYNFSQIQHLLETGEAIEDYLLNDYIIEFVENNPNALEKGGLMYAFAASLVYGRHTKENVKPQITNYHDIKYDREREKNLRNPIVSQIANETMQVVKAVWKKYQLNPDELEIRVELARDLKNSAQERDKIYKSQIKNRKINENIKKRLIELNQEVNERNIELFKIWSRQEIPLDKNGNSRPKFKNENAPTQDEIEKMKLWENQQFISPYTLKPIPLSKLFDDRLYDIDHIIPKSRYFDDSLTNKVVCETNINEEKGNRTAWEYMSQQNSSLGICSLDEYLNHINKNFFGQKKRNLLAEKIPSNPVNRQLKDTQFISVAIKDELAKIVGSDNVKTTTGGVTDYLRSHWGLKKLFMNLTESRFKQMELWNLDENGNPKESWITKGFDKKRNRNIYEIKGWSKRYDHRHHAIDALVVALSDSKFIHRLNDLNKHFQVELSKHKNEFTYDDEESLEEAFFKLSKEKRDAIMKEMESSRRFKSPIDDLIPEAKEFLETMIVSQKPKDKLAITENQEGKKQLKIRAALHQETYYGKTNNRDTKTVSISLLKVKDIPQIIDSVLREEIEKHRKKHAKDTMKEAFSGENLIEFNESRHQTKNPIALKPPVYKVKLWYSKKEGEDSGLQQLYSDRPKQSVLTGDNYMFIVMEKNGKRIFDIAPLYDSVEFAKELIKAKPTDIEESKRLICEKIRVENKEKLDRTLFYLQQNDLVYMPKTKDDILGLDAEKLKKWFKNNENKKEFAQRIYKVVKFTGKDCFFIPNNYAKEISIAKDLSDADISELKNKYAETKIPKQELNYEEFSSFGNCVKYVPDERFIRNIIDKKNPKPPKIQDFCIKIKTDWLGNIIEFNGLRL

SEQ ID NO: 6268 - protein, 1425 aa, synthetic construct
  REGION 1..1425: note = Synthetic
MKKILGLDLGTNSIGWSLVDKENKKILGMGCRIIPMGTDKQDYEKGIGMTKNADRRTKRTIRKMNKRYKLRRNKLLYILHELEMLPKQFQFKNGIPEATKIQDLELLPIKKGTLQLNSLQHYQLRVKALNESIEPKEFGKILYSFNQLRGYSGGNNDEEDTKKKKEEDNDDENDTVKKYEVFTQKVAIQKVAIQKVELSESKFQGRGKNKGQEFNKFDVTVLIDDEELEGETELQNLSEKINQEEELEIRIRRNKKGETTSVVFALPQKTNWRKQMEKTEEDLKQGNLHISQLILQDLIQNKWTKIRNRVFLRNRYQAEFDAVWDIQSKAHPILNSCPKETLEKIANYLFPGKSETQEKLRQTAIKNGLKYIIKEQVIYYQRPLKPQTELISKCPFEKEETVLANSHPLFQEFRCWKQINNLFITSKQEVYNERKKKNVFQYTDRFLTDDEKQEIFDRLQTQKQLSFGEVAKIVKLKNDKTEYLNGLNVKAKLIGCDTQITIKKILGAHFEILNSIDEKVIEKIWKAIFDNANNGSEYDPNSLKVSSIKEILKPLNDEDLATELALKFAQSVKFPRKYASLSEKTILNILPLIQLNPKNVSEQIKIKFDNIKDNIERLNKNENVDIETGEIINDLQDYVIDFVQNNPNALEKGGIMEAFAISLAYSKHTAEKISAQFKDYHEIQRVDRNLRNPIVEQLANETMQVVKAIWKQYKFNPEELEIRVELARDLKNSAKERDKIYKGQLKSQKTNETIKKRLTELKQELSPKNIELYKLWSNQNTENYPAPKKVTEPTKDEIEKLRIWEEQGCISPYTLKPIPLSKLFSPERLYDIDHIVPKSRFFDDSASNKVVCETNINEEKSNRTAWEYISQQNSAYEICSIESYVAHINQIFYGKKKKNLLLEKIPTNPVERQIKDTQYISVAVKNELAKIVGSDNVKTSTGEVTSFLRNRWGLRDLFMRLTQDRFKQMELWDINKETQKTNDEWVKLEFDERKNKKVLKIKNWSKRYDHRHHAIDALVVALTEQSHIQRLNNLNKYLQDELLKRKEEFNLEVKEDETILEAFFNLDKNRRAEIQRQIESSRHFEKPFEDLVKQARTLLEAMVVSVKPKDKLGIKKDDRGNVQLKIRGALHQETNYGKTKDPKTGVLRDTKTIDISKITAKDISQIIDQDILAKEIDNHRKKYDSMKEAFTGEGLKAFNENRFQTKKPTEFKPPVYKVKVWYSNKITEESTLQRLYNDNNKLSVVTGDNYLFMIMEKAGKRIFDIASLYDSADIAKRALREKDENYKQRICEDYRIKHKEKPGKVLFTLQQNDLVYLPENIDDPVLNFSNDEFKEWLNNVENKSKFSKRVYKAAKFTGKDCHFVPHNFANVISIPKDLTDEQKETLKEQYKDKKIPKKELNFIEYGSYRDCSPYESGEVSYQKSK

SEQ ID NO: 6269 - protein, 1411 aa, synthetic construct
  REGION 1..1411: note = Synthetic
MKKILGLDLGTNSIGWALVGTDENGKPNKIEGMGSRIIPMGTDKQDYEKGVGITKNAERREKRSSRKMNKRYKLRRNKLLFMLNELGMLPEQFQFKNGIPEATKIQDLELLPIKKGTLQLDSIQHYKLRANSLENPISLKEIGKVIYSFNQLRGYSGGNNDEKNNKKEEENNEENESFKSYEVITQKVIIKDVEQSNIKFKGRGKNKDQEFNKYNVVILFNDEEIEGETELQNLFEKINQEEELEIRIRRNKKGEKTSVVFALPQKTNWRKQMEKTEKDLKESNLYISQLILRDLGQNKWTKIKNRVFLRHRYQAEFDVFWDTQSKTYEFLNNCPQETLEKIANYIFPGKSETQKRLRQDAIKNGLKYIIKEQVIYYQRPLKPQTELISNCRFEKDEKVIATSNPLFQEFRCWKQINNLYITTKQEVYNEKKKRNIYKYKDYFLTNEEKQEIYEKLQTQKQIGFSEVAKIVKLKNDKTEYLNGLNVKAKLIGCDTQIVIKKILGEHYDKLYSEDYNIVEKIWKVIFDNVNNGSEYDPQSPKVLSIKEKLFPLNDNIISTELALKLAQNVKFPRKYSNFSKKAIENILPLMQLNPINIPEKVKKNFSVIQNLIETGEVLDENLLEDYVISFIQNNPNVLEKGGVMESFAISLVYGKHTLEEVSPQFKDYHEIQRVERNLRNPIVEQLTNETMQVIKAIWKQYKINPEELEIRVELARDLKNSAKERDAIFKGQIKSQKTNERIKKKLSENNIDLTDRNILKYKLYEQQKFMSPYTKHIIIPFSELFDDKLYDIDHIIPKSRYFDNSISNLVVCETNINEEKNNRTAWEYISQQNSKFNILSIDTYLSHINENFYGKKKKNLLLEKIPTNLVERQLKNTQYISIAVKNELAKIVGSENIKTSTGEVTSFLRSRWGLNDLFMRLTQDRFKQMELWDINKETGKPYEEWVKVEFDEKKNKNILKIKNWSKRYDHRHHSIDALVVALTEQSHIQRLNNLNKYLQDELTTRQDEFKLKVKEDETILEVFFNLEENRRKEIQNKIESSRYFEKPFDDLIKQVSNLLETMIVSIKPKDKLGIAKDKKDNNTPDKELKPQLKIRGGLHEETNYGKTRDPKTGMLRDTKTLNLSKISTKDIPQIIDEVLKKEINNHRIKYDSIKEAFTGEGLKTFNESRFQTKKTNELKPPVYKVKVWYSNKPTEDSSLQRLYDHNPKQSVITGDNYLFIVMEKAGKRIFDIASLYDSADIAKRALKDNIENYKQSICEDFRIKHKDKPEKVLFTLQQNDLVYLPKNNDDLVQNLNNDELKERLSIIDNKIEFCKRVFKVVKFTGKDCYFIPHNFANVIVMKKDLTEEQLNEIKIRNKGKKSIPKSELNYVEFGSYRDCSPYDSLHKENEKVKIQDRCIKLRTDWIGNIYF

SEQ ID NO: 6270 - protein, 1404 aa, synthetic construct
  REGION 1..1404: note = Synthetic
MKKILGLDLGTNSIGWAVVSADENGNPKHIEGMGSRIIPMGSDKIDYEKGATITKNADRRAKRSARRMGKRYKMRRNKLLFILSKLNMLPEHIQFKTDFPEATKIQDLELLPIAKNTMQLDSLQHYMLREKALHEKIEMQDLGKIFYQYNRLRGYSGGGDDNDSKKEKTEDDDNKKYEVRIQKFILKDVVKTGNTYTAKGGKDKGSELPIYNVIALDEDEEIEGTTKLQNLSEKIGEEIELEIRIKKTKKGDSIAFALPQKTNWRKQMEETEQILKAKNYYPCQLFAEDLRNNKWTKIRNRVILREQYKREFDAVWDEQAKYYPILKKCPDDILNEIVSYIFPGPSDSQKKLRELGLSNGLKYIIKEQIIYYQRPLKSQSDLIGTCQFEKEEKVIPVTHPLFQEFRCWDQINRLYIRSKQQIWNEKKGKFVLQYQNRYLTEEQKYSIYNRLQEQKQLGFKEVAKIVNLGDDKSEFLNGLHVKAKLSGCDTKISIKKILKGYCEPDTALIENIWEAVYNNVHEGSEYDQASKRVLSIRNALPETLENERRTELALKIAQNIRFVRKYASLSKKAIENILPIMRPNPGVIPEKVKNNWEKIKWLINTGEVIDESVLQDYIIDFVKDNPQALEHGGLMYAFASSLVYGRHTKEDVKPQLKDYHDIKYVERNLRNPIVEQIANETMQVVKSLWKQFHLNPNELEIRVELARDLKNSAQERENIFKAQNKNRSTNERIKERLKQENVPVTDLNILKYKLYEQQSYISPYTKNTIVFSKLFDDSFYNIDHIIPKSRYFDDSIANKVICESNINEEKDNRTAWEYISQQSSQYTILTPEDYLNHINSSFFGQKKKNLLAEKIPSNPVARQMKDTQYISIAVKDELAKIVGSEHVKTTTGGVTDYLRSQWGLRKLFMELTEARFKQMELWNLNEDGTSKELWVKKGYDETTHKNIYEIKGWSKRYDHRHHSIDALVVALCNEKFIKRLNDLNKYFQEELSKHQSSIPIVDEDSIVIAFFNLPKEKRNKIMQEMESSRKFDAPFDNLVAEAKTLLESMIVSQKPKDKLLIKEDLNGKKQLKIRAALHQETYYGKTNGRDTKTVAISMLKAKDIPQIVDEVLKKEIDAHRKKYESMKEAFTGEGLIAFNESRFQTKNKSALKPPVYKVRLWYSNKEKETGNLQPLYGETAKKTVVTGDNYMFVVMEKSGNRVFDIASLFDSVALAKEYVKQGVADINYIKEKICDDLRISSKENKADKILFYLQQNDLVYMPKEDDEILRFNKLELKNWLLNTSNKIEFAKRIYKVVKFTGKDCFFIPNNVAKEISISKELSIEELKELKSKYKDKAIPKQEQNYIEFGTYSNCTPLEMNKLFTTSMREGKRYKGERPRKIQDYCVKIKTDWLGNVIEFNGMKL

SEQ ID NO: 6271 - protein, 1458 aa, synthetic construct
  REGION 1..1458: note = Synthetic
MKKILGLDLGTNSIGWALVDKDNQKILGMGSRIIPMGKDKIDYEKGDGVTKSAMRRAKRSTRRMNKRYKLRRNKLLYILHTLGMLPEQFQFKKLNEKDKDGSLLRLNGTKENNSFKETNNGIPVPTKIQELELLPISKKTLQADSISFCQLKVDALTRTIDIKDFGRILYNFNQLRGYSGGDSDERSKKENDEEESLGNKNYEVITRKVGIISVEQSEDTFKIRGGKNKGQQLNKFIIVISLDDQELEGTTELQDFKEKVGQEEELQITTKRDKNGEVTSRIITLPQKSDWRKEMEANEKILKEDRLFISELKLRDLQNNGKWTKIRNRVFLRNRYKEEFDKMWDTQAQKYNFLKECPKETLEKIANYIFPGKSESQQKLRKNAIEGGLKYIIKDQIIYYQRPLKPQTELISNCRFEKSEKVIAVSHPLFQEFRCWKQINNLYITSKQQVWNEKKKKNVWQYTNRYLTNEQKQRIYEKLQNQKGISFNEVKKIVEIKDDKIEYLNGLHVKARLIGCDTLISIKKQLGDYAESLLEKDISIIEKIWDAIFDVRNHEGSEYDITSKRVTPIFEILKEYLDDSQKAEELALKLAQKVKFVRKYGSLSAKAIQKVLPLMQLNPQNISEQITDKFNTIKNFISTGEILDNTDYNFQDYVIDFVEKNPNALENGGLMEYLAISLAYDKHTAETMEAQISNYHDINYEKRNLRNPIVEQLMNETMQVVKAIWKQYNIDTKELEIRIELARDLKNSAKERKAIYDGQSNNQKENNKTKERLKENQIALTSENILKYRLYAQQKETSPYTGKPIDFSKLFDNKEYDIDHILPKSRYYDDSFSNKVICEKNINEEKSNRTAWEYISQQNSKHEILPTENFIKHVNNNYFGKKKKNLLAEKIPTNPVSRQLKDTQYISIAVKNELAKIVGSENIRTSTGEITDFLRSRWGLKKLFMEMTEERFKRMELWDLDENGNPTTTTKWVTKEVMNDGEKDKNVYEIKNWSKRYDHRHHAIDALIVALTEQSHIQRLNNLNKYVQDQLERRKEEFKITTGEDETVFEAFCNLEEGRRDEILQKMESSRYFEKPFLYTNKKGEIVSSLCRQVKEHLETMIISQKPKDKLSISEDTLDPNTPNKKLKKQLKIRAAIHEDTYYGKTNERDTKRIKLSALSASDIDKIIDKSLASEIKEHKKKYIKKEDAFIGEGLKEFNDNRIKKNKQPVYNVKVWYNKNEKKKDSLQRLYDNNEKQSVITGDNYLFIVMEKETKKGVSRVFDIAPLYDSVALAKEYLKEGKRNFKQLICEDYRLKHTDKPQKVLFYLQQNDLVYLPTSSNDPVLNMTNNELKEWLNKDCENKKSFARRIYKVVKMTGKNCFFIPNNYATTISTPKDLSKEDLEKLHKEYKDQDKDIPKHKKNYEEFGSFGSSIKTEINDNFVKELVLKEKFDGNQPIKIQDTCLKLKIDWLGNIEFD

SEQ ID NO: 6272 - protein, 1448 aa, synthetic construct
  REGION 1..1448: note = Synthetic
MKKLLGLDLGTNSIGWAVVNADENGNPQSIEGMGSRIIPMGSDKIDYEKGATITKNADRRAKRSARRMGKRYKMRRNKLLFILNKLEMLPEQFQFKNGFPEANELQKLELLPIRKQTLQLDSLQHYELREKALFEKIELKELGSILYQYNRLRGYSGGGNEDNETKNNKKEDDQEDVKKYETRIQKFIIKDVSQSDSTFKVKGGKDKGKELPLFDLIVIDDDKEISGTTTLQNLNEKVGSEIELEIRIKRTKKGEDIAFALPQKTNWRKQMEETEKVLNERQLFPCQLFAEELRKNKWTKIRNRVILRQQYAKEFDAVWEEQSKHYPFLNNCSQDRLQEIVEYIFPGQSDSQKALREEGLKRGLKYILKEQVIYYQRPLKPQTELISKCQFEKDERVIPISHPLFQEFRCWDQINRLYITSKQNVWNERKKKDVIQYKNRYLTDTQKLSIYNKLQAQKQLGFAEVAKIVELKNDNSEFLNGLHVKAKLKGCDTAISIKKVFGDTPIDDVSIERIWQAIYDNVHEGSEYDKDSKRVRSIFDALPENIEENKQIELALNLAQKVRFVRKYANISKKAIENILPIMRLNPQNLPEKIKTNFENIKHLIDTGEIRDETLLQDYIVDYVKDNPQAIEHGGLMYAFAASLVYGRHTKENVKPQITNYHDIVYVERNLRNPIVEQLANETMQVVKALWKQFKLNPEELEIRVELARDLKNSAQERDKIFKGQDKNRKLNESIKKKLLELNQDINDRNIELYKLWSRQENLFDENGKPLSRPKYKNENSPTKEEIEKMRLWEEQRYLDPYTLQPIPLSKLFSPERLYDIDHIIPKSRFFDDSLANKVVCKTTINEEKDNRTAWEYISQQNSKIGICSLKDYLDNVNKIFHGQKKRNLLAEKIPSNPVARQLKDTQYISVAIRDELAKIVGSENVKTSTGGVTDYLRSHWGLKKLFMELTEPRFKQMELWNLDENGNPKEYWISKYFDKDRNKHVYEIKGWSKRYDHRHHAIDALVVALSNERYIKRLNDLNKYFQEELANHKNDIPVNDEESLEEAFFKLSKEKRDEIMREIESSRKFDAPMKNLVSEVRKFLETMIVSQKSKDKLSIKEDKSGKKQLKIRAALHQETYYGQTNGRDTKTIHISELKAKDVPQIVDSVLKDEIDAHRKQYDTMKEAFTGEGLITFNESRFQRKNKSALKPPVYKVKVWYSKKETEESELQQLYDDNSKKRVVTGDNYMFVVMEKDGERLFEIASLFDSVELATNEIKEGRQNIDAIKRIICENIRIMDKKDKKGKVLPKPDRVLFYLQQNDLVYMPRYEDDEVLKFSIKELQDWLSSETNKKEFAAHIYKVVKFSGKDCFFIPNNYAKEISIPKDISEEEKARLEKKYKDTKIPKQELNYAEFSSFGNCIKFVPDEKFVMNIIDKKKPKPMKIQNYCVKIKIDWLGNIIEFNGQEL

SEQ ID NO: 6273 - protein, 1439 aa, synthetic construct
  REGION 1..1439: note = Synthetic
MKILGLDLGTNSVGWALVDKQEGRIIGMGSRIIPMGKDKQDYEKGLGISKSGDRKTKRTIRKMNKRYKLRRNKLLFVLNELGMLPDQFQFKYGIPEPNKLQQLELLPIPNKREYDSNGRRLDRKYEGNKKIKCEPNSIINYELRVKALRHPVELKEFGKILYQFNQLRGYSGGSNNDDTRSVENEDNEDSEIRKYEVFTRKVEILKVEQTDKTFKSRRGTTQGQEFKKFDVTILLDGDELVCETELQHLKEKEGQEEELEIRIKRNKKGETTSVTIAAPQKTNWRKQMEATEEELTRSNLHVSELILKDLRENKWKKIRNRVFLRQRYQAEFDAVWETQSKAHPILNSCPPEVLEKIANYIFPGKRKSQEELRQAAINNGLKYIIKDQIIYYQRPLKPQTDLISNCQFEKDQKVLATSHPLFQEFRCWDQINRMYITSKRESFNEQKNKKIYQYTDRFLSTKEKLEIYDKLQIQKQLSFSEVAKIVKLANDNSEFLNGLHVKAKLKGCDTRISIQKCLGEHFQTLLSNAPHIVENIWQAVFENSNNGSEYDPNSPKVASIKSLLSSLQNDKLETELALKLAQKIRFPRKYSSLSEKAIRNILPLMQPNPTKIPENIIRNFQEIQHLVDTGEILNGKLWEDYVISFVKGNPNALTSGGLMYAFASSLVYGQHTAEKISPQYGHYNDIKFQKRNLRNPVVEQLVNESMQIVKALWKQYDLNPKELEIRIELSRELKNSAAERNKIYKAQIRNNRANEAIKKRLEDENIPTTDENILKYKLYEQQKYISPYSGKPMEVSMFSSYEIDHIIPKSRYFDDSISNKVLVEGYLNKEKANRTAWEYITQQISSYKILSIEDYIKHINDNFYGKKKKYLLLEKIPTNLIDRQMKDTQYISVAVKNELAKVVGSEKVKTTTGEVTSFLRSRWGLRKLFMELTESRFKLMELWDWDIENNKPKLPWVLRYFDNEKQKHVYEIKNWSKRYDHRHHAIDALVVALTEQSHIHRLNNLNKFLQDELAKRKEELNLEIENGESILEAFFRLEEKRRSEILEKMESSRYFDQPFEDLINQARTLLEAMVISIKTKDKLGITTDQFDENTPHKQLNKQLRIKGALHQETNYGKSKDPNTGLSRSTKTVELSKLSAKDIPNIIDKVLKEEILTHRKKYGTNKEAFTGEGLKAFNENRFQRKDPSKLKPPVYKAKVWYSNKDEENSSLQRLYENNEKLSVVPGDNYLFIIMEKAGKRVFDIASLYNSAQLAREALNDGGENFKRKICEDFRQMHKQKPDKILFTLQQNDLVYLPENNEDPVSKMNDQEFSEWISNIENKKKFSSRIYKVAKFTGGDCFFIPHNYATTISVPKDLSQEQRAALERRFADKKIPKSELNFVEFGSYRDCSPFESGEIFLRSLIDKKNSKKKQRAPLKIQDHCIKLRVDWIGNISLHRGI

SEQ ID NO: 6274 - protein, 1142 aa, synthetic construct
  REGION 1..1142: note = Synthetic
LYIPLYYYEGKSCYYDKVEHLEALPRPYRPGYLRILGKEPSQMSEFHYALGLDIGIGSVGWAVLRNQPNGEPDRIQDLGVRIFDKAEQPKTGESLAAPRRDARSARRRLRRHRHRLERIRYLMEQRGMMSVSDIQAMYAAGGFQKSPYQLRAEALDRPLSKEEAVRVLIHLAQRRGYKSNSTAEAAKDEKETGKVKTAIEENRRCMAEHGYRTVGEMMYRDERFWQSNPDGTRYQQTRNKTDDYRFTVERSAIVDEAKQIFAAQRKLGADWSSEDLEAAYLSILEGQRSFDEGPGGESPFRGGIGDKVGFCTFEPDQQRAAKATYTFEYFKLLQDLNHMRLAGRGMSPQPLNAQQREILKETALRSASLSYGQLRKKLALADDTFFSGLYYGDKSREEAEKRKWPQMQSYHKIRTALDKVGKGTISSLTEEQLNAIASILTQYKSDAKRIEALRMAGIPVQFDEALLPLSFSKYGSLSVQAMQKLIPLLEQGMRYDEACTQIYGDHRGLHSEQRKNRLSLTDMDEITNPVVRRAVSQTIKVINAIVRTYGPPDVVRIELAREMSRNFDERRKAEKRQDENRAANERAKEQIAEYKGDHATGLDIVKFKLYQEQDGVCLYSGKNLDPSRLFEPGYADVDHIVPYSRCFDDSYQNKVLVLASENRQKGNRLPYEYFGYDEVRWHEYEVRVENLIRNYRKRQKLLKRQLSEEESAEFIDRNLKDTQYITRTVYNLIRDHLAFAESAYRKKPVQAVNGAVTAMLRGRWGVQKIREDGDLHHCLDAAVIAATTPGLVQRLTAYSKHRETWERPPAGYVDPATGELIELPQEARRDPFPKPWERFRQELEARLDPIDPRHQIDLLKLETYESDEEIKPVFVSRMPNHKVTGAAHAETIRSSKGGDGFTVTKTPLTNLKLNKFGEIEGYYNPASDTLLYNALLSRLKDFGGDGAKAFAQPFYKPKKDGTPGPRVDKVKICEKATIGLPVRNGIAANGSMIRIDVFYVEDDGYYFVPIYVADTKREKLPNKAAVAMKPYNLWKEMKDENFVFSLYPGDLVRIQSRKGIKLNLAKGGTGEKEIVRQDGMYYYRSAGIAVAQIFVETHDRRYLQPSLGIKTLQSIEKYQVDVLGNYQKVDLPEKRMTFSKEG

SEQ ID NO: 6275 - protein, 1140 aa, synthetic construct
  REGION 1..1140: note = Synthetic
MPLYHYEGKSCYYDKVEHLEALPRPYRPGYLRILGKEPSQMSEFHYALGLDIGIGSVGWAVLRNQPNGEPDRIQDLGVRIFDKAEQPKTGASLAAPRRDARSARRRLRRHRHRLERIRYLMEQRGIMPVADIQAMYAAGGFPKSPYQLRAEALDRPLTKEEAVRVLIHLAQRRGYKSNSTAEAAKDEKETGKVKTAIEENRRCMAEYGYRTVGEMMYRDERFWQKHPDGTHYHQTRNKAEDYRFTVERAAIVDEVRQIFAAQRRLGTVWMDEDMETAYLSILESQRSFDEGPGGDSPFSGGIGERVGACTFEPDEKRAAKATYTFEYFKLLQDLSRMRLTGMGMPPEPLDAAQREALKSAALRSASLSYGQIRKKLNLDDDVFFHGLYYGEKTKEEAEKRKWPQMQSYHKMRTALDKVGKGAIGTLTEEQLNAVATILTECKSDAKRIAALREAGIPPQFDEALLPLSFSKYGSLSVQAMQKLIPLLEEGLRYDEACTRVYGDHRGLHPEQRKNRLSLTDMDEITNPVVRRAVSQTIKVINAVVRTYGPPDVVRIELAREMSRTFDEHRKMEKRQDDNRAANERAKDQIAEYKGDHATGLDIVKFKLYQEQDGVCLYSGQNLDIARLFEPGYADVDHIIPYSRCFDDSYQNKVLVLASENRQKGNRLPYEYFGQDEARWHGYEVRVENLIHNYRKRQKLLKRRLTEEESSGFIDRNLKDTQYITRAVYNLIRDHLAFAESNYRKKPVQAVNGAVTAMLRGRWGVQKIREDGDLHHCLDAAVIAATTPGLVQRLTAYNKHRETWERSPAGYVDPATGEMLELPQEARRDPFPKPWERFRQELEARLDPIDPRHQIDLLKLETYESDEEIKPVFVSRMPNHKVTGAAHAETIRSSKGGYGFTVTKTPLTNLKLNKFGEIEGYYNPASDTLLYDALLARLKDFGGDGAKAFAQPFYKPKKDGSPGPRVDKVKICEKATVGLPVRDGIAANGSMVRIDVFYVEGDGYYFVPIYVADTKKESLPNKAAVAMKPYNLWKKMKDENFVFSLYPGDLVRIQSRKGIKLNLAKGGTGEKEIVRQEGMYYYRSAGIAVAQISVETHDRRYLQPSLGIKTLQSIEKYQVDVLGNYYKVDLPEKRMTFSKEG

SEQ ID NO: 6276 - protein, 1099 aa, synthetic construct
  REGION 1..1099: note = Synthetic
MKMEYTIGLDIGVASVGWAVLTNDSQGEPCHIQDLGVRVFEAAEHPQTGASLAAPRREARGARRRIRRRRHRKERIKALLVKGGVITQEEMDRLFQNSGFAQDVYTLRAEGLDRCLTPEEWTRVLLHLSQRRGYRSNSTAEAAKDKETGVLKQALAGNQALMQEKGYRTVGEMFCRDEKFLFVGPDGKLWRKTHNTPGDYSFTITREMIQQEAAALFAAQRNYSNPYADEALEEQYTQILLSQRHFDQGPGGNSPYGKGDLRGFCTFEPQERRAFKATYTFEYFKLLQDINHIRILSPSEPTRKLTQPEREQLISLAMESPSLDFARVRKALNLPPACSFNVVPYERDKEEAEKKRKFPQMQSYHTLRKALNTVEKNYITHLTYAQLDEIGTILSLYKADDKRQEGLEALGLSQQVIGALLPLSFSKAGNLSLTAMKKLIPFLEQGINYDEACREVYGDHRRMAGEQRYRYLTLNKELWDSGALDAITNPVVLRALSQTTKVLNAIIRRYGPPQRICIELAREMSNNFDQRNKIQKRNEENRAKNEKLMEQIQKLKNARPTGQDLVKFRLYQEQDGMCLYSGTQLDMERLFEPGYVDVDHIIPYSISFDDSNRNKVLVLAKENRQKGNRIPMEYLASDPERRERYITLVERYVRDYRKRQKLLKEKLTPEDCQGFKERNLVDTQYITRTIYNLLKDYLEFSPSASKTSVRAVNGAVTSHMRRMLGLTKHREDGDLHHAMDAAVVAVTTPGMIQKISRYAKRRELGQKVVGKYVDPETGELLSQADFDKKYAPEFPEPYDGFRQELLARLSPDPDTRIRELHLPHYDDGEEIRPVFVSQMPRRKVTGPAHAQTIRSGREPGYSLSKKALTELKLDKNGEIAGYYNPKDDVLLYNALKARLQAYNGDAQKAFAQPFHKPKKDGTDGPVVNKVKILEKSSLNVSTCGGIAKNGDTVRVDVYYIPEDGYYLVPIYTSDVVKGTLPNRAVVAHKEYKNWKPMEERHFLFSLYPGDLVRVVSQKPINMKLKNKKSQGEPELLRKEWLGYYVGIDIASACVDITNHERKYEKHGLGVKTLLAFEKYQVDPLGEYHPVHLPEKRQDF

SEQ ID NO: 6277 - protein, 1079 aa, synthetic construct
  REGION 1..1079: note = Synthetic
VLENNIDGEPIKIERLGVRIFDKAEQPKTGASLAEPRREARGQRRTIRRRRHRKDRIKQLIQQNGIMTRIEMAEMFEHLQFETSVYELRVQALERALTKQEFVRVLIHLAQRRGYKSNSKSEEAKDKENGKVKSAISENKKCMEENGYRTIGEMLLNDDRFWECNPDGTKIFVPHNHPDDYRTTVERSMVEDEIQLIFSRQRALGVPYATSEFEEAYLEIWGSQRNFDEGPGGKSPYGGNMIEKMLGHCTFEKDEPRAAKGSYSAEYFRLLQDVNHLRLVKNNGESCALTREQKQIYIDLVMKSAAASYAQLRKKLELSNDISFNMLRYGSDEIGKVERNKLGHMKFYHEMRKALNTVQKDAIATVSWEQRDEIARILLCYKSDDKRKAQLEKLDIPREFIPALLTLSTSKTAHLSVKALRKLIPYLEKGMTYAEACKEVYGEQKSSITKKNKLSLFDIEPINNPVVRRAVSQTIRVINAVVREYGAPEVVRVELAREMGKPYDVRTQMTKKQEENAKRNEELRQQIKKIKGAEPTGQDIVKFKLFQDQNGVCLYSGQNLDIARLFEAGYVDVDHIIPYSISFDDSYTNKVLVRSPENRQKGNRIPADYFKSDPARWQRFETLVNTQVHNWKKKRNLLTQALSEEQKNGFKQRNLVDTQYIARVIYNLINDHLQFAETGKYDKKRRTQAVNGAITAHVRKRLGIQKIREDGDLHHAADAAVVACVSPGMIQKITQYTKHRECIRKTKEGYLDTETGELMTREAYDAKYSPRFPAPWERFRQELEARLSDNPAEEIARLHLATYDSEEEIKPVFVSRKQTHKISGAAHEATIRSAKKPGGSISKKPLTSLSLNKKTGEIEGYYAPESDRLLYEALKKRLKEFDGNAKEAFAEPFYKPKRDGTRGPLVKKVKIYEKKTITVPVGGGNADNGSMIRVDVFYIEDDGYYYVPIYTADVIKGALPNRAVVAHKSHGEWKVMDDKDFLFSMYPNELLYIESRKGIKLKTKKGYSRQEEIIRKAGLYYFKGLNIAANALFIITHDHSYEQPSLGGKTLSCLKKYTVDALGNYSEVSLPEKRKPLRG

SEQ ID NO: 6278 - protein, 1101 aa, synthetic construct
  REGION 1..1101: note = Synthetic
MDYTLGLDIGVASVGWAVLRNNEQEEPYKIEDLGVRIFEAAEHPKTGASLALPRRQARGMRRCTRRRRHRKERIKNLIEDIGLMKKEDMSALFKASGFAKDVYDLRSKALDRALTADEWVRVLIHLSQRRGYRSNSKAEEAKDAENGVLKDAIASNQKLMSEKGYRTVGEMFCKDAKFQTIGADGKAWRTTRNTSGDYKFTVTRQMVADEVSLLFHSQRRMENPFAGEEFEQKYSEILFSQRNYDEGPGGNSPYRQMDLRGYCLFEKDERRAFKACFTFEYFKLMQDLNHIRIRSVDGERGLLPEERERIITLSMKSDNLNFSRLRKELSLPADSLFNLVRYDKETAELSEKGTKFPQMQSYHKIRKALDKISKGYIDTLSHDTLDKIGTILSLYKADNKRTSALQVIGLDDSVIAQLLPLSFSKAGSLSLTAMRKLIPELEKGVTYDKACSAIYGDFRGHTAGMRRKTISLNPEFLAETGLTDNITNPVVLRAISQTCKVVSAIVRKYGSPQMIRLELAREMSKNHDERVKAEKSMDENRKKNEKAMEHIREIKGDHATGLDLVKWKLYQEQDGICLYSGVHLDASRLFEPGYVDIDHIIPYSISFDDSYRNKVLVLSSENRQKGNRLPLRYMENNPQKAADFETLVETRIRDYRKRQKLLKKHLTDEEMNGFRSRNLNDTQYITRVVYNLFRDYLEFAPSTCHSKKQIMAVNGAVTDYMRKRFGLHKNRANGDKHHAMDAAVIAVTTEAMIQRISNYAKRREWGQKVQGKYVDPETGEVMTQTAFDDKYAPTFPEPWPQYRKELEARMGDTPMEDLERLHLPTYEPDEEVRPIFVSQMPRRKVTGAAHQETIWSKKEEGTLIKKVPLTALKLDADGNIKNYYRPGDDRLLYEALQAQLKKYGGNAAKAFSEPFHKPKKDGTPGPIVNKVKIQERTSNNVEVNGGIAKNGDMVRVDVFHIEGDGYYFVPVYTVDTTKKELPNRAATKNKLFAQWKIMKDEDFLFSLYPGDLIRIESSGMIKLKKGNKDADGEPELQKKSAMLYYVGSDISTVSITCTSHDRKYGCRGLGIKRLKSIDKYESDVLGNYHKVVLPEKRQSFC

SEQ ID NO: 6279 - protein, 1102 aa, synthetic construct
  REGION 1..1102: note = Synthetic
MKKIPYTLGLDIGITSVGWSVLENDLYGEPMKIENLGVRIFSGAEHPKDGSSLAAPRRQARSSRRVIRRRRHRKERIKHLILSFGLVSPEEMDRLLSSSQEKSVYELRVDALARALTPQEAVRLLIHFAQRRGYRSNSKSEEIKEGAETGKVKQAIQENRQRMAEKGYRTVGEMLWKDPLFKRVNPDGSLVLTVHNSPDDYKITVERTMLAEEIRLIFHTQRALGSTWAAVELEERYLDIWGSQRNFDEGPGGNSPYGGSLIESHLGRCTFEPDQPRAPKSCFTAERFRLLEFANKLKIVGHGFPAEFLQEDQRRILLEFAMTSPNGTYAQLRKKLGLSEDTFFNNLYYGENEAAKVEKKKLGLMPFYHTLRKALSRIEKNAVDTLSPTQLDEIPRILTLYKADQSRIEKLQELGLPERYFPVLLELSPSKAMHLSLSAMKKLLPYMEQGFLYDKACAQVYGSHTGSIGSATRSTKLSLEMIEEISNPVVRRAVSQAIKVINAIVRQYGPPEVVRIELARELSKPKKIRDQLEKKQQNNAAWNDEIRQQIQEYKKEPPTGQDIVKFKLFHQQNGLCLYSGKNLDLSRLFEPGYVDVDHIIPYSISFDDSYNNKVLVLTSENRQKGNRLPFEYFGHDQDRWHRFETLVDTQIRSFQKRNNLLCHTLSEEQRSGFKKRNLVDTQYLSTVLFHLIEDHLLFAETGNYKRKTQAVNGSITAHIRKRLGIEKVRANGHLHHAKDAAIVACVSPGMIQKITNFSKRRECAWTKEGYVDYETGELLTKEAYEEKYAPKFPPPWPKFSQELEARLSEDPRREIDFLHLSTYDSDEALSPVFVSQAPNRKITGAAHEETIRSAKEPGGTVSKVPLSSLKLDNSGEIADYYRPEDDPLLYEALKARLLAFGGSGKHAFTEPFYKPKHNGQPGPLVKKVKLYKKATLTVPVGHGIAANGKMVRLDVFYVQGEGYYFVPLYTADTVKPGLPCLAVTTSKKDPSWKKMQEEDFLFSLYSGDLVRIVSSKGIKLNLAKSAEGPASLTVQDALLYYGGFNISTGALNLATHDGRYWQSGLGGKRLSLIEKYQVDVLGRYSRVSLPEKRMRFSLHGIS

SEQ ID NO: 6280 - protein, 538 aa, synthetic construct
  REGION 1..538: note = Synthetic
VPYSKCFDDSYNNKVLVFSSENQSKGNRLPLEYMLAEGDEDKLDNYVTLVEAFIKNTRKRQRLLKPCLTAEDSSDWKERNLTDTQYITKAVADILRNYLAFEEDSPFAKKPVRSINGAVTDQVRKRLGLQKHREEGDLHHAMDAAVIAVTTDGYINRISRYTQRREFGKRIGCYKDKQTGEKVEIEKQKGQAPLYVDPETGEKLTEQAFDQKYAPTFPAPWPEFTKELKARMAPNADEAIRQLYLPSYGSEEIKPIFVSQMPNRKVSGQAHAETIRSARVDVDESGKERIIAVAKTPLTSLKLDKDGEIENYYMPSSDRLLYEELKNRLKAYNSAEQAFKEPVYKPKKDGSQGPRVYKVKTYKPTTSNVKVAGGIADNGSMVRIDVFHIKEGKDKGYYFIPIYVADTIKRELPQKAVVAAKPIDQWKEMDDKDFIFSLYPGDLVRVEHKKNIVFQSTDKNSSDTISCKNLLTYYSGANIAKGSITITNHDRSYIVHGLGIKTLQSLEKYEVDVLGNYHKVRLPEKRQTFNLKYSQKKR

SEQ ID NO: 6281 - protein, 1144 aa, synthetic construct
  REGION 1..1144: note = Synthetic
MYNKPTLYHYEGKSCYYDKVEHLEALPRPYRPGYLRILRKESSQMSDFHYALGLDIGIGSVGWAVLRNRPDGEPDRIQDLGVRIFDKAEQPKTGASLAAPRREARSARRRLRRHRHRLERIRYLMEQHGIMPISDIQAMYAAGGFEKSPYQLRAEALDRPLSREELVRVLIHLAQRRGYRSNSTAEAAKNEKETGKVKSAIEENRACMEQHGYRTVGEMMFRDERFWQNNPDGTRCHQTRNKAEDYRFTVERTAIVDEAKQIFTAQRRFGADWMDDGLEAAYLAVLESQRSFDEGPGGDSPFHGGIGERVGFCTFEPDEQRAAKATYTFEYFKLLQDLNHMRLAGNGTAPQPLNAQQREILKAAALQSASLSYGQIRKKLALDENVFFHHLYYGDKPKEEAEKRKWPQMQSYHKMRTALDKVGKGTINTLTETQLNAIATILTQYKSDARRIEALREAGIPAQFDDALLPLSFSKYGNLSVTAMQKLIPLLEQGMRYDEACTQIYGDHRGLHPEQRKNRLSLRDMREITNPVVRRAVSQTIKVVNAVVRTYGPPDVVRIELAREMSQNFEKRRKTEKRQDENRTANEKAKEQIAEYKGDRATGLDIVKFKLYREQDGVCLYSGRNLDLSRLFEPGYVDVDHIIPYSRCFDDSYQNKVLVLASENRQKGNRLPYEYFGQDEARWHGYEVRVENLIRNYRKRQKLLKKRLTEEESAGFIDRNLKDTQYITRSIYNLLRDNLAFAESDYRKKPVQTVNGAVTSMLRGRWGVQKIREDGDLHHCMDAAVIAAASPGLVQRLTEYSKRREAFEEVSRGYVDPATGELVELPEQLRRDPFPKPWERFRQELEARLDPIDPQHQIDLLKLATYESDEEIRPVFVSRMPNHKVTGAAHAETIRSSKGGDGFTVTKTPLANLKLNKFGEIEGYYNPASDTLLYNALLARLKDFGGDGAKAFAQPFYKPKKDGTPGPRVDKVKICEKATIGLPVRNGIAANGSMIRIDVFYVEDDGYYFVPIYVADTKKAELPNKAVVAYKAYSDWKEMIDENFLFSLYPGDLVRIQSRKGIKLNIAKGGTGEKEIVRQDGLYYYQGANIATGAIALATHDRRYLQSGLGLKTLQSIEKYQVDVLGNYYKVDLPEKRMKFSKEG

SEQ ID NO: 6282 - protein, 1140 aa, synthetic construct
  REGION 1..1140: note = Synthetic
MPLYHYEGKSCYYDKVEHLEALPRPYRPGYLRILGKEPSQMSEFHYALGLDIGIGSVGWAVLRNQPNGEPDRIQDLGVRIFDKAEQPKTGASLAAPRRDARSARRRLRRHRHRLERIRYLMEQRGIMPVADIQAMYAAGGFQKSPYQLRAEALDRPLTKEEAVRVLIHLAQRRGYKSNSTAEAAKDEKETGKVKTAIEENRRCMAEYGYRTVGEMMYRDERFWQKHPDGTHYHQTRNKAEDYRFTVERAAIVDEVRQIFAAQRRLGTVWMDEDMETAYLSILESQRSFDEGPGGDSPFSGGIGERVGACTFEPDEKRAAKATYTFEYFKLLQDLSRMRLTGMGMPPEPLDAAQREALKSAALRSASLSYGQIRKKLNLDDDVFFHGLYYGEKTKEEAEKRKWPQMQSYHKMRTALDKVGKGAIGTLTEEQLNAVATILTECKSDAKRIAALREAGIPPQFDEALLPLSFSKYGSLSVQAMQKLIPLLEEGLRYDEACTRVYGDHRGLRSEQRTNRLSLNDMEEITNPVVRRAVSQTIKVINAVVRTYGPPDVVRIELAREMSRTFDERRKMEKRQDDNRAANERAKDQIAEYKGDHATGLDIVKFKLYQEQDGVCLYSGQNLDIARLFEPGYADVDHIIPYSRCFDDSYQNKVLVLASENRQKGNRLPYEYFGQDEARWHGYEVRVENLIHNYRKRQKLLKRRLTEEESTGFIDRNLKDTQYITRAVYNLIRDHLAFAESNYRKKPVQAVNGAVTAMLRGRWGVQKIREDGDLHHCLDAAVIAATTPGLVQRLTAYNKHRETWERSPAGYVDPATGEMLELPQEARRDPFPKPWERFRQELEARLDPIDPRHQIDLLKLETYESDEEIKPVFVSRMPNHKVTGAAHAETIRSSKGGDGFTVTKTPLTNLKLNKFGEIEGYYNPASDTLLYDALLARLKDFGGDGAKAFAQPFYKPKKDGSPGPRVDKVKICEKATVGLPVRDGIAANGSMVRIDVFYVEGDGYYFVPIYVADTKKESLPNKAAVAMKPYNLWKKMKDENFVFSLYPGDLVRIQSRKGIKLNLAKGGTGEKEIVRQEGMYYYRSAGIAVAQISVETHDRRYLQPSLGIKTLQSIEKYQVDVLGNYYKVDLPEKRMTFSKEG

SEQ ID NO: 6283 - protein, 1100 aa, synthetic construct
  REGION 1..1100: note = Synthetic
MHYTLGLDIGISSVGWAVLQNMPDGEPFKIEDLGVRIFEKAEQPKTGASLALPRREARGARRRLRRRRHRKERIKALLQETGCIGREELAVLLEASGFDKDVYTLRAEGLDRRLTQAEWARVLLHLAQRRGYRSNSTAEAAKDQETGALKTALSANQVLMEAKGYRTAGEMFCQDKKFQMLGPDGQIWRKTRNTAGDYSFTVTRDMVEAEVHMLFASQRQYGSSYASENMESRYCEILLSQRDFDVGPGGSSPFRKGDLRGTCTFERTELRAFKACYTFEYFKLLQDLNHIRIQSAGHSSRGLTADERERLTALAMKSASLHYGQLRRELALNGEERFNTVRYQLDDVDAEEKKTRFQAMQSYHKIRKALDGVGKGYIAAFSHDQLDEIATVLSLYKSDERRKEQLGGLGLEDTVIQVLLPLSFSKAGSLSLTAMKKMIPYLEKGVNYDEAARAVYGDHRGHFEKTRTETLSYGALQKQGALDDITNPVVLRAVSQTCKVMNAVVRRYGSPQAVHIELAREMSRNFADRQKIDKQYQENRAANERLIKQIEEIKGRRATGQDLVKFKLFRDQNEVCLYSGTKLQAERLFDPGYVDVDHIIPYSICFDDGYRNKVLVLAAENRQKGNRLPLEYMAGDAEKTGRFITLVETGVRDYRKRQRLLKQKLTDEDLEGFKARNLSDTQYITRAVYHLLNDHLKFAEDTPFAKKPVRAINGAVTDYMRKRLGLHKNRADGDLHHAMDAAVVAITTDGMIQRISNYAKRREWGTKILGNYVDPETGELLTQEAFDEKYAPSFPPPWPQFRQELEARLAPDPDAEIRSLNLPHYDPEQMVRPIFVSRMPNRKVSGAAHKETIRSGKLPGYSVVKTALSDLKLDKNGEIKDYYDPSSDRLLYEALREQLKLFGGDGKKAFAQPFHKPKKNGTPGPVVNKVKTYGKSSLNVAACGGIADNGGMVRIDVFYVEDDGYYFVPVYTADTVKMQLPQKAVVQGAAVDGWKEMRDADFLFSLYAGDLIKVMAKKPIRLQLANKDASGEPELQRKEWMLYYVGASISTGAITVTTHDRKYQKGSLGVKTLLSVEKYEVDPLGEYHKVHTPEKRQTFH

SEQ ID NO: 6284 - protein, 1117 aa, synthetic construct
  REGION 1..1117: note = Synthetic
MEKTGDNAMKKGQKHCHYTLGLDIGIASIGWAVLGNDEDGTPNRIIDLGVRIFESAEVQKTGESLAAPRRDARSARRRLRRHRHRLERIRYLLVQQGVLTQEEMTHLYDKSDMVSPYQLRTEGLDRLLNAQEFSKVLIHLAQRRGYQSNSTAEEAKNEKENGIIKTAILENQQRMERGGYRTIGEMMYRDAAFWETINGIRYHCTRNKAGDYRFTVDRASILAEVSILFEAQRRLGSPWASVEMEDAYTAILSGQRSFDEGPGNDSHGNESPFRKAMSHNVGNCTLIPTELRAARADYTAEYFKLLQDLNHMRLMDNSGSHPLTQQQRAILEEMAFRSANLTYGQLRKKLGLSDEVRFAGLYYGEDTIEKAEKRKWAQMQSYHKIRTALDKVSKNAIQTLTQDQLDAIGEILAGGVSDAKRINSFCLEGIPEEYHKALLPLSISKRAKLSIAAMRKLIPFLQQGMRYDEACKAAGLDFHGADGKVEKLSDFLNEITNPVVRRAVSQTIKVVKAVVDNYSNRKEMKLDAVRIELAREMHHSIKERNRMKKRQEENREKNEQVKAQILETKPGTRVTGLDIVKFKLHQEQKGFCPYSGVEIKKERLYEPGYAEVDHIIPYSRCFDDSYSNKVLVLAEENRQKGNRTPYEYFGADEQRWHEFSARVRASVQDFKKRQKLLNTSFGEEQKNEFTQRNLNDTQHITRVVYNYLRNNLEFADSAYAKAPVRAVNGAVTAMLRGRWGIEKMRGNGDLHHCKDAVVIAATSRSMVQRLTNYYKEEERLFMGKTNFVDPATGEVLTRKEFQQRFAPKFPQPWDRFREELEARLDPIDPMEAVTALYLSTYEPEEEIAPVFVSHMPKHTVTGAAHEETIRSRTETGTVVKTALTSLKLDKNGEIDGYYNPQTDPRLYQALVERLRQFDGEGKKAFAEPFYKPKKDGTPGPRVDKVKIERKSSLSVSTGRGVADNGRMVRIDVFRVPDDGYYFVPIYVADTKKGILPSKAVVAGKSPEAWKQMKPEHFLFSLFKGDLIYVESRKGISLALAEKATGEKTIQVKSGLFYFCGADISTGSIGMEIHDRRYTKRGLGIKTLTLIEKCQVDVLGNVSKVRLPETRLEFRGRK

SEQ ID NO: 6285 - protein, 1097 aa, synthetic construct
  REGION 1..1097: note = Synthetic
MNMESKHYTLGLDIGIASIGWAVLNNNVDGTPDRIIDLGVRLFESAEVQNTGESLAAPRRNARSARRRLRRHRHRLERIRYLLVQQGVLTQEEMTHLYDKCSMLSPYQLRTEGLDRILNAQEFSRVLIHLGQRRGYLSNSTAEEAKNEKENGVIKSAILENQQRMEHGGYRTIGEMMYRDAAFWETINGIRYHCTRNKAGNYHFTVDRASILSEVHILFEAQRRLGSPWASQETEDTYAAILSSQRSFDEGPGGDSPFRKGISERVGNCTLIPTELRAAKADETFEYFKLLQDLNHMRLVDSNGSHPLTQQQRALLEAAAFRTANLTYGQLRKKLGISDEVRFAGLYYGQDSIEKAEKRKWAQMQSYHKIRTALDKVSKDAISMLTQDQLDAIGEIVTAYKADAARIEHLQAAGIPKEYHNALLSLSFSKYGKLSCCAMRKLIPFLQQGMRYDEACKAAGMNFHGANGNVEKLSDFLDEITNPVVRRAVSQTIKVVNAVVRTYGNPDAVRIELAREMSHSFDERNKIKKRQEDGRRKNEQIKAQILETKAGHRVTGLDIVKFKLFQEQDGVCPYSGKALDVQRLYEPGYADVDHIIPYSRCFDDSYSNKVLVLASENRQKGNCTPYEYFGADERRWHEFSVRVGASVRDFKKRQKLLNTSFGEEQGKEFIQRNLNDTQHITRVVYNYLRNNLSFADSTYANAPVQAVSGTVTATLRGRWGIEKMREDGDLHHCKDAVVIAATSPSMIQRLSNYYKEEERLFMGKTHFVDPETGEVLTRKAFQQRFAPKFPQPWDRFREELEARLDPVNPMDAVMALHLSTYEPDEDITPVFVSHMPKHTVTGAAHEETIRGKTETGTVAKTALTALKLDKHGEIEGYYNPQTDPRLYQALVERLKQFGGDGAKAFVEPFYKPKKDGTPGPRVDKVKIAKKASLSVSTGRGVADNGNMVRIDVFHVPDDGYYFVPIYVADTKKAALPSKAVVAHKLPEAWKQMKPEHFLFSLFKGDLIQLENRKGISLLLTKEAIGEKTIQVKSGLFYFCGADISNGSIEIETHDRRYGKKSLGLKTLTAIEKYQVDVLGNVNKVKLPEKRLEFRGRK

SEQ ID NO: 6286 - protein, 1011 aa, synthetic construct
  REGION 1..1011: note = Synthetic
MSEFHYALGLDIGIGSVGWAVLRNQPNGEPDRIQDLGVRIFDKAEQPKTGASLAAPRRDARSARRRLRRHRHRLERIRYLMEQRGIMPVADIQAMYAAGGFQKSPYQLRAEALDRPLTKEEAVRVLIHLAQRRGYKSNSTAEAAKDEKETGKVKTAIEENRRCMAEHGYRTVGEMMYRDERFWQKHPDGTRYHQTRNKAEDYRFTVERAAIVDEVRQIFAAQRRLGTAWMDEYMETAYLSILESQRSFDEGPGGDSPFSGGIGERVGACTFEPDEKRAAKATYTFEYFKLLQDLSRMRLTGMGMPPEPLDAAQREVLKSAALRSASLSYGQIRKKLNLDDDVFFHGLYYGEKTKEEAEKRKWPQMQSYHKMRTALDKVGKGAIGTLTEEQLNAVATILTECKSDAKRIAALREAGIPPQFDEALLPLSFSKYGSLSVQAMQKLIPLLEEGLRYDEACTRVYGDHRGLHPEQRKNRLSLTDMDEITNPVVRRAVSQTIKVINAVVRTYGPPDVVRIELAREMSRTFDERRKMEKRQDDNRAANERAKDQIAEYKGDHATGLDIVKFKLYREQDGVCLYSGQNLDIARLFEPGYADVDHIIPYSRCFDDSYQNKVLVLASENRQKGNRLPYEYFGQDEARWHGYEVRVENLIHNYRKRQKLLKRRLTEEESSGFIDRNLKDTQYITRAVYNLIRDHLAFAESNYRKKPVQAVNGAVTAMLRGRWGVQKIREDGDLLYCSGQLIGGNYTIAGNVSSQYISGLLMALPLLIRDSLLMVSGPLESAAYVAMTEDALQLSKLTIPKMGAMWAIPGQQRCHLPKRTVVEGDWSNTAFFLCMGALSKEGVTVEGLNLQSSQGDRGVLDVLRRFGAEVTEHGDAVTVRRGTLHGVTIDAAPIPDLIPVLSVVASVAEGETRVENASRLRLKESDRLKSTADLLRALGGRVEEKEDGLVITGVPALHGGAVETQNDHRLAMSAATAACAATGEITVDNDGCVAKSYPCFWEDFSSLKGEGL

SEQ ID NO: 6287 - protein, 1098 aa, synthetic construct
  REGION 1..1098: note = Synthetic
MEYTLGLDIGIASIGWAVLANDINGDPYHIQDLGVRIFTSAEDQKTGASLATPRREARSARRRLRRKRHRKERIRSLLVHSGVISQDSLDALFLDSSFSKDVCHLRAEGLERRLNREEWVRVLIHLSQRRGYRSNSTAETSKEKDNGILQQALSENLSLMNEKGYRTVGEMFCKDKKFQITGADGTQWRKTRNSPGEYRFTITREMVAEEVLKLFQAQRNFDNPYAEEALEADYTAILFSQRHFDEGPGGDSPYRKGDLRGFCTFETKERRAFKACYTFEYFKLLQDLNHIRILSPTEPTRRLLPEERQVLIKLAQKSPSLDYSKIRKALSLAQDTSFNVVRYNSDTPETAEKKTKFQQMQSYHKLRKALNAISKDFILRFDHEQLDEIATILSLYKADDKRRTLLTSLGLSPDTINALLPLSFSKAGNLSLTAMKKLIPHLENGENYDEACRTVYGDHRSHQSGQRYRTLTLNQELRETGALDAITNPVVLRALSQTTKVLNAIIRRYGSPQRISIELAREMKNNFEQRRKLDVQNQKNQEKNSKIMAQIEDLKGGRPTGLDLVKFKLYQEQDGVCLYSGTQLDIGKLFDPGYVDIDHIIPYSISFDDGYQNKVLVRSEENRQKGNRLPLEYLSADPVRAENFISLVERYVRDYRKRQKLLKTKLTEEDFSGFKERNLSDTQYITRAVYNLLNDFLMFSPHAPKKPVRAVNGAVTDYVRKRLGLKKNREDGDLHHAMEAVVVAITTDRMIQRISNYAKRREWGKSLSNGYVDPETGELLSKDAFDEKYAPVFPEPWPGFRKELLARLSPAPDEEIRALNLPHYDTKTVIQPVFVSQAPRRKVTGPAHEETIRSGKLPGYTISKTPLTALKLDKAGEIDSYYNPEDDRLLYEALKAQLLAFGGNAAEAFAAPFRKPKKDGSPGPIVNKVKLINKTTLNVDTCRGLAQNGDMVRIDIYHVPGDGYYFIPLYTADVVKKTLPQKAAVANKPYEQWKEMDEKHFIFSLYPRDLVYVSKNKAINLKLNNKNATGEPELLRKEWLLYYVGADISTAAISLTTHDRKYKRSGLGIKTLHSLEKYEVDPLGNYHKIQIPEKRQGF

SEQ ID NO: 6288 - protein, 797 aa, synthetic construct
  REGION 79..97: note = misc_feature - Xaa can be any naturally occurring amino acid
  REGION 1..797: note = Synthetic
VPQVPRSEVHQTSHCTEPARKRHLQQDSLPAAAGRIHPGDGGATGEKGKIHSAAKLSRNPQSAQSCGQSPAPRPAPGAXXXXXXXXXXXXXXXXXXXDEARRSRLEALGLSQPVIEALLPLSFSKAGNLSLTAMRKLIPQLEKGVTYDKACSAVYGDHRAHSGAQRYHTLTLNETLRDSGALDNLTNPVVFRAISQTTKVLNAIIRKYGSPQTIAIELAREMRNNFQQRKKIQDSYEAHQKVNEKAMKQVAELKGSRPTGQDLVKYKLYEEQQGFCLYSGTQLEANRLFEPGYVDVDHIIPYSICFDDSYNNKVLVLTSENRQKGNHLPMEYLASDAKKRERFIAWAKCCIRNHRKLQRLLKETLTEEDCRGFKERNLKDTQYITTAVYNLLNDYLEFSPNAPKQPVRAVNGSITAHVRRRLGLEKHRENGDLHHAMDAAVVAVTTPGMIQRISNYAKRREMGRKVKGKYVDLDTGELMTQEAFDAKYAPHFPAPWPHFQQELLARLSPDPDTEIRALNFPHYDPQEVIAPVFVSQMPRRKATGPAHEDTIRSGKAPGYTISKTPLNELKLEEKTGEIENYYNPGDDRLLYEALKERLRQFGGIGKNAFEAPFHKPRKDGTPGPVVRSVKTIKKSNIGVSVNGGIAGNGSMVRIDVYRVPNDGYYYIPVYITDTVRGVLPQKACVQDKPPEQWKVMDDSHFLFSLYPGDLIRVERRTPIKLKPPKKAAEKSGISRNECLVYFVSADISTASICITTHDRKYIQKGLGVKRLSALEKYVVDPLGSYHKVQLPEKRQGF

SEQ ID NO: 6289 - protein, 1115 aa, synthetic construct
  REGION 1..1115: note = Synthetic
MEKTGDNAMKKGQKHCHYTLGLDIGIASIGWAVLGNDEDGTPNRIIDLGVRIFDSAEVQKTGESLAAPRRDARSARRRLRRHRHRLERIRYLLVQQGVLTQEEMTHLYDKSDMVSPYQLRTEGLDRLLNAREFSKVLIHLAQRRGYQSNSTAEEAKNEKENGIIKSAILENQQRMERGGYRTIGEMMYRDAAFWETINGIRYHCTRNKAGDYRFTVDRAAILSEVSILFEAQRRLGSPWASVEMEDAYTAILSGQRSFDEGPGNDSHGNESPFRKAMSHNVGNCTLIPTELRAARADYTAEYFKLLQDLNHMRLVDNSGSHPLTQQQRAILEEMAFRSANLTYGQLRKKLGLSDEVRFAGLYYGEDTIEKAEKRKWAQMQSYHKIRTALDKVSKNAIQTLTQDQLDAIGEILTAYKADAARIEHLQSAGIQKEYYKALLTLSFSKYGKLSCCAMHKLIPFLQQGMRYDEACREVYQDHRTKEASEKKQRLSLNDIDEITNPVVRRAVSQTIKVVNAVVRIYGKPDAVRIELAREMSHSFDERNKMKKRQEDGWRKNEQVKAQILETKPGNRVTGLDIVKFKLYQEQDGICPYSGKPLLIERLYEPGYADVDHIIPYSRCFDDSYSNKVLVLASENRQKGNRTPYEYFGADEQRWHEFSVRVGASVRDFKKRQKLLNTSFGEEQGKDFIQRNLNDTQHITRVVYNFLRNNLEFADSAYSKAPVQAVNGAVTAMLRGRWGIEKMRGDGDLHHCKDAVVIAATSRSMVQRLTDYYQEEERLFMGKTHFVDPATGEVLTRKEFQQRFAPKFPQPWDRFREELEARLDPIDPMEAVMALHLSTYEPEEEIAPVFVSHMPKHTVTGAAHEETIRSRTETGTVVKTGLTSLKLDKNGEIEGYYNPQTDPRLYQALVDRLKKFGGDGAKAFAEPFYKLKKDGTPGPRVDKVKIERKSSLSVSTGRGVADNERMVRIDVFRVPDDGYYFVPIYVADTKKRILPSRAVVRGKLPEEWKQMKPEHFLFSLFKSDLIRVENSKGISLALAEKAVGEKTIQVKSGLFYFCGANISNCSIEVETHDRRYGKDGLGLKTLKSIEKYQVDVLGNVSKVRLPEKRLEFRGRK

SEQ ID NO: 6290 - protein, 1100 aa, synthetic construct
  REGION 1..1100: note = Synthetic
MHYTLGLDIGISSVGWAVLQNMSDGEPFKIEDLGVRIFEKAEQPKTGASLALSRREARGARRRLRRRRHRKERVKALLQETGCIDREELEALLEASGFDKDVYTLRAEGLDRRLTQAEWARVLLHLAQRRGYRSNSTAEAAKDQETGALKTALSANQVLMEAKGYRTAGEMFCLDKKFQMLGPDGQIWRKTRNTAGDYSFTVTRDMVEAEAHVLFASQRQYGSSYASENMESRYCEILLSQRDFDIGPGGDSPFRKGDLRGNCTFERTELRAFKACYTFEYFKLLQDLNHIRIQAAGHPSRSLSADERERLTALAMKSAGLHYGQLRKELALREEERFNTVRYQSDDVESAEKKTKFQEMQSYHKIRKALDGVGKGYIASFSHNQLDEIATVLSLYKSDERRREQLSGLGLEDVVIQALLPLSFSKAGNLSLSAMKKMIPHLKKGVNYDEAASAVYGDHRGHFEKARTATLSYGELQRQGALDAITNPVVLRAVSQTCKVINAVVRRYGSPQAVHIELAREMSRNFADRQKMDKQYQENRAANERLIQQVEEIKGSRATGQDLVKFKLFRDQNEVCLYSGTKLQAERLFEPGYVDVDHIIPYSICFDDGYRNKALVLASENRQKGNRLPLEYMAGDEEKTGRFVTLVEISVRDYRKRQRLLKRELIDEDLEGFKERNLSDTQYITRAMYNLLNDYLQFAEDSPFAKKPVRAVNGAVTDYMRKRLGLHKNRADGDLHHAMDAAVVAITTDRMIQRISNYAKRREWGTKVRGNYVDPETGELLTQEVFDEKYAPSFPPPWPQFRQELEARLAPDPNAEIRSLNLPHYDPEQIIRPVFVSRMPNRKVSGAAHKETIRSGKLPGYSIVKTALTDLKLDKNGEIKDYYNPSSDRLLYEALRERLKQFDGDGKKAFAQPFHKPKKDGMLGPVVNKVKTYGKSSLNVAACGGIADNGGMVRIDVFHVEDDGYYFVPIYTADTVKGQLPQKAVVAYAAAEDWKPMSDSDFLFSLYAGDLIRIARKKPIGLKITNKDSSGQPELLRTEWMLYYSGADISTGAIIGTTHERKYTGRGIGIKTLQIIEKYEVDPLGEYHRVHTPEKRQTFR

SEQ ID NO: 6291 - protein, 1100 aa, synthetic construct
  REGION 1..1100: note = Synthetic
MEYTLGLDIGIASIGWAVLANDSKGDPFHIEDLGVRIFEAAEHPQTGASLAEPRREARSARRRIRRRRHRKERIKALLIKYGVISQECLDTLFLDSGFAKDVYTLRAEGLDRGLEPEEWVRVLLHLAQRRGYRSNSTAEAAKDQDTGALKEALSGNLSLMKEKGYRTVGEMFCRDEKFQMRGPDGVSWRKTRNSPGDYSFTVTRDMIQREVSALFQTQRKYGNLFAGESLEDTYTQILFSQRPFDEGPGRDSPYQKGDLRGRCTFEPEEKRAFKASYTFEYFKLLQDLNHIRILSSTEPTRRLSQEEREILIALALKSPNLDYLKLRKALELPSEASFNVVRYGETPQEETEKKSKFAQMQSYHKLRRALDTVKKNYILQLSHAQLDEIGTVLSLYKADDKRRAALEAIGLSPEAIAALLPLSFSKAGNLSLTAMKKLIPYLEQGENYDSACRLVYGDHRGHSGDRRYKTLTLNRELRESGALDAITNPVVLRALSQTTKVLNAIIRTYGSPQRIVIELAREMRNNLKERQKIDKKNQENHRKNETLMAQIEAIKGARPTGQDLVKFKLYQEQDGICLYSGTQLDSARLFEAGYVDVDHIIPYSISFDDSYRNKVLVRSEENRQKGNRLPLEYLSADPARAERFTTLVERHIRDYRKRQKLLKAKLTEEDCAGFKERNLTDTQYITRAIYNLLNDYLEFSPHASKKPVRAVNGAVTDYIRKRLGLRKNRNDGDLHHAMDAAVVAVTTDHMIQRISNYAKRREWGKKVMGQYLDPETGELLSREAFDAKYAPTFPEPWPGFRQELLARLSLDPDTEIRALHLPHYDPQHPVKPVFVSQMPQRKVTGPAHQETIRSGKVPGCSVSKVPLSVLKLDKDGEILNYYNPQDDRLLYEALKARLQAFGGDGKKAFVEPFHKPKKDGTPGPLVQKVKIQEKSSLNVAVCGGVADNGSMVRIDVYHVPDDGYYFIPVYTADVVKKTLPQKAAVQSSKNIQKEWKEMCEDNFVFSLYPGDLIHVQAKKPINLKVRSKEATGEPELLRKEWMVYYVKASISTASITVTTHDRKYEKDSLGIKTLLLLEKYEVDPLGNYHKVQLPEKRQQF

SEQ ID NO: 6292 - protein, 1231 aa, synthetic construct
  REGION 1..1231: note = Synthetic
MIEVTKPRAIALGYFDGVHLGHRALMQRAVERAKQIGGTSAVFTFDVHPDSVVMGRQVPLLTANAYRREEIKQLGGVDEVIFGHFDERMQHMDWRDFIHKLLIGQFHAGWIISGRNNRFGYKGQGNAEGMAVECAKAGIGYDCIEDVKVDGIVVSSTYIRQLIAQGDMEGAAKFLGHPYTVTGIVEHGRRVGTSVLGVPTVNLRLPAEMALPPYGVYATRVLVDGKSYIAATNIGVKPTFLDGGAPTIEPHLLDFSGDLYGRMIHVELHKFLRPEMQFESVEALKTAIEENRRCMAEHGYRTVGEMMYRDERFWQSNPDGTRYQQTRNKTDDYRFTVERSAIVDEAKQIFAAQRKLGADWSSEDLEAAYLSILEGQRSFDEGPGGESPFRGGIGDKVGFCTFEPDEKRAAKATYTFEYFKLLQDLNRMRLTGMGMPPEPLDDEQREVLKSAALRSASLSYGQIRKKLNLDDDVFFNDLYYGEKTKEEAEKRKWPQMQSYHKMRTALDKVGKDTIGTLTEEQLNAIATILTECKSDAKRIAALRMAGIPVQFDEALLPLSFSKYGSLSVQAMQKLIPLLEQGMRYDEACTQIYGDHRGLHSEQRKNRLSLTDMDEITNPVVRRAVSQTIKVINAIVRTYGPPDVVRIELAREMSRNFDERRKAEKRQDENRAANERAKEQIAEYKGDHATGLDIVKFKLYQEQDGVCLYSGKNLDPSRLFEPGYADVDHIVPYSRCFDDSYQNKVLVLASENRQKGNRLPYEYFGYDEVRWHEYEVRVENLIRNYRKRQKLLKRQLSEEESAGFIDRNLKDTQYITRSIYNLIRNNLVFAESNYKKRPVQTVNGAVTSMLRNRWGVQKIREDGDLHHCLDAAVIAATTPGLVQRLTEHSKRRETLEKAPAGYVDPATGELLELSQEARRDLFPKPWERFRQELEARLDPIDPRHQIDLLKLETYESDEEIKPVFVSRMPNHKVTGAAHAETIRSSKGGDGFTVTKTPLTNLKLNKFGEIEGYYNPASDTLLYDALLARLKDFGGDGAKAFAQPFYKPKKDGTPGPRVDKVKICEKATVGLPVRNGIAANGSMIRIDVFYVEDDGYYFVPIYVADTKREKLPNKAAVAMKPYNLWKEMKDENFVFSLYPGDLVRIQSRKGIKLNLAKGGTGEKEIVRQDGMYYYRSAGIAVAQIFVETHDRRYLQPSLGIKTLQSIEKYQVDVLGNYQKVDLPEKRMTFSKEG

SEQ ID NO: 6293 - protein, 1098 aa, synthetic construct
  REGION 1..1098: note = Synthetic
LGLDIGIDSVGWAILCNNAEGEPIKVENLGVRIFDKAEQPKTGESLAAPRRNARSARRRLRRHRHRLERIRFAIERAGILSCDEIQALYTQGGFAISPYQLRAEALDRPLSREETVRVLIHLAQRRGYKSNSTAEAAKDEKEIGKVKQAIEENRLCMQQHGYRTVGEMMYRDDRFWQTNPDGSRYHQTRNKADDYRFTIERSAVVDEVHQLFEAQRRLHTPWMTEEFEAEYLSILESQRNFDEGPGPGSPFRGGITEKVGICTFEKEPPEPRAAKATYTFEYFKLLQDLNHIRLADSRNFSVPLTQEQREILKKAAMQSASLTYKQIREKLNLGEDVYFNGLSYTKQAKEETEKKKWPQMQSYHKIRAALNKISKGAILSLTQDQLDAIGTILTLYKNDKNRLKALDEAGIPAELHQALLPLSFSKFGNLSVKAMRKLIPYLEDGWRYDEACKAVYGDHRGLQTESRKSKLSLRDMEDEITNPVVRRAIAQSIKVINAVVRTYGAPDVVRIELAREMGHNYQERKKMEKRRDENQAANERAKEQISEYKGDHATGLDIVKFKLFKEQDGVCLYSGKNLDISRLFEPGYVDVDHIIPYSRCFDDSYQNKVLVLSSENRQKGNRLPYEYFGQDEERWHAFEVRVENLIRSYRKRQKLLKRELTEEESADFIQRNLNDTQYITRAVYNLVKDNLVFADSPYRKRPVQAVNGAVTAMLRGRWGVRKVREDGDLHHCLDAAVVAATSPGMIQKLTNYNKRRETAERIPGGYVDASTGEVLTKKEYDRKFSPEFPSPWPLFRQELEARLDPVDPRAAIDRLKLPTYESDEEIRPIFVSRMPNHKVTGPAHAETIRSGKMGDGFTVTKTSLANLKLNKQGEIEGYYHPESDRLLYEALLQRLKEFGGDGSKAFAEPFHKQKRDGTPGPRVDKVKIFEKSTLNLQVHDGVAANGSMVRIDVFHVEDDGYYFVPIYIADTKKDRLPNKAVIAYKPYQEWKEMAAEDFIFSLYPGDLVRIQSRKGIKLNISKGGTGEKVIVRRDGLYYYRTAGITVGSIQIETHDRRYFQPGVGIKTLQSIEKYQVDVLGNYHKVSLPEKRMPFNKEG

SEQ ID NO: 6294 - protein, 777 aa, synthetic construct
  REGION 1..777: note = Synthetic
MGSCAKSWGFRTRCGLRAFTMGQTPLKKAEKRKWAQMQSYHKIRTALDKVSKDAIRTLTQDQLDAIGEILAGGVSDAKRIHSFGLAGIPEEYHKALLPLSISKRAKLSIAAMRKLIPFLQQGMRYDEACKAAGLDFHGADGKVEKLSDFLNEITNPVVRRAVSQTIKVVNAVVDTYSNRKKMKMDAVRIELAREMHHSIVERNKMKKRQEDNREKNEQAKAQILETKPGTRVTGLDIVKFKLHQEQKGFCPYSGAEIKKERLYEPGYAEVDHIIPYSRCFDDSYSNKVLVLAEENQQKGNRTPYEYFGANEQRWEEFSAHVRASVRDFKKRQKLLNTSFGEKQKEEFTQRNLNDTQHITRVVYNYLRNNLEFADSAYAKAPVQAVNGAVTAMLRGRWGIEKMRGDGDLHHCKDAVVIAATSPSMIQRLSNYYKEEERLFMGKTHFVDPGTGEVLTRKEFQQRFAPQFPQPWPRFREELEARLDPVNPKEALMALNLSTFEFDPEEKIPPVFVSHMPKHTVTGAAHEETIRSRTETGTVTKTALTALKLDKNGEIDGYYSPQTDPRLYQALVERLKQFGGEGAKAFAEPFYKPKKDGTPGPRVDKVKIERKSSLSVPTARGVADNGRMVRMDVFRVPDDGYYYVPIYVSDTRKATLPSKAVVQGKSPEAWKQMKPEHFLFSLFKGNLIYVESKKGISLALAKEAVGEKTIQVKSGLFYFCGADISTGSIGMETHDRRYTKRGLGIKTLTLIEKYQVDVLGNVSKVRLPETRLEFRGRK

SEQ ID NO: 6295 - protein, 1127 aa, synthetic construct
  REGION 1..1127: note = Synthetic
MPQSSTPTTFLWLGCLCYSCKYGRFTMEYTLGLDIGIASIGWAVLRNDAHGEPYRIENLGVRVFEKAEHPKTGASLALPRRQARGMRRCVRRKRHRKERIKNLIESIGLMSNEDMAHLFEQSSFAKDVYTLRAEALDRKLQSDEWVRVLIHMAQRRGYRSNSKAEEAKEKDNGILKNAISANQQLMREKGYRTVGEMFCKDAKFQAIGADGKSWRTTRNTAGDYKFTVTRHMVAEEVELLFAAQRTYGNPYATREFQQKYSEILFSQRNYDEGPGGDSPYQQMDLRGYCLFEPSEHRAFKACFTFEYFKLLQDLNHIRIRSRDNQRPLQPDERQKIISLVMKSDNLNFSRLRKELQLPDDNTFNLVRYEQETIEQAEKHSQFLQMQSYHKLRKALDHIVKGYITTLNHDTLDDIGTILSLYKADTKRISALKELNLEDSVIAQLLPLSFSKTANLSLTAMKKMIPLLETGVNYNEACSKIYGDFRGHKEDVRYKTLSLNPDFLQDTQLLENITNPVVLRAVSQTCKVVNAIVRKYGSPQVIRLELAREMSKNFDERRKAEKSMDENRKKNEQAMEHIREIKGDHVTGLDLVKWKLYQEQDGVCLYSGTPLDANRLFEPGYVDIDHIIPYSISFDDSYRNKVLVLSSENRQKGNRLPLEYMDGKPEKAAAFELLVQTRIRDYRKRQKLLKKQLTDEDLSGFRSRNLTDTQYITRTVYNLFNDYLEFAASEKYTKKPVQAVNGSVTDYMRKRLGLQKNRADGDLHHAMDAVVIATTSDGMIQRISNYAKRREWGKKFMGSYVDPETGELLSQAAFDEKYAPTFPEPWLHFRKELEARMGPTPYEDIMEMHLTNYEPDEEILPIFVSQMPRRKVTGAAHLETIWSGKEQGTLIKKVPLTSLKLDKNGEIKDYYHPNDDRLLYSALKEQLNVYQGNGEKAFAEPFFKPKKDGSPGPLVNKVKIQEKTTKSVPANKGIAGNGGMIRIDVFQVEDDGYYFVPIYTADTVKKNLPNRAATSGKQADSWKVMDDADFIFSLYPGDLVRIASPSMLKLKKCNSDASGEPVLLRKEAFLYYVGADISTVSWTLATHDRKYQCRGLGIKRLQTIEKYEVDLLGDYHKVSLPEIRQSFR

SEQ ID NO: 6296 - protein, 660 aa, synthetic construct
  REGION 1..660: note = Synthetic
MSEFHYALGLDIGIGSVGWAVLRNQPNGEPDRIQDLGVRIFDKAEQPKTGASLAAPRRDARSARRRLRRHRHRLERIRYLMEQRGIMPVADIQAMYAAGGFQKSPYQLRAEALDRPLTKEEAVRVLIHLAQRRGYKSNSTAEAAKDEKETGKVKTAIEENRRCMAEHGYRTVGEMMYRDERFWQKHPDGTRYHQTRNKAEDYRFTVERAAIVDEVRQIFAAQRRLGTAWMDEYMETAYLSILESQRSFDEGPGGDSPFSGGIGERVGACTFEPDEKRAAKATYTFEYFKLLQDLSRMRLTGMGMPPEPLDAAQREVLKSAALRSASLSYGQIRKKLNLDDDVFFHGLYYGEKTKEEAEKRKWPQMQSYHKMRTALDKVGKGAIGTLTEEQLNAVATILTECKSDAKRIAALREAGIPPQFDEALLPLSFSKYGSLSVQAMQKLIPLLEEGLRYDEACTRVYGDHRGLHPEQRKNRLSLTDMDEITNPVVRRAVSQTIKVINAVVRTYGPPDVVRIELALLLGGVDTPLMTAYKYRQEVPYVFDIVSEEDGPELLYEIYEVKLDCLYEPVKQSFFTDTVYNIPGRFKFAVSQSWTPVDAAPWGALDAYRFIREDNTPIGNFLLCYADRFVEIRFDPWYDGAAPTEKQMALVGTVLGSGPLS

SEQ ID NO: 6297 - protein, 742 aa, synthetic construct
  REGION 1..742: note = Synthetic
VEKKKFGHLQFYRQLRTALDKVEKGAADTLTWEQRDEIARILTVYKADDRRTDELQKAGIPEKYIDALLPLSPTKAMHLSVTAIKKIIPYLEAGMPYSDALSKAYGNQTNASTSSKKHKLSLNDIEEITNPVVRRAVSQSIKVINAIVRQYGAPERVRIELAREMGKNFKDRRMIETRQTDNAAKNERIKAQISEYKSDHITGQDIVKFKLFKEQDGICLYSGKSLDIARLFEPGYVDIDHIIPYSISFDDSYNNKVLVLSSENRQKGNRIPYAYFGQNSDRWKKYETLVSNTVRSYRKRKNLLLKFLSEAQIDGFKQRNLQDTQYLSKVIFRLIENHLQFAETAPGKKHTQPVNGAITAQVRKRLGIEKIREDGDLHHAMDAAVIACITPGMIQRITKYAQNHERFYATAKGYVDIKTGEVLTRAQYEAMDDIRFPEPWAGFRLELEARVSDHPQEAIAQLKLPHYENSEEIRPIFVSRMPNHKVTGAAHLETIRSKKGGAGSTVTKTALTELKLGKDGEIAGYCRKEDDPLLYEALKARLKAFGGDGKKAFAEPFHKPKHNGEPGPIVNKVKIQESATLTVPVNHGVAANGSMVRLDVFYVDGDGYYFVPIYTADIVKPKLPNRAVVAGKKASEWKMIDDNHFVFSLYPKDLLRIRSNKGIKLKAVNKHADLQEYSANDCLCYYVGFDIATGAFTVESHDRRLNRRGLGGKTLLSIEKYQVDVLGNYFPVALPEKRMKFR

SEQ ID NO: 6298 - protein, 1085 aa, synthetic construct
  REGION 1..1085: note = Synthetic
MAYRMGIDLGTASIGLVCLQLDGKNQPESLPYHCAHIFQEPVEPAKGGGVGATKASTRGSARRTRRLVDRRARRLRDLAEIFRLLQVEPETISPDNGIKLHDARSQAATEPIELPDLARIFFRMSKRRGYSGGFQVKKEGEEGQVQGGINHLKELMTEAKCEWLGQYLLHRFNNGETLKLKEAGLYADRGIVESEFDQIWRTQAKAHNILNKLHNGIPLKQLFHKTLFYQRPLKSVTAMVGNCSLEPNLPRAPLCQPAAQGFRIEKQIADLRWGMGRRSQPLSLDQRTVIRELLNQKDKATFLQIYTALDKAGYPKPEHRALNFDRPSRPELKGNVTLKAMNKLGLSEDWLQCSEGTQISILNFLADIGSPQEVDRPNWHLQYKGKNGKQRIFSEKMITFINQMVHSSKFDRLTKMGFDGGRSAYSIKALKALSKEMREGLDEYDAIEKLYPQSDEKPDLQPHLAIHKPTGNIVVDVALRQLRYAVNQAIDAMGGEAPIETIIELSRDMGLGLKRRGEIEKGIDKNRRERKKAKDDLEANDHTATSTNIFRWRLWQEQDTNCPYCERKMGLGDAANGNITNLEHIVPKSLTRVGRQQDHIMLAHRKCNDEKGDRTPWQAWGHDRDKWKIITERAKALEKKRRFAKARLLTVQDWKAEVINSDIIEDFTNRQYHETSWISKLAAQWMQTVCADVSVSRGRMTAHLRRIWGLNTVIPEVRFETGMPVFDNDKQLISKEDFDRYKPYWEGHNNNHSGVQRTDQMIEKRIDHRHHVIDALVIALTTRSLYQKMALDYKKLAERVRSGENVRMSLAVRPALKNMRQQALEMIRYHRISHKPDRYIGGPLFKDTAYGVTWVEDENDSNAYARQQLTLRVRLAGLALTKGKLDKPETVRKKLMAIASPETRKLVLGAFDANISAGKSPDKALADIQHPQYRTPIKKVKLLSYSVDTASRIEFTSRNHSTDNPLYKYLQNSGYSFLELTQPPGEKPVPRLVTQHEALQQKEQPIPSNAIRFFRGDTVEDTKNGQRFIIKSFREQGLLVFLIPVTEAREIADMDSTMKQHKLSQKQQGRRSVSGLGIARLKLVD

SEQ ID NO: 6299 - protein, 1223 aa, synthetic construct
  REGION 1..1223: note = Synthetic
MTMKTSPSPRRYRIGIDVGLNSVGLAAIEIADDDSPISVLNMETIIHDGGVDPTANKTAGTRKAVSGVARRMRRLYRQRRHRLANLDNTIRDLGWPIVDLETMEDPWYPWVARSRLSTQRVDNQEHLHELLSVAIRHMARHRGWRNPYMSVHTLMAATGPSKHFMELVASIAKTLNLDVHDLAERTLAEIVCMVRGMPVRERVKESVNKKTGEIKRMVFVDDPRKLRGPARLGKNDGRSRVGLLTSKVHQSDLIRELRRIFEMQGLSNELLHIIITKVFQAKSPKGSAKERVARDDLDKTQYRAEKASLAFQRYRIVTILCNLRVQEQSGQRALTSHERMACLEFLWNPVDDRGQTMVDVGWADVAQRLGVTRASLKGTAGQTEDGERASARPPVNVTGACVRACGVKDLILEWDSADEAYQEALVEMLGNGSGSGANRDEVSRAEEFIADLPEDQLAKLDAISVPEGRAAYSVKTLRRLTQRMLTTEDDLHAARKAIFDVPDDWKPTPPDMGEPVGNPAVDRVLKIVQRYLLACQREWGVPLSVNVEHTRDGLMSAKQARDVDRENNARYDRNRELEADIAAYLNQNGVSVRSGDDDSFEENPDTPLTGQAIGRRKADIDRMRALSRQEGRCLYCGSVLDFLTMEMDHILPRAGAGATNTQVNLAAVCRPCNHSKGKQPFAVWALSGIRPEVSLEDALDRVDGFRFFGIDGDDRRYQARFKKEVKDRLRRSDCDEAIDNRSMESVGWMANELHHRIEAYFAKENERTDRVTTVAVFRGWITSEARRAAGIEDKIMLIGGKAGKNRLDRRHHAIDAATIAMLRQGAAQSLVTQQKAREDGFGDFDIAQILTERDSMHRAYELTTSDYMLDKDDRPRPAWTLYKGSNPELFNAWQSQMRTMADLVQERLTEDGVPVFEFLRLKVGSSSGHEDTMKSTIRARVGDEMSVAMIDRSATPQQWVALTRNPDFDRVQGLPADPARTVRVGSQWLNANDDLEFFPTGAGCVAVRGGYAELGASFHHARIYRCVKTLSSGKAKPFYAMMRVYTLDLLPFRDKGVDVFSVPLPPQCMSHRTAEPKLRDALADGCAEYVGWIVPGDELLLDMSTQTTGAVGTFLQQFPGTCSWVVQGFFAPGRLHLRPRYLAGEGAVSEAENKKVSETRVVVPPSTEKIVSGQGYLPAVNVLFSECNPRIIRRDILGRVRARSAAHLPASWGVGAVSAESSV

SEQ ID NO: 6300 - protein, 1157 aa, synthetic construct
  REGION 1..1157: note = Synthetic
MSRWRGRHMNTRSPRDYLVGIDVGLNSVGLAAIEVDDSGMPMDILSIETVVHDGGVDPTANKTAGTRKAVSGAARRMRRLVRRRKQRLLKLDETIASLGWPLVNLEEVSDPYYPWKARRDLLTARIDDPEELRKKLSVAVRHIARHRGWRNPYSSVESLKAATEPSPEFHALIEQLNKRVGADRFDTRTPVASIVCATLESDPSLRVRGTRVRKDGTSVAPLLEGKIHQSDNVRELRRIWELQDLPIDQFNTIVAAVFAQRSPKGSAAARIGKDPLPGMHSQPRAEKASLAFQRFRIVDKVANLRIRDEFNRDGRVLTEEERRAAIEFLWTSDDVTWDDVALLLGVSRRALAGTAKPTELGERGGGRPPVNVTDARIRQSRIKELVQYWDSIDEVEKEALLVVISNGSGSGDQDDRARDAEARAAEFLERLSEKALSQLDGLKLPEGRAAYSAKSMRLLSRRMEESGDDLHAARKYCFPTIDDHWKPPADPIGQPVGNPAVDRVTKIVARYLAATERMWGPPKAVNVEHTREGLVSEVQARLQARERNRNAAENAKAREDIPLEFLAAGGQTTDDALGEPSGPPRYGARQSDVYRWRAVQRQKGRCLYCGATLRWGAFEMDHIVPRSGQGATNTQTNLAAVCRECNHAKGKLPFAVWARSESAVSRGVSLEAAVARVEDYFDIAAKKDSNRRKPHTREGRIIKGARDRLRRTEADEEIDNRSIESVGWMANELHRRIEAHYRDELGVSTTVRVYRGWLTSEARKAAGIERRVTLIGDEDRNRAGKNRLDRRHHAIDAATIALLSPGIAQALAVRDNLRATAQILGPSADIDWKHYRGANPDLFETWQARMERLARLLQVKLDADAVPVFEFLRLRLGSSVGHEDTIRQLKKAKIEDAWTLERIDRSATPAQWVALMRQPDVDARAGLPADPTRRLRIHGTWFDPEDELAYFPTGAGCVAIRGGYAELGSSFHHARIYRCTQPQRAGRTRSFYAMLRVYQVDLLRHAKEDLFSIEIPPQAISRRAAEGRLREALDHGMAEYVGWLVLGDELLLDMSSQLGRGQVGEVLAAYPGTVRWVCDGFFSESKIRLRPRGLSGEGLSASAADGVRTIVAGVGWRPSVDVVFGACKARVIRRDILGRPRLSSSYGLPTCWAGDMP

SEQ ID NO: 6301 - protein, 1125 aa, synthetic construct
  REGION 1..1125: note = Synthetic
MSEKKEVLRKEFDKSKYVLGLDLGVTSVGWALLDPANNQPIDQGVYLFDQANKAEDRRAARSTRRRYNRTRYRKLRLKKLLADNGIDLSSKPNNELLELRNKGLEDKLSEQEIVDILYFFVKNRGYIPFEEGKDGVEKHKIANREENKNKYPCQIQKIILEEEGKYRSTENKFLWGDYKKEIRAILENQYKQGHKFLTEDFINKYFEIYESKRKFWEGPGSYKNVHSLSPYGRYRTKEDIEEYKKDNNYRKFLFEELLGECKIYTGEKVAPKNNVYAEYFNLLNDLFNLRVEEDRINEDAKHYFTKGTLNMEGVDLIVDSILSSGSTNYSSIFKKNFGLDLEKDVSGYKKDADGKPEIAKLETFASFIRMKNVKAKKTGEIIAEVSEETLNKFKELILENPEYYNDLVNILEIYPKGDECLDAIVNLDGFKDMFGDESYDLAKIIDGKYKKNKYHSLSEKALLTYIKLMQEECKNSSWVSKKCDKVIKPTYHKDLIDNYPKNGKVSTHLIKGLIANPQVKKSLSKAIYIINTLMEKYPNKIGTIAIESNKESMSPQDQKDWHNYCLEGNKQRQLAKKKLKDDYGIENPTRNDINRYLLLEECDFKCAFCNKPISLDSFQIEHILPLSKSADDSFNNKTCSCNDCNNKKNNRTPLEWLSQPEEFIKRVKANKKFSQEKKNNLLFSGDLSKYEKKFINRNLRDTAYVTSELKKQLMLFAEANNLEIGVMSVPPVFTSQVRTQFSINKNRDENVYHHAQDAMIVAMFPLTVVGRLSYKIQNNADMFWSTPYIDNFTNKDGRGFSVKLDGKLIKHVKDSNYDNTRIKKDNSIRKNASLSNANLNTYIEKDGKYNQIRFINNIYECENKNIEDILIKKPQDLLMYKQDKETIDYLISIYEEYKDKKIVYTDKDGKEATKAINPFKHYCLEKHSIEEKDFKPNMHGIRMQRKGNKQQPVIVKLKYVVKDVSTPWIINKCDDIKQNKHVGYDSVKQKYIEVYKGKDVKGKEKYFFLPISFNMFKTNKEGKQVLDRESSYYKAMFDTYIIGKNADVSSLVKQFDLSSNDIIKCETKDGVLFGLVNYFHKSKNGIILKDLHNKGLNKYFTQNSKNAIKIGYGKLGKYGLNFINI

SEQ ID NO: 6302 - protein, 1164 aa, synthetic construct
  REGION 1..1164: note = Synthetic
LRTRPPCSSHRQLNGFIPANLCHANSTAKVVASLLGLARWWVTPGVRQRQGSSNPFYKKNGHPTGRRPGIPAGITLRRRSVHLLEKADNRRLTTPKVYTGRAGNRVKEAIVIVSTEPGSPSPEYILGIDLGTNSVGWAAIGLDSTRKPVGILDAGVRIFAAGTNGDIASGRDESRNLKRRDQRQLRRQTWRQARRRTTVFRILQRAGLLPLGESVHEVITALDQDLISRLEQQGVMDRTGLSSKLPYVLRARALDYTLTAHELGRALYHLAERRGFQSNRKASPKRDEEEGKVKQAISELNKTMVEEGARTLGEHFARLNPHQDRIRRQWTSRTMYEAEFEAIWAAQAACNPSVLTKTLHDKLRKAIFFQRPLKSQSGLVGTCELEPGRRRAPKALLEAQRFRILQTVNNMAILNKSTIEERRLFAAERQDLFGELDRFGDCTFAQARKRLHLGKEWTFNFEATKKDTIGGNTTSAQLRKVFGDRWDQLSEDDKHLIVDDVRSMVNDKALCARGQSAWKLDEASAQRLAKTHLEAGYLNLSRQAISKVMPYMEEGLTFPEARKRAYPDADSSGEPHNELPQLTSAPIPAVASVRNPVVARSLTELRRVVNAVTQARGKPTTVRVELARDLKRSRNDREKITKQNTERERTRRDAAAKARDAGVEDPTRADEEKWLLGEECGWICPYTGRSISARDLFGGAIDVEHIIPYAQSFDDSFANKTLCWRDENDRKGRRSPHTAYAHTPQWEEILDRVRRFPGLPGYRKWQRFQWDDAEITERFSNFSDRQLNDTRYASRLAADYLGLLYGGQIDAGRTRRVQVGAGQVTARLRDAWNLNGILHDGGVKTRDDHRHHAVDAVVIALSAPATIQALSRAAATATRRLGGGISIDLTPPWPALKDDVQAAVERIVPSHRVSRRVRGPLHAETLYGKAVACQATTGSYETVRHVRKSVTAPLTCGEVERIVDPAVRHAVQAKIEAVGGDPRKLTDNDPPTLATLDGRFIPIRRVRISDPAHSVVTIGVGSAERFVKPGGNHHVEIFKTIDSKGDPKWCGRVVTLLEATRRRSRKEPIVSRRWDGDSNAQFLFSLVKGDTIRNEKGVFMVRKFSGLTAGAGVQFGLVGISDARGDTDVKAANALWRPHLGPLLATGCEKIDVDPLGRIRRAND

SEQ ID NO: 6303 - protein, 1070 aa, synthetic construct
  REGION 1..1070: note = Synthetic
VYRLGLDIGTTSVGAAILNIDHYGEPNRIIDMHVRTFEAAENPNDGSSLAAPRREARGARRRNRRHKHRLDRIKALIQSEGIYTKEKLDSLYHAKGNILMDIYQIRYESLERKLNNEELTRLLIHFAQRRGFKSNRKNEKKGSDEGKLLAATADNEKYLKEKGYRTVGEMLWKDERFAENKRNKGGDYSNTFLRSQLREEIGIIFEKQKAFGSLYVTDAFSEKYLEILFSQRAFEEGPGEESPYAGNQIEKMVGKCTFEKEEKRASKATYTFELFNLWQKINSIGILQDGVKRRLTDDERNKLFALCHKTEKIDYKRIRKELELGQDALFSNLTYGQKEVEEVEAAKFQYLPVYHEMRKAFDKISKNHVLQISNTQRDLIGTAITYYKTDDKIQQALLEGKFSKEEINAILGMKNFSKFGSLSVKAMQKVIPYLEKGLTYDKACEQAGYDFRAHNVAEKKKYLPKLPQNTYDITSPVVKRAINQTIKVVNEIIKRHGSPAAVNIELAREMSKSFKDRKRIEKEQNDNAAQNQRIYDEIKDTFHVAQPSGQDIVKYKLWQEQDCKCVYTGQPIKAENLFVPGYYEVDHIIPYSISFDDSYTNKVLVLTKANRDKGNRIPMQYVADKEEYEIRVNTLIKNRAKREKLLKPILTEEDMGEMKQRSLQDTQFITRFMMNYIRDYLLFDEAYDRKQRVTAVNGRVTAYMRKRWGINKVREDGDLHHSVDAVVVACITPGIVQTVTEYAKREENRYLNKDDVAMRERFPMPWPEFSTELDIRTCKEPKEMLRKVSLANYQDVDIDSIKPIFVSRMTKKKVTGQAHKETIRAYREVDGKMRTVTKTSIQELKLDKDGEIEGYYNPSSDILLYELLRSRLKEAGGNGKKAFPEGFVYKPTPNGGVAPKVKKVKICAVSNLNIPVNHGVAANGDMVRIDLYYVEGEGYYFIPIYISDLMKEELPKKACVSNKEYHDWKNMKDEDFLYSIYPNDLLHIKSSTPKKFTKNIQKGKENDSFEAEEAFVYYIKAGIGTGSITVVTHDNNYTIKSLGIKTLNCIEKYHVDVLGNKYKAAVEERK

SEQ ID NO: 6304 - protein, 1232 aa, synthetic construct
  REGION 1..1232: note = Synthetic
MLTYGFDLGTNSIGWVVIDQSKKEKILGAGVNIFPEGVNRDTKGAEISKNEKRRLKRQTRRQFFRKKLRKAKLVELLVRHQMFPDVEALYETTFDKPVPKFKVALFELLNLETLPEPLLDFFYNNGQNNPYLLRDKAVKGEQLSKLQLGRVFYHFAVRRGYKDSLQAPLEDGKTLRKGDPKIGKTGIDETQKLIDRPEHKSFGSAMYSIDPENPNNKNKAVEHRIRNRYTLRNWFVEEFDAIWEKQKAFYPNLLNEHLKNDKEYHLKDIIFFQRPLRNQKFLLGSCIFEKQKPKCRKSALHFEEFRMHQTINNIKIKDKKLNEEQRLILKDMFYTKKDFKTEDILEKLKIDKEDINLAEKQAVKGNETHIGFAKLFKKDVWKKMSDTDKEHAWHIKINADDKAKTIKYINKKTKWNFNEKQFKQFFDLRLNKDFASVSTKAINHILPFLKKGYLYNDAVLLGGFVNALGKEEWNSWDNELRKATEKEIVELIKNPTGETIKKKLQEFCLERFNFTNKQLNKLYHHSDLELTKTTGSLPKDDELINKVRNPLVANALFQLRRLTNALVKEFGKPFEIRVEMARELKASLNQRDEIRFGQLKNEELNNKAKATLDEYNLPHTPKNIRKVLLFEEIYKQNGQAINPFSLGEGSTESFGVNDIFHKMQIEHIIPYSRSLNNSMGNLTLCDPDRNRNKGDKTPYEYAMAVGKDWETIKNQIFKVLPYKKAKRFISEENIVDESFISRQLNDTRYIAKFAKEYLKHICTKVNITQGGATAYLRDIWGLNSILNKTFVLKSIYNDGDEYFAALNEANELIESSLIEWQYSENDKENKKIQKQLLKQGKVVQGVIRKGKFIPKKIRDDHRHHAVDAIAVACTEKKFLQEISYMHGQYERGDQAKKAISNFPEPWLGFYQDARKAIDNILIYYRVNNKVLSKTRKKVFDKKTAKHKENKDGSKRYGQGITARGQLHEETIYGKRKAPFEQSHGFHIRKNLADLTSAMLDKIVDPIVRHQVYEFAANHPNAEWDAKGKLNIKKVEFFKFDETENISKPLVFMPQKTDKKTGELKPKRPIKKVRIRQESSNAIKLKNINQWVEPGNNYAVVLYDNEDGKRYGKVITFWEAVEAMRNGLDPINQNVNGEYLMHLKKGDMVLMDYESLDFDGLPDNLKLSKSLYYLRKFSSSGGQIKLIFVKHNYSNVEVDRAKFPIVIRKVPNTLKCIKVEISLTGKLVRPKVL

SEQ ID NO: 6305 - protein, 1084 aa, synthetic construct
  REGION 1..1084: note = Synthetic
MVASKNPARLELSFDIGHSSIGWAVLSIPTATPLPDILGCGVVTFEKDGALANQRRLHRSQRRHVRATRLRIARMEKLLAHLGVLTAEQLAAKHQASGGHPVPWLLAARVLASDGAQLLSWPELWDVLRWYAHNRGYEEIGSEASADDAPADDEKAKDAEKVANAKAAMSRLGKSTMAETICAWLGLDPLGERRPTHENYKAKNSAFERPVVIAEVRRILAAHRGKLPALDDAVITALLDDARVLSIPTIRFPKRYQGGLLFGRLATRYHNRIIGRCPISGEKIPSKNCPEFLRYRWGMQLANIRVGTDAKGDLRPLSIEERKTLHAAMTSAGHLSVKALKETVRSLPGVVRDNLENLLLHPDAKEAFIFDPAQKLITSHPHLSAIWPHLPERIQKRAKGRWRHGKSMTLAVLRSEAAALGHDLTAFDAALSALLSPDAKKPKGKKAATLTREGILSAPLDIRRDLSRLSGRAPYARPLLSKAFDEVMAGNDPKAKGGCLEETDEVRRRRETRPIPEQTNNHLVRHRLLILGRLLRDLIADKSYAAGDPARINRVTIEVNRDLREMSGLSAQDIAKELGARLSNHKKVSARLEKDLPEGTPITAGLIRKARIADDLGWRCPYTGVDFEPVDLIEKRVDKDHIIPRSQRPTDSLDALVITFNTINRWKGKRTAWQFIEDEGGKPVPGAPHLSIMPMNRFKEFVEKLDARNGHEEDRRRKKRRKEFLLLEKYEEKSGGFTPGQLTQTSQLARLAAQVVREPFTGIKEPPTIVALPGSVTGTVRRSWDLLGCLSAATPAVLDSDGSVKTKTEIREITHLHHALDACVIGLAAHFIPNRGDVWRLLSERRLRPEQQAQLVEALPTKLLDFDAQGGFRLRDLPDELKQQIRARLTERRVVQHISRDMNGLRVEENTRGVIRRENGRVFLRQQKRDADGKRIINETNEPEGKVIGLPPLGHTGGKLAKLNGVRVIADNFGVAILDDEKLPPEDRFVIIPFAHVWKRVAELKTRNGGKRPQIWRNGQIIELKKGKRAGLWRIFSIKNNTSGMALDLGPIDAVKPIWINCLLKSLLRDGARRLNTTFSGADI

SEQ ID NO: 6306 - protein, 1086 aa, synthetic construct
  REGION 1..1086: note = Synthetic
MSASAKPPRVEVAFDIGHSSIGWAVLGTNESAPPGVLGCGTVIFEKDSALANTRRLHRSQRRHVRATRQRIARMEKLLVHLGIFTATELAAKHRANGGSAAPWLLAARVLASDGAQTLSWPELWDVLRWYAHNRGYEEITGELRDKAEESDEKKQDTEKVENAKAALAQFGKNSMAETICAWLGQDPLGPRTGTAENYKAKNCAFERALVDAEVTRLLASHLGKLPGVTEAFVAAVILDARAIAVPTIRLPRRYQGSLLFGRLATRYHNRIIGRCPISGEKIPSKNCPEFLRYRWAMQLANLRVADSAEAPLRALTANERVKIHALMVAAGSLGVRELKEAVRALPGHVRDNLEQFFLHPDAKEGLVLDPIQKLIAGSSTAAAVWPHLPEHLQKRTRGRWRRGKSTTLAKLREAAIQLGHDCAAFDAAVDALCAPPKKPSKKTPPPVKENLLLDPLDARRELAKLSGRAPYARPLLGQAFDEVMAGRDPKATGGCLEETEDVRRRREIRPLAQQTNNHLVRHRLQILGRLLNNLVADPAYGAGEPARIARITLEVNRDLREMAGLTAQDIAKELGQRLKQHGDAVQWLEQDPQVAPKISAGLIRKARVALDLGQRCPYTGESLNPIDLVTRRVDLDHIIPRSQRASDSLDSLALTFSAVNKWKGKRTAWQFIQDEGGKPVPDAPNLSIMTPARFKAHIESLNTKGHLDDYRRKKRRKEFFLLERYEEKARTFTPGQLTQTSQLARLAAQVVREPFARLPDPPQLVALPGSVTGTVRKAWDILGCLSTAAPGVLETVKLTDGTETQEVRTKTEIRDITHLHHALDACALGLAAHFIPNRGDVWRLLSERRLDSAQRAELAALNLFDFDERGHFRLRDLAPELKEQIRQRLAERRVVQHVPADMSGLRVEENTRGILRRENGRVFLQQRKKNADGQVVVNLTEESEGKVVGLPRADGSGGKLAALKGVRVIDGNFGVAILDAPDVPDGERVSVVRFFRVWRKLRELRTRNGGIRPRLLRNGLLIHVPRGSRAGTWRILSTKETQAFGIAVDLGAPDGMRLIKGNAPVATLVRDGLEILKSRLTGNTPR

SEQ ID NO: 6307 - protein, 1095 aa, synthetic construct
  REGION 1..1095: note = Synthetic
MSLTLAFDLGHSSIGWAVLRQEPTVMPELLGCGTVLFEKNSALAIERRRNRSQRRHVRATRRRIQRIEKLLEQRGALTSAAIAAAHQPGAGDAAPWLLAARVLASDGVRVLSWPELWHVLRWYAHNRGYESMGRAADDPDADENHEKVQNARDAMGELGAGSMAETICRHLGQDPLGPHRIADAHVKNYLQANFAFPREVVLSEVERILHAHRGHLPGLDEGFIRALLHDARALRIPGVCLAKRYQRGLLFGRLAMRYDNRIIGRCAFQQLALEKIFIAEGMTAEAARAKAEKLSKLPAKRSPEFLRYRWAMMLVRIQVAPSIDARVPLRPLSLEQRQALHQEMSARGRFTKGAFKQAVRALPGVARDNLDQVLVHPDAEKELVLDPVQALVTQERSSLAAIWPTLPSMLQSRLRNRWWRPAANECGVSLVEIREQLVALGGNPTDFDAAFERVITRPRMKRFKGAAVSREEILGEKHRANLSGLTGRAPYARPLLQRAFEIVVNEGADPKAKGQILEETPDVRKLRDSRPLDRQTNNHLVRHRLLIFGRLIRDLVAHPDYANGEASRVETVVLEVARELREWAGKNVKEIDAELRERTKDHTAVVKLLEARLPTGTSRLEVARLIRKARVAQDLKWTCPYTGESFEPQDLLDRRVDLDHVIPRSQRPSDGLDSLVLTFAEVNKWKGSRTALAFIQECGGQSVPALGRLSIMTPQRYREFVESLDTKGHRDDQNRKRRRREFLLLERYEDEQREFLPGQLTQTSQLNKLGRLVVQRELPHVRDADIVFMRGQVTAAVRRAWRVTGCLAAANVDVLDPKTGDPLPKAEIREITHLHHALDACVLAFAGTLLPDRNDLWLAMRERRMTPEQQRSARANGLFEFNGEGSWRLVDLPNDLKDQIRRRLAERRVVQHVPADMGGLRVEANTRRVLQIDEGRALLQQRAARNGDGSRPPPKQTKEAVVKLFGVSDGKLAALKGVRVITDNFGVAVLEEPGGPRRDRFVIIPHHRVWKRLPELRRLNGGKPPQIIRNGQMIALKRGAPARLGHWRVFSIKNNARGLALDLGRPDAVSASWNNVLLASLLRDGASLVQGNLAG

SEQ ID NO: 6308 - protein, 1104 aa, synthetic construct
  REGION 1..1104: note = Synthetic
MNMETNPTPEASPNPAKPRLSFAFDVGHSSIGWSVLTAPESGAPDILGCGVVLFEKDSALANQRRLHRQQRRHVRATRQRIRRIEQLLAHIGAIPEKEIAARHIAAGGHPTPWLLAARVLASGGAKTLTWPELWDVLRWYAHNRGYEPIGEDLDAKENEEKREQAKVGMAQYGKSTMAETICAWLGQDPLSPRAGTTVSYKSQKAAFERSVVRDEVRRLLTAHLGKLHGLNAQFITALLDDARAIAMPDLRLTKRYIGGLLFGRLAMRYDNRIIGICPFYAYELEQKHIAAGQPAAEASRLAEKEAKLPSKDCPEFFRFRWAMLLANIVVAAPSDSGLRPLNTTEREKLTAQAQAEGYFTPAAFRKTVHTLTGAVRDNLDQMFMDATAEKNLVFDPGLKLVNSKDWISPLWPHLPERVRLHALNRWRRGRSQTLGALRTEAQQAGYDLAPFEAALAALCVPKKPGRTTKKENQPPTPGQILEAKYSVDLLGGRAPHARPILVRATNEVMAGRHPREEGGCLYETPDLRGARERRTLDQQTNNHLVRHRLLILGRLVAQLVADPAYGAGEPARVARLTLEVNRDLREMAGLTAQDIAKEMNERLRSHGKVSQRLLDDLPPEHHSRINASLIRKARIADDLGWHCPYTGQEFEPIDLITKRVDLDHIIPRSQRTSDSLDSLVVTFSEINKWKGARTAWQFMKEFEARPVPGLPQYSLKQLKRYEADVKALDTRGHPDDQKRKKRRIEKLLLEKFDEKAGGFTPGQLTQTSHLSRLGQQVLRAPFAQLEDGPSFVALPGQVTGQVRAAWKVLACLDKAAPDVMEKTLDAEGREHLEPRTKTEIRDITHLHHALDACVLGLAASRFPNNGEVWRALLERRPNPAQRALLESLDLGDFDASGGFRLRDLPESLKQQLRTRLAERRVVQHVPADMSGIRVKQNVRGILDASDPEFLILKPGIGDDGTKQKKPEKVLRSKVIGLQPGKLSQLKGVRLFDGNFGVAILDDDKLPPTERFVILPFARVWQRLQALELRNGGKRPKVWRNGQIIALPKGAHVGRWRIYSVMNTADGLVLKLGRVDGLDWEWKLALHSLLRDGAERFSTKLDGNL

SEQ ID NO: 6309 - protein, 1067 aa, synthetic construct
  REGION 1..1067: note = Synthetic
MPLLNFAFDVGHSSIGWAVLSAAQNSAPSVLGCGSVIFEKDSALAKSRRLHRQQRRHVRATRQRIARLERLLVHLGAFSAEELARKHSANGGSPTPWLLAARVLASNGEHALTWSELWDVLRWYAHNRGYEAIGADEDEAENKEKRAHAREAMERFGKNTMAETICAWLGQDPLAPRSGTTESYKAKDAAFDRAVVVDEVRQVLAHHTGKLPGVDDAFVRALLEDAHAIVCPDIRLPRRYRGGLLFGRLATRYHNRIIGRCPISGEKLPLKDCPEFLRFRWAMLLANINVASASDQSLRPLSKEERSALTQQATTKGYFTPGEFRKTVRALTGSVRDNLDQMFMDATAAENLVLDPALRLVSTNRWIAAVWPHLPEIVQRHALNRWRRGRSQTLGKLRDEAIRRGADISAFDAAVAQLCSVPEKRSGKKTPTPPPTAAQILTTSFTVPPLGGRAAYARPLLLSTYQQVMSGTVHPRSEGGCLFETPELRRARDNRPLDQQTNNHLVRHRLQILGRLLQHLIADYAGGDASRVQRITLEVNRDLRAMAGLTAQEIAKEMNERLRNHAQVSKRLLAELPQGTKINASLIRKARIADDLGWRCPYTGHDFEPIDLITRRVDLDHIIPRSQRPSDSLDSLVVTFSEINKWKGKRTAWEFVRAEETKTVPGLPNLQIKQLSRYKQDVEALDKRGHLDDQRRKKRRVEKLLLERYEEKAGGFTPGQLTQTSQLTRLGQQVLRAPFAHLPSPPTFVALPGPVTARIRAAWDVLGCLAEAAPAVLEKSVDTEGNERIVVKNKTEIRQITHLHHALDACVLGLAAALIPNQGDVWRLLLERRLNTEQRGALEKLDLGDFDANGGFRLRDLPGDLKQQIRDRLAERRVVQHVPADMSGIRVEENTRGVISRENGRVTLRQRKKNADGKIVTNCTTELETKVIGLNPDGKLSKVRGVRVIADNFGVAILDNPEIPPAERLVIIPFARVWAQLGALKQRNGGKPPLIWRNGQVLKIPAGPRAGLWRIFSIKNNASGMALDLGTVETVRPSWINVLLKSLLRDGALRLNTDLTGRAFPQD

SEQ ID NO: 6310 - protein, 1083 aa, synthetic construct
  REGION 1..1083: note = Synthetic
MQNDTAQTSSASRNSAPLSFAFDVGHSSIGWSVLTAPASGMPDILSCGVVLFEKDSALAIQRRQHRQQRRHIRATRQRIARMERLLSSLGVFSAEELKSKHIANGGSPTPWLLAARVLASNGQQTLNWPELWDVLRWYAHNRGYEPIGADEDEEENKEKRAHAREGMERFGKQTMAETICAWLGQDPLAPRSGTTESYKAKDAAFDRHVVREEVRRLLTSHIGKLPCIDEDFIRALLDDAQPKPCAGIRLPRRYTGGLLFGRLATRYHNRIIGRCPISGAKLPVKDCPEYYRFRWALLLANITVATAADSPLRELTATERAELTKIAERDGYFTPAEFRKTVRTLTGAVRDNLDQMFMDATAAENLVLDPALKLATTNSWIGPLWLHLPENTRRHALNHWRRGRTQTLADLRSKAASSGADLTGFDSALAQLCTAPARKSRKKEPVPPPTADEILSTRFAAPLIGGRAPYARPLLIQAYQQSMQGRHPRAEDGCLFETPEQRRSRDQRTIDQQTNNHLVRHRLQILGRLVAQLIADPAYANGDAARVERITLEVNRDLREMAGLTAQDIAKEMNERLRSHAQVSKRLLAELPPGTRINASLIRKARIADDLNWQCPYTGHDFEPVDLVTRRVDLDHIIPRSLRPSDSLDSLVVTFSEINKWKGNRTAWQFVADEETKAVPGLPHLHIKQLRRYEEDVRAFDKRGHIDDQRRKKRRIEKLLLARYEEKGGGFTPGQLTQTSQLARLGQQVLRAPFTHLAQPPVFVALPGPVTARVRAAWDALGCLAEAAPGVLEKTKDADGREHFVVKTKTEIRNITHLHHALDACVLGLASALIPNRGDVWRLLLERKLKPDQRADLEALNLGDFDANGGFRLRDLPHSLKQQIRTRLAERRVVQHVPADMSGLRVEENTRGVLKRENGRVFLRQRKKNTNGEFVVNRTDELESKVVGLNPEGKLAKIKGVRVVTDNFGVAILDDEKLPPAERFVVIPFARVWEQLETLKARNGGRSPQVWRNGQVIKLPKGPRAGHWRIFSIKNTSNMGLVLDLGTVEAIRPTWINVLLKTLLRNGASRAITTLAGSEARNA

SEQ ID NO: 6311 - protein, 1120 aa, synthetic construct
  REGION 1..1120: note = Synthetic
MSTKASPEIQASAKPTVQALAFAFDVGHSSIGWSVLTAPPTGLPDILGCGTVLFEKDSALANQRRLHRQQRRHVRATRQRIRRLEQLLAHLGAIPEKEIAARHIAAGGHPTPWLLAARVLASNGAKTLTWPELWDVLRWYAHNRGYEPIGQDDDEEENKEKRQKASEAQKQFGTSTMAETICAWLRQDPLAARAGTTVSYKGQNAAFDRSVVREEVRRILASHVGRLTGVDAAFITAIVDDARAIKIPGLKLPNRFDNPIYTPRTGGLLFGRLGMRYDNRIIGLCPIYAHELEQRHLAAGKSPDSARKLAEKEAKLPSKDCPEFYRFRWAMLLANISVASPVDSALRRLTVAERRQLTELAAREGYFTPGEFRKTVRTLTGAVRNNLDQMFMDATAEKNLVFDPALKLVNSKSWIATLWSHLPQQVRLHALNRWRRGRTQTLGTLRTEAQQIGHDLAPFDAALVALCVLKKPGRATKKETPPPTPDQILETPYSVELLGGRAPHARPILVRATAEAMTGRHPREEGGCLFETPDLSRSRERRTLDQQTNNHLIRHRLLILGRLIAQLVADPAYGAGKPDRIVRITLEVNRDLRDMASLTVQDIAKEMNERLRSHGRVSKRLAEELPPEYQSRINASLIRKARIADDLGWRCPYTGQEFEPIDLVTKRVDLDHIIPRSQRTSDSLDSLVVTFSEINKWKGARTAWQFMQEFESQPVPGLPQYSLKQLKRYVADVKTLDTRGHPDDIRRKKRRIEKLLLEHYEEKAGGFTPGQLTQTSQLSRLGQQVLRKPFEKLEDGPAFVALPGQVTGRIRTAWQVLACLDQAAPAIMEKTVDANGREHLEPRTKTEIREITHLHHALDACVLGLAAASVPNNGEVWRALLERRPNPAQRALLEPLDLGEFDASGRFILRDLPESLKQQLRTRLAERRVVQHVPADMSGIRVEENTRGIVKREDGRVWLRQRKANAKGEIVLNRGDEPENKLLGLRQPGDRAGKLAAQKGVRVITDNFGVAILDDEKLPPSERFVILPFARVWQQLQALTQRNGGKRPKVWRNGQIITLPTGTRAGQWRIYSIKNNTSGMALDLGSVEGTKATWINVLLKSLLRDGAVLRNSNRLTGFPG

SEQ ID NO: 6312 - protein, 1102 aa, synthetic construct
  REGION 1..1102: note = Synthetic
MKRNLKYSIRRSMNKKDNSVNYRLGLDLGTNSIGWAMLCLDDENNPNKVLKAGVRIFSDGRNAKTSVSNAVTRRQARGARRRRDRYLRRRAKLMNRLIKFGLMPPNKSDRKKLEQEDPYKLRAQAIIEQLSSYELGRVLFHLNQRRGFKSNRKENTKETKSDLKEGIKRLEAHLKENQTTLGAFLYAKNTKKRNKTKGIRFKPHLLKDEDYGYPSRAMYADEFDAIRKKQADCHQLTPEQWDDLREIIFHQRPLKPGVVGKCQYEPDEKRAAKALPIIQRFRIVQEVANIRIHVDTGETISLSQQQRKDAVDFLLAKKNVEFSSKTLLKKLQLGSNVAINLETEVRKTLKGDVTGVLLSGTKDNEVFGKSWFKKTIEEQNTIVELLLDEHDDLDDDGLVRKAQEEWGLTLEQAEIMVSLSLPQGYGHVSQKAALKLTAYMEEHHCDLTEAVKEKYPDFYNNDDIMCHDTLGYYGKVVPRSTTGGVDDPKPEDDDSKRYGKISNPTVHIGLGQLRRVVNALIAQHGKPSQVVIELARDLKWNQEQKSNYEKKQKTNTKNNEKYNEQIQASGKNPSYHWRNKLRLYAELEPLKHCCPYCDKTISQAMVLSEETDVDHILPVSKSLDESMANKILCHIKCNREKGNRTPHEAFGWLAKSASLPKNKQWRFKKEDVINAKLELDPKLGFAARQLNDTSYFSRVSADYLKTIIKDPLKNVWVTPGQLTGRLRRQWGFNELLNEQANEKDRTDHRHHALDAIVIALTDRRTLQRYSRASATTKKIHHDGTPKITLDAPWDDFRDQIEPVMDAIVVSHRPERVRPGKHSRIKQDTTSGQLHNETAYGMAEKIKEDGSNVDYTKPVMGVYTKPVNKDIINTILVKNSGKQNIRDSKLKDAMKRHWEFVEAQKEPSTQDGSGKKESKEKTFIDSIAKPHALKKYGFKGARSGVRSVKIEEKLTVIEGSKNKEGKVEQWFKPHGNAFMDIYKLPDNRNKKKHKKKYASVTVTLRDANRKDFLKHYNQLKPHPAAKKIMRLYINDYILLNGSDLYRVQKLSGNSIGYTRPNEANTEAGKRIAASVLMEKHNMRHVYIDALGRIYERGHPIMID

SEQ ID NO: 6313 - protein, 1163 aa, synthetic construct
  REGION 1..1163: note = Synthetic
MITHFDSQIKYRIGIDVGESGIGKAAIQVDDDGNPIAILNATVTIIDGGKDPSSGKTPQSRLAVSGLARRTRRLLRHRRKRILALQKLLDELGIIDMRPALSPYINPWQARHDLYLKDETDYIQRQAKLRIAIEHIARHRGWRNPWWSLERLRASAAEGPTAAFVATQERASETLNVAVEDLPSLGAIGALTPPEVPLRPRTGKKALAQTKKFRIFAEKILQEDQLRELEAILVQQGVPEKDRQRIVAAVFHTEKPTVPKERVGKDPFDGLPRVPRTSLEFQEFRIRSTIANLTDRTRGKDARLTKAQRDVIIDKLLAWEDEVSPTWEELASWIDRESSQVTFPISDDPHLSSPPVDKTAAVLARNRKKLPSLSVLWEKLWTDAQRSEFAVYLGETTAFDEDSLIAEDLTELPEGERELLDQIDAFDKSRASYGIETLRRLNDHMRTSETGSLTEALKEVFKKDPGWKPAPESLFDHVDHPVVDRVLTDVGRWLKTIVDRYGLPQQVNVEHVRSAFLGPEAKAEYNREISSNRIRNERARQELHVANVEHTRRSDLRRYEAVQMQNQQCLYCGITLNVEQPDKVFNFSQVEMDHIVPRAGGGSNRRENLVAVCKPCNSRKSNEIFSVWATREEQERRPGVSVAEALQRVRDWQKPNGMTYARFRQLQNSVRLRLRRTTEDAPLDERAMASTAYSARVVTERIDGFLRQHLKDIRRTDPSILTTIDTSTGEVTPLPMHNWVQVYQGRITAEARKSSGVEGKLSLRAAQHKTRFDRRHHAVDAAVISLMGVKPARVLAQRSEQRDSARLASSTGPETKEWKTVGNTDDAFIRWRQAMHQLAEFVKQAIADDEIVVMRPLRLGPNVGALHSPNPEPLVSKPVSEPFTSQEVLRIVDRDLYETAERFQGDIDGMAALPDRPHTGTILDVPDASIKLFQSASSGLSPKLALRDGAAEIGSSQHHVRVYAFRDKKGKIIYAQLRVFAGEFARIGFLKSGVDLFTAPLPSWSQAMRCAPSKLRESIKDGTAHQIGWLVRGDELEFPDAAEVMSIGEVSGITCGVTRERRWIVTGFETNVILNLKPAYLAEEGLPPVSSAHSSEVSAETRKAIQRGWRASLNKVLQMNPTIIRRTASGSPRWRDAHDGLPVSWNVLQSTAKVFGDGTVASS

SEQ ID NO: 6314 - protein, 1019 aa, synthetic construct
  REGION 1..1019: note = Synthetic
MSTSLGLDIGANSIGWALVQIDGDTERSVIAAGVRVFPEGVDRDTKGLEQSKNEQRRVARGVRRILDRRRRRRRKLVAILQSEGLFPTTADHLTQLWKSDPYKLRTKALKEPLPPLELGRVLFHLNQRRGFKSNRKTGRVKEDGKVHKGATDLQTAITQAGAHTLGEYLHRAHTNGVRIRGQYTLRRMYEEEFDALWTAQQPHHREILTDELKKRLREETIFFQRPLKPADHLIGKCPCEPAERRCPRADWHAQQFRVLKEVNNLTIRSPDGGEQNLTSDQRKKLVQTLGTKKDMTFDQMRTLLDLLEHQTFNLEEGPRGGRGDAKTKRAKLKGNTIEAAIVKAFGSRWPDLPDPAKETIRAAVVETEEADALRVLAVQEWGLAAKQVDALLAVDLPDGYAAYSLKAIQNMLPYLEQGMKEYEARERAGYTVDALAPAADFLPLPERDGKPLVNNPIVRRALYEVRKVVNAVIREYGKPDRMIVEMVRDMTRPAKDREAAVRRIKHNESEREQARTVLEADFHVPNPKGPDIFVYRLWKQQKESCPYTGRQISPDHLRLFFAGEGILEIDHILPYSRSLDDSQSNKCLCFAEANREKKDRTPREWREGTPEYEQMLQRVASLKETGMLWGKRRKFSQQEVELDKFIARQLNDTAYIAREARTYLETLYAGDRYERDQRVRTTRGQVTGDLRHHWGLNSVLDKDGSLQKNRQDHRHHAIDAVVTALTTHKRLNTLSRTDRALGTARQTLPDPWPGFRDEVNRIIQGINVSHRVARKVAGALHEGTNYGPTEKPNEFVYRVPVNELTGAMVEKIRDPIIRAIIEQRARERCCDPPTLGSKKFPAAVFPDTDPPKMPSGVPIRHVRILTTLGDGSFVKLDNPDGHKGYRAVKLGSNHHIEIIETTDKKGRSQRLGKVVSTFEAAQRIRRRQPIIQRDHGPDSKFIMSLSINEMFLLQLQDGSEVLHRVQKLSEGGIVLRPHNYAGKVSGYDRPPQIQRRTENTLRGRKVAVDPLGRIQDAND

SEQ ID NO: 6315 - protein, 1208 aa, synthetic construct
  REGION 1..1208: note = Synthetic
MSKRVLGLDLGCSSIGWALLKVPDSDDEEGEVTALGVRVFPDAAENEKGRVRTRNTQRRMARLARRTRWRRRLRKKHVKSLLREAGLWPAEGSPALKAILETNPIQLRAEALDRKLEPYELGRVLYHLCQRRGFKSNAKGGIEKGQAETAGKKTGTGKHEDDDPKKLEAKMAQLEGEMGDRTLGQFLYAVSKNYDHAKGLEKEKTRGFWRAKREMYRQEFERIWAAQKPYYQSILTEDEHGLKDKVAYEQNGIFHQRPYSLPPDHPNYGRQIGYCECIPNEKRCHKYHWAAQQFIMLKQIGDLQIRTPKDGCSRTLKNAQKMSLRDALLWRTSMPLKEAHSLLGLDKDEAFNFDFEAAKRKPRARPKQEALEQEGRKEKAAERKLQGNKFGSGVAHAIGRDRAQLLGEEELIALSDAWILAQEPDDFVGAVERVALRFGWSGSRAWSAQEARTLFGYSELRDGHLRLSLEAVKALLPYLGNGECPKAFLDEYGAREAAGYERRTWARQPRLPPPHTVVLKPQHPLAAGEPQPLYPRLVEGKPLGDSLISCSSNPVVQKSLWEVRKLVNALLEKYGRPDEIVVELARDARMMPKQREKYLSLLLEREGERIDARKKLAEWGRPSSESNIRRYRLWLEMGGCNARCPYTGDSLASPGTFLDPTLVEVDHILPISRSSLDSYDNLVLCAARANRARSDQLPSEMANHGDILQRVEKWHENKSLSDDQRRAVRARIEKFDQKTVDLAGFLSRQLNDTRYISRVVRKYLRVLYDPDSSSDDPNGTRAVRATRGGITSMLRKIWWGPKERSDHRHHAADAIMIALAPPDEGGFIRRLQTCTERRRDGLPRLDFPWLAFPQEARAKWEGIIVSHKPSRKLSGPLHKEMFFGLARRETEGRIAEARVPRAKRPAESVRVYVSKCTLTDFAKAFNKTKAKLQQAKLREIRYKRIRELFSARCKEQDGKLFADAAQFTRGSNNPLRLPANRAKLAANPSLQGTAVYSIRLLHESAGMVPLEARKMRSEERVPLSSLAGNTEAREVRYAEPGSNHHVSIFELPRRAAGRPRQYAADFVTMFRHAERVMWLAREAKKTKHQPEPHVSRTHPQHPGAHFRMSLSMNEMLRLPNSFLGLKNAADGFSIWRVRMLTKGKIHLLLHTYAGRAKQAENRVAARQISPADLMKVIDSYLDSTPGHKREMVGKVSVDPLGRVSEAND

SEQ ID NO: 6316 - protein, 1436 aa, synthetic construct
  REGION 1..1436: note = Synthetic
MPRPATWTRPPRPFAEKERRERYQGRGSAGGRCTGAARALLAFVAALLPVVLALLAGVSFWAGCCGAACGVAVSGAMSLAVSDVFSAAAAASVVSAAGVASASSVVTRGVEDTRVSCRSCAPSSASVSAGVSAMGASASWVVPLRISSNDERALRGAGASSEVWAGVEAARSAPARAASAVTSASSWLSEPCRFSRGSFDMPPLFQDRAPCVAVARGSGWGGPAEKSLRMWLASLELEMYAMKRLNLNKGRHVSGSECSLLCSRPGLSVRGSVSFETDTNVCALCHYVCMSDYSANVQHRRYRIGIDVGLKSIGFCAIEVDERGTPIKLLNSTVHLHDGGVEPGDGKDLSRKKVSGIARRTRRRRRSNEKRLADLDSYLSQQLGWQLPNLEEFDDPHEPWHVRAELLDSYVSDPAERAEMLAIAVRHIARHRGWRNSYTSVASLTRATYPSKALIKVNERVCEALGTKIVAEATQGQLASAYVADERYALQALRGTQGLFRGRQYQSDTYHELSRILELQHIDRAQIKELTEIVFRVTHPRNGARRNMRVGHDQLPGQESKWRAEIAHPAFQKFRIVAALANLRVRSGGQERKLNANELRRVTRYVLDSALKVEDVEWFDIAEQLGIERDCLTGTAKPVFEGEPALRRPPTDAVSVIVMSSKLTKLKRWWKSANDEDRADLVKFMANSTLAEGEEFENDEVDGFLASLTDDDLAKLEELALPSGRAAYSLDSLQRLTDRMLADGCDLHEARKREFGVSSSWVPKPDPIGAPVGNPAVDRVMKEVSRWLKVAVDRWGVPEAVNIEHTRSGMMSAESAKKLTSANKARRRQIEVLAERLGGQACAGGKLNQVTKIRLLALQRQKSKCLYCGAGIRFETAEMDHIVPRSGLGSTNDRNNLVAVCRECNASKGSQLFSEWAQSGSRKDKVSFDDVIERVWSWGQDPGVSPKQHKKFQAVVVARLKSKKPDQEFDARSMESVAWMAVELGKRIRGYFASASSANEGAVVPSVGLYRGRITAAARVVSGFEGCVRFTGGNGKTRLDRRHHAMDALVIALLDDRIAQLLALRDNLRFAQLVTSGADEWRRYLHSHPSENALMYDWSQHMQVAAKKFNDSLESGMVRFTMNQRLRLGSSRAHMDSVTSFEHAYLDRNGDRVPKLDKNGMRKVKEHGEFRLLSDPLPVDLIDRAETPALWAALVKDEQFDPQTGLPADPKRTITIHGRRIGPMERIRFFGATPAGKWSASLAVRGGYVSISNTIHHVRIYKIAEEPAKYAMLRVYQVDLRHAHGKDLFSFSIPASSISMRTADKVVRKFLRDSTKKPYAWLVAGDELRVNPKFYDEGKIGEFFKEEGYGDVVEWRIVGFESATQVNLRPLRISEEGFNDETPQAVKDIAGRSKSWRVTIGALLEAGGVAVIRRNVLGEERWKSKDDRLPCSKVFE

SEQ ID NO: 6317 - protein, 802 aa, synthetic construct
  REGION 1..802: note = Synthetic
LTGTAKAVFEGEPALRRPPTDAVSVIVMSSKLTKLKRWWKSATEDDRGDLVKFMANSTLGEGEDFENDEVDGFLGSLNDEDLAKLEEITFPPGRAAYSLDSLQRLTERMLADGCDLHEARKCEFGVSDSWVPKPDPIGAPVGNPAVDRVMKEVNRWLKMAVDRWGVPEVVNIEHTRSGMMSTEKARELMDSNAARQKRIEALAQELGAQACGSGKLNQVTKIRLLAVQRQGCKCLYCGDAISFETADMDHIVPRSGLGSTNDRNNLVAVCRECNESKRNQLFSERAKTGGRKDKVSVDDVIERVWSWERDPGVSPKQHKAFRAEVVARLKSKTPDQEFDARSMESVGWMAVELGKRIRGFFASEYSVDDGLVPPSVGLYRGRITAAARIVSGFEGCVRLTGGNGKTRLDRRHHAMDALVIALLDDRVAQLLALRDNLRFAQLLTSGSNEWRLYLQSHTSENALMHAWSQHMQVAAKKFNAALESGMVRFTMNQRLRLGSSRVHMDSVTSFEHAYLDRDSDRKPKVDKNGVRKVKEHGEFRLLSDPLPVDLIDRAETPALWTALVKNEKFDPKLGLPADSERTIVVHGRSVGPMDRIRFFGATPDGKWSASMAVRGGYVSISNTIHHVRIYKIADEPARYGMLRVYQVDLRRARGKDLFSFPIPACSISMRTADKDIREALLAGTAEEIGWVAVGDELRVNSAFYSENKIGKFFKEYPEAVEWRVVGFEGPTKINLRPIRISEEGFDEATPKEVRDIAGSSGSWRVAISALLGCGGVTLIRRNVLGEERWKSRSGLPCCTALE

SEQ ID NO: 6318 - protein, 1165 aa, synthetic construct
  REGION 1..1165: note = Synthetic
LRSPVSFQTDTNVCALCHDGCMSTYSANVQRRHYRIGIDVGLKSIGFCAIEVDGRGTPTKLLNSTVHLHDGGAEPGDRKEVSRKKTAGIARRARRRGLRNKRRLRELDAYLSEELGWPLPDLEEFTDQHEPWHVRAELLDSYVSDPAERKEMLAIAVRHIARHRGWRNSYTSVASLARAPYPSKALITVNQRVCEALGVTIDAEATQGQLASAYVADERYAFQALRGTQGLFRGRQYQSDTYHELTQILRFQRVESSQIDELMKRVFHVINPRDGVRRNMRVGCDQLPGQESKFRAEIAQPAFQKFRIVAALANLRIRSGRQERKLSADELRRVTQYILDSSIALEDNDWSDIAEQLGIERNSLTGTAKAVFEGEPALRRPPTDAVSVIVMSSKLTKLKRWWKSATEDDRGDLVKFMANSTLGEGEDFENDEVDGFLGSLNDEDLAKLEEITFPPGRAAYSLDSLQRLTERMLADGCDLHEARKCEFGVSDSWVPKPDPIGAPVGNPAVDRVMKEVNRWLKMAVDRWGVPEVVNIEHTRSGMMSTEKARELMDSNAARQKRIEALAQELGAQACGSGKLNQVTKIRLLAVQRQGCKCLYCGDAISFETADMDHIVPRSGLGSTNDRNNLVAVCRECNESKRNQLFSEWAKTGGRKDKVSVDDVIERVWSWERDPGVSPKQHKAFRAEVVARLKSKTPDQEFDARSMESVGWMAVELGKRIRGFFASEYSVDDGLVPPSVGLYRGRITAAARIVSGFEGCVRLTGGNGKTRLDRRHHAMDALVIALLDDRVAQLLALRDNLRFAQLLTSGSNEWRLYLQSHTSENALMHAWSQHMQVAAKKFNAALESGMVRFTMNQRLRLGSSRVHMDSVTSFEHAYLDRDSDRKPKVDKNGVRKVKEHGEFRLLSDPLPVDLIDRAETPALWTALVKNEKFDPKLGLPADSERTIVVHGRSIGPMDRIRFFGATPDGKWSASMAVRGGYVSISNTIHHVRIYKIADEPARYGMLRVYQVDLRRARGKDLFSFPIPACSISMRTADKDIREALLAGTAEEIGWVAVGDELRVNSAFYSENKIGKFFKEYPEAVEWRVVGFEGPTKINLRPIRISEEGFDEATPKEVRDIAGSSGSWRVAISALLGCGGVTLIRRNVLGEERWKSRSGLPCCTALE

SEQ ID NO: 6319 - protein, 1168 aa, synthetic construct
  REGION 1..1168: note = Synthetic
LRSPASFQTDTNVCALCHDGCMSTYSANVQRRHYRIGIDVGLKSIGFCAIEVDGRGTPTKLLNSTVHLHDGGAEPGDRKEVSRKKTAGIARRARRRGLRNKRRLRELDAYLSEELGWPLPDLEEFTDQHEPWHVRAELLDSYVSDPAERKEKLAIAVRHIARHRGWRNSYTSVASLARAPYPSKALITVNERVCEALGVTIDAEATQGQLASTYVADERYAFQALRGTQGLFRGRQYQSDTYHELTRILRFQRVESAQIDELIKRVFHVINPRDGVRRNMRVGCDQLPGQESKFRAEIAHPAFQKFRIVAVLANLRIRSGRQERKLSADELRRVTQYILDSSITLEDIDWSDIAEQLGIERNSLTGTAKAVFEGEPALRRPPTDAVSVIVMSSKLTKLKRWWKSATEDDRGDLVKFVANSTLGEGEDVENDEVDGFLGSLNDEDLAKLEEIAFPPGRAAYSLDSLQRLTERMLADGCDLHEARKREFGVSDSWAPKPDPIGAPVGNPAVDRVMKEVHRWLKMVVDRWGVPEVVNIEHTRSGMMSTEKARELMDSNAARQKRIKALAQELGAQACGSGKLNQVTKIRLLAVRRQGCKCLYCGDAISFETADMDHIVPRSGLGSTNDRNNLVAVCRECNESKRNQLFSEWAKTGGRKDKVSVDDVIERVWSWERDPGVSPKQHKAFRSEVVARLKSKTPDQEFDARSMESVGWMAVELGKRIRGYFASASSANEGAVVPSVGLYRGRITAAARIVSGFESCVRLTGGNGKTRLDRRHHAMDSLVIALLDDRIAQLLALRDNLRFAQLLTSGANEWRLYLQSHASESAVMHAWSQRMRIAAEKFNAALENGQVRFTMNRRLRLGSSRAHMDSVHSFEHAYLDRDSDRKPKVDKNGVRKVKEHGEFRFVSDPLPVDLIDRAETPALWTALVKNEKFDPKLGLPADSERTIVVHGRSIGPMDRIRFFGATSAGNWSASMVVRGGYVSISNTIHHVRIYKIADEPAKYGMLRVYEVDLQRARGKDLFSFPIPACSISMRTADKAVREFLRDSTKEPYAWLVAGDELRVNPKFYDEGKIGEFFKEEGYGDVVEWRIVGFESATQVNLRPLRISEEGFNDETPQAVKDIAGRGKSWRVTIGALLEAGGVAVIRRNVLGEERWKSKDGRLPCSRVFE

SEQ ID NO: 6320 - protein, 1166 aa, synthetic construct
  REGION 1..1166: note = Synthetic
VRGSVSFETDTNVCALCHYVCMSDYSANVQRRRYRIGIDVGLKSIGFCAIEVDERGTPIKLLNSTVHLHDGGAEPGDRKEVSRKQKAGIARRARRRGFRNERRLRELDAYLSEELGWPLPDLEEFTDQHEPWHVRAELLDSYVSDPAERKEMLAIAVRHIARHRGWRNSYTSVASLARAPYPSKALIKVNERVCEALGRNIVAEATQGQLASAYVADERYAFQALRGTQGLFRGRQYQSDTYHELTRILELQHIDLSQIKELTEIVFRVTHPRNGVRRNMRVGRDQLPGQESKWRAEIAHPMFQKFRIVAALANLRVRSGGQERKLNANELRRVTRYVLDSALKVEDVDWFDIAEQLGIERDCLTGTAKPVFEGEPALRRPPTDVVSVIVMSSKLTKLKRWWKSAYDEDRADLVKFMANSTLAEGEEFENDEIDGFLGSLTDDDLAKLEELALPSGRAAYSLDSLQRLTDRMLADGCDLHEARKREFGVSNSWVPKPDPIGAPVGNPAVDRVMKEVHRWLKMAVDRWGIPEVVNIEHTRSGMMSTEKARELMDSNAARQKRIEALAQELGAQTCGRGKLNQVTKIRLLAVQRQGYKCLYCGNAISFETADMDHIVPRSGLGSTNDRNNLVAVCRECNESKRNQLFSEWAKSGGRKDKVSIDDVIERVWSWKRDPGVSLKQHKKFQAAVVARLKSKKPDQEFDARSMESVAWMAVELGKRIRGYFASASSANEGAVVPSVGLYRGRITAAARIVSGFEGCVRLTGGNGKTRLDRRYHAMDALVIALLDDHIAQLLALRDNLRFTQLLTSGADEWRRYLQSHPSENTLMHSWSQRMRVAATKFNGALESGMVRFTMNQRLRLGSSRAHMDSVTSSEHAYLDRNGDRVPKLDKNGMRKVKEHGEVRLLSDPLPVDLIDRAETPALWAALVKDEQFDPQTGLPTDPKRTIKIHGRTIGPMERIRFFGATPAGKWSASIAVRGGYVSISNTIHHVRIYKIAEEPAKYAMLRVYQVDLRHAHGKDLFSFSIPASSISMRTADKAIREVLRDSSKEPLAWIVAGDELRVNPKFYDTDKIGEFFKKYPEAVEWRVVGFEGPTKLNLRPLRISEEGFDDATPQEVRDIAGDSGSWRVSIGALLGPGGVSVIRRNALGEERWKSKDDRLPCSKVFE

SEQ ID NO: 6321 - protein, 1202 aa, synthetic construct
  REGION 1..1202: note = Synthetic
MHYTISLDAGTNSIGFALLDSTNTLLELGVDTFPMGNKEEKGVEKSRSAERRGYRSARRNRFRYHLRRAQLNTLLKPLGMIPDWSHKITAFDLYKMRKEAVEQQITLQELGRILFLFNKYRGFKSSRKEVGKDPEKEKEEGAIQSEISWLKNRMSAHNCKTVGHYFFKMFEKSHELQQRGEWHNPDEPYDERGLDGAEKFSLVNSRGIRREGRHLERTLIEAEFDLIWQKQRTFYPAILTDSNYHQIKNRCIFYQRLLKSPKKFIGKCSYEKSKPCAPLSSLPFQEFRLLKQLLDIRITDEKNPEMFNVSLDDEQRGMLFEELQNRKSLSFGDAKKLLKLPKNVKFNTDELGKDLMGNKTRASLRQVLGEGLFQEIEQQGQLEKLWHIIYMHQDEAWLREKLAQKWEFSPDIINAITEIHLEEGYGSYSTTVLQKLLPELRKGVHERDALKKAGYEVEQNAANRPLKPRISELKNNELRNPVVEKATMRVIRLVNQLIKKYSINPEQLTIRVESTRELKKPKQERQKIRNQNLDTEKRRKEYAAFLTKYGKFGIVYPNSAVINKFELWLELGENQENLKDFQKFILDSKGFDLHFEKYRLWLEQGMKCPYTFKTIPLADLMSPEIEIEHIIPYSRSMDNSFVNKTLCFTEANKQKSNSTAFEFMRDKGEGTLIAFKEHIKKVFSKSPEKQKRFLQEEVPPSFRPDQLTNTSYIARQIRSKLQEVSRDVQFTTGAATSELRRIWRIGSLLEEVMYEEATGIEMWRHFANRADENNKIEIENFKQWQAQFGKGKNRSDHRHHALDALVIGFCTPAIVQQISTFHRVREELKIANADHDGLLFSKELEYRLPRLPIQKSSIREALKQILVASQVNQRLLVAQQNHSKKKGGKHTQAVQSVRGALFKETFFGKIQKPHPNAFDKHEVFVTRKALTPELIKSSKDLEKIVDVQIREILKQRLAQYGDRGDKAFSEEEMRRNPVYMYSLNDYPNRSTNPSSKKGNTLPVIKKVRTISKNVRSFVAIPAKDADGVIVASNRYAEKNENYIMAFYQLLSTNKKGETKRICDFKLLSTVEAVRKRQQGEPLFADELTNEKGETLPLNPLCPNLKKGDFVVFYENTPDEIQWNDPEDLSKRLYQATGLSEGIKSKIYLFGYVSFAKHNHSRYNASYESKEFSLSESMPFLMMSHIQLKAVKVKVSQLGEVTV

SEQ ID NO: 6322 - protein, 1417 aa, synthetic construct
  REGION 1..1417: note = Synthetic
MKHKYIIGIDPGVGSLGISLRNTERNALLEQIEVTNVDIVRSGVVKNGEGKYVSFAAERRGFRNTRTLYRHRKRRKQETLKLLINEDVVLDENIKHVLCPLSKEELDKWVRYDNNKGYKREYPTDSVEFSHWMMLDFNNDGKVDDYSSPFQIRKELVERQFDFSQKEDCYKLGRALYHIAQRRGFKSSKGSINDSDVISLGDNQDDDFDSLEYSEKKKSKTLTAYMNQLQEKGHERVTVGFALACLENDGVRLRDSEYQAIRTQLKEEITTIFKFQKQLSLNSTLYKRLVSEKKNDGTIFYQCPIKSQKGNVESCTLEPRKKRCQVSHPEFEKYRAWSFINNIRIKLLADSEPQMLPYELRMKLFDKITGTVSKTIDFIGIRKLIEKEVGEPLSANEGTINFKDDYSLSGCPTIGRLRKILGDDWETKTIEIEQTRRRNKNQEVKDLHTISYGAIDLWHICTTMENETAMTAFLEKKMPFDEEQNKEMMRLYKNVSNDYANYSVYALQKINRFLISGCNNYEATLLAKIPDIIGKTQWKQYGKDIETDIQNLIAQNREEKRYLAIANQLIADYKSQDEDDRDHNYEYQLTELDWRDVENKIKESIGKVTWTNIPTEEQNAIKLRVGELYQQFFKSYKRDYYKLPNDTERIQSYLSERISLNLQKVQQIYTPSSNKYYPPAHRVKGVFQLGSPAKIALRNPSAMRILYLLRRRINELMTRYRDMEPDNTRIVVELPRELNDANMRRAIELYQERRKKENNIFKNMVGEVLDEKEEERVEKTRLLIEQAPEYLNADFDERYQKHKEVNSYNRNSYNDTIEYATTKYRLWLEQGCIDIYTGHTIPFSHLFDANMYDIEHTIPRSIVLEDSLENKTITSAFFNQKVKGTLLPSQLPNYNDVIVPNLQPWKERVERLDERVRYWLRETKRAADSDRKNYCIVQRHLWQMELNYWSSKLNRFLMTEVKTDFVNKQMSDTRVISKYVYHYLKSCFSSVDVQYGCTNAVFRKILGIQAKDEEKDRSVHTHHAIDATVLTFIPSSSKRCEMMRLFFQIDEAKKAGNIMEEKRLKKQLEEEKNLCLYGRTNKKHSDKNLANLVRDIQETTFVNHSERDQALTPAKRRGVFRKNGTTYNVLKTGDCIRGKLHKEKFFGAITQWEKDADGLVVRDAMGQHVVDTSNVKYVIRVKLQYKQGRGEGFKSWEELKARMIDKSLYRKLEEQHPNETFVEACKNGFFTMRKIHGEFVRNRIRHVRCEISDNQGHISIKQHLNRSKKDYKRFYYAAPADLLCACEYRGVKEQKYEMMRLFDISQNRKDGKEDIPTSLQGKKEILHLVRVIRMGDMVILYKDSPNELDGLDKKQLSKRLYRVDGFEKSGRIILVKHDKTKEDGKGKSCSDFEDRISQNIIRMSITKVKFVPLINHR

SEQ ID NO: 6323 - protein, 1409 aa, synthetic construct
  REGION 1..1409: note = Synthetic
MEQKYVLGVDPGTGSLGLVVRDTETEELMEQVKYASVDIVRSGVIESGQNKYTSFAAERRGYRNARTRYLHRKWRKQETLKLLIDEKIIEGPIKHLLCPLSPEDLERWVRYDKAKGLKREYPVDAVAFAHWLMMDFDGDGKVDGYTSPYQIRKELLERQFDFSNPEDCYKLGRALYHIVQKRGFRSSKGDTINDAELPAEDIPQDEDFDAMEYSEQKKSKKLTEYMVEKGIQDKSVGYALAMLEDEGIRLRDSEYQVVRKQLKDEVKAIFDYQKQLSTDSYLYKRLVSEKKGEGTIFYQQPLRSQRGKVERCSLEPMRKRCKASHPEFEKYRAWSLINNIKIRLPEDGELHTLPFELRQRLYDEKISKIVSKTFDFASIRRWIEKEYHLNNSLSAKAKTINYYDDHSVAGCPTIGRLQKILGDDWESWTKESDQIRQKKNGTEHHVKYNALTLWHVCTEAENETFVENFAKNKLQFVHFNEEQIKELVRLHKNASDEYANLSLSALHKINRFLLRGFNNYEATLLANLPSLIAAKLWQEHSDEIEAHLQDIIDSNREQKRLLNIANKLIADYNSLDEKEQCADRTYKLDDSDFRDIKKAITESIGKVSWERKSQDEKDSITQQVAALYQQFFASEKRTYYKMPTDMERIREYLKVAFEIELGADNQLYTPYDNRYYPQATQTKDGSFQLCSPVKGALHNPAAMRILHLIKRRINALLKDKQLGITAENTRVVVELPREVNDANMRRAIDIYQNRRKKENDIFRALIKEACDDEDERLQKTRLLIEQCPDYVLADFNEKLQKNKAYNEKIEYAATKYKNWLIDECIDLYTGNPIPFASLFDNDSYDIEHTIPRSIVLSDGLENKTITSASFNRKVKGNLLPSQLTNYQTVIMPNLQPWKDRVERLEGRVKYWLKETKRAFDEDRKNYCIVQRHLWQMELDYWSSKLERFLITEVTTSFVSKQMSDTRVISKYVFHYLKSFFTRVDLQYGSTTATFRKIYGLPEKDRSNHTHHAIDAAMLAFIPSSAHRDAMLRLFYQIEEEKKAGHASEVNRLKEKLEQEKKLALYGSKYAKAKGAGMINIVNQLKDTMMVNHVVKDQTLTPARKRSSIKKNGERIKIVKTGDCIRGQIHKESFFGAIKPWTTDKEGNFLRDELGLPYATKIKYVKRCKLQYKQKKGRGEGFTDWEDLERRIIDKALFNQLKEQAKGLSFKDACAKGFTVERKVDGRIVENKIRHVRCEIPSNLSHFPTKKHVFVSDKDYKQYYYAESADLQYCCEYQGSNETAYKSYTLYDLSMRMKAGKEPFPKTIPGKREMLHLSRVLTKGEMILLYKESEDELKSLDKAQLAKRLYRITGFEKRKERTDTIKLSKHNYSAAKDEGKGKSLDDFEKLIQLNKIQLAVNKVHFVQVKA

SEQ ID NO: 6324 - protein, 1234 aa, synthetic construct
  REGION 1..1234: note = Synthetic
MTLKEQNYPLKKYLDTSTKVSDADLPVDEIQMDNDDFDAMEYSEQKKSKLLAEYMQEQGITDKSVGYALAMLENEGIRLRDSEYQVVRKDLKKEVKAIFEYQNQLSTDSYLYKRLISEKKGEGTLFYQRPLRSQRGNVEKCTLEPLKKRCKASHPEFEKYRAWSLINNIKIKLPDDDAQHTLPFDMRQRLYHEKFSKIVSKTFEFASIRKWIEKEMGFSGSLSAKAKTINYYDDHSVGGCPTIGRLQKILGDDWQSWTLETNHVRKKKNGTEHRVRYDALTLWHICSEAENETFVEEFAKNNLPFDELQIKELVRLHKNASDEYANLSLSALKKINYFLERGFNNYEATLLANIPSLVGVKQWKEHGDEIEAHLQDIIDGNREKKRYLNIVNRLIADYNSLDDKERFADSPYHDYKLQDSDFRDIEKKIKEVVGKMTWEKMAVDDKEALIQQVSTLYQQFFASGERTYYKMPTDMEGIREYLQIAFGIELGQDKQLYTPYDNKYYPQATQTKDGWKLCSPVKGALRNPAAMRILHLMRRRTNELLKDKSLDITPENTRVVVELPREVNDANMRRAIDIYQNRRKKENDVFKSLIKELSDDEDERLQKTRLLIEQCPDYVLADFNEKLQKNKAYNDKLEYAATKYRLWLEQGCIDIYSGYPIPFSKLFDDNQYDIEHTIPRSIVLQDGLDNKTITSASFNRKVKGNLLPAQLANYQTVVLPNLKPWEERVERLKERVKYWLKETKRAGDPDRKNYCIVQRHLWQMELDYWSSKLERFTITEVTSDFVSKQMADTRVISKYVFHYLKSVFGRVDVQYGSTTATFRKIYGLPEKDRSNHTHHAVDAAMLAMIPTSARRDAMIRLFYQIDEEKKAGHADEVKRLKDALEQEKKLCLYGSKYAKPSGSRIIDVANYLRETIMINHVAKDQTLTPARKRGSIKKNGQRIDIIKTGDSIRGRIHKDSFFGAIKPWVTDEEGNFLRDEQGQPYATNIKYVKRYKLQCGEDFDSWEKLEKRIVDKDLFKHLKEQAETQGLSFREACAKGFYVSRKVNGQIVTNKIRHVRCEIPTNLSHLPTKKHIFTSDKEYKQFYYAESADLQYCCEYIGGSETSYVSYTLYDISMNMKKGEDAFPKTILGKREQLYLNRVLTKGDMVLLYKESEDELKTLGKTQLANRLYMISGFEKRKERTDTIKLVKHNYGAAKDEGKGKSIADFEEMIKQNKIQMAINKVKFVQTKLL

SEQ ID NO: 6325 - protein, 1063 aa, synthetic construct
  REGION 1..1063: note = Synthetic
MTQTKYRLGLDIGSTSIGWCALKLDNNNEPCGILGMGARIFSSGRDPKTGTSLAEDRRMARGMRRNRDRTLLRKHDLMQKLIANGLMPTDKAQRKQLESLCPYQLRSKGVKGELTLHELGRALFHLHQRRGFKSNRITDKGGDESGTIKVSIKSTREAIKKAKAHSYGDYLASLHKKRESVRARLRGSTQKDKRYDIYADRSLIEEEFETLWNTQKTYHPKTLTDTARESLHGVFFRQRPLRPVEPGKCRLDPTQARAPWALPLTQHFRIVKEVNNLYWYDSRQEKHELALDEKQRLITMLLEKKEVTFKAMKKALGIDDPEAYFNLESDKRKNLKGDLVAYAIANKNIYGSEWRGLDPTDQNNIVTILLDSTLSDGDAKQRLTDEHAIPEETAERLLTVQLPVSYCHYSEKVLAKLVPMMESQGLNEYNAIITADYTPPQEYDNKALPRLPYYGQVVPSAVIGATNDLKHQEIQRYGRINNPTVHIGLNQLRKLINALIKDKHFGKPEQIIVEFARDLKKSWEERREIERQQTENQKKNDERNKKIQKLDFTPNGANRMRMRLWEETDKKCIYTGKPIPLSKLFTKEIEDDHILPFSRTLDNSANNRLVCYGYANKQKGNQTPYEAFGNLKHSKDYDGGWDGILDRASQLRKERSKRFAPDAIERYKEEHDFIDRQLHDTAYLAKIAKGYLGKLYDNPLSHVWVSPGQMTALLRGKWGLNNPLGDNQFKDRNDHRHHAIDAFVVAATSRSMLQKVSTQAAKPGNGRLIADMPPPWEGYRDQFIQHFKKLVVSHKPDHSMAAQLHNETAYGKIKVPPGTTDSYNYVVRKNIADLTEGEVARIQDEDVRGYVQEHLAQSEGKPHKEALQALVDKQPNRERIPKRGRGQKPYVKKVRIHLPNKGGAPPPLIPIKDKQGKPYKYYDRGKNHCVDVYENEDGSIYAYTYSIFEANQLNKQGKWDTKHPHPLPREGKKPLMRVYKGDCLKVTINGDTQIIKVQKLMPSASRFVTVSHTDAGDFVKRVKDRDDAFKWIFIAFNYLKKYQARKVRVDMLGRVYHVQPPQP

SEQ ID NO: 6326 - protein, 1035 aa, synthetic construct
  REGION 1..1035: note = Synthetic
MEKVFAFDVGTASLGIAVRKDFDMIRYESLLLPQEAGGMDELREARRQYRTRLAHAAREAYWKRICEEAGIEVLHSRIHGDASLHIPSSPGDPRLEREFAAPGDETIYTSCLLRIKLLQGAKLEGWQVFKAVRSALQRRGFDRNVPWKNRAASKTNADDDSKTAKNAMEYEKMLLEIVNQQREYLYPCYFDAFQMGLWNPRNNQILLRPSKISNRARGYTPPRELVIAELSALLQNAAKLFPKLVGKIDEVLWGPGKEQYASFFAEKRNALHLKEGSAGDWESLLGQKIPRFDNRQPGKCALIPRFHVCQASDTAIIESTFLLKVKNLRVLSPEGKEVFFSPETIRVILDTARIKARAKREELRLAQADKEAIQAAVASAYKITKTDLKKTLRSMKYDILPGNEEVEAPKISGRARLSRPAAKIMRDLILSGESPRAFYQKLLQCPPKDIPGATLSDDLQFLLMMPDSWEGIHIPDMAGKKIQESAQSPDDLVRQLIAEQRSPIVRLRLEIFDRELKRLLDDPAIGKPDRIVMEFVRGDFLGEEKKRKLEAEIKRRHKENLEIRTTATEQGYSSGTDLLKLKLLKEQAYVCPYTGDVLSCFALEDLEVDHIVPRHGGKNGSDGFTNKVVTSRTTNQLKGARTPYEFLHGSGKWTAYCNRVMAMKVSKRKQRLLLSPDAEKLDQKYSDLCSTAWIARVFRDIAAVRCCWPEGAIGSERHIVVINGAITAALRRRYRIDSLLAPECKSADEIEKKNRDDKRHHALDAMVLTFTTFWMRNPALRDKLALPDKIDRYYFQKYIDEVNPRNIIFPRAGLEKTIYGKREIDGQSKMTKREDIVSFGIDNKGKFVEKSVLSNFRDVCDEKLRSYLQTSFANAKIDSTEKWMFWCQNLKSPDTGMPIKKVRIVKGGIEEYKNLSKDGDVFGGQYRKGDQHKGYFVYLDTKNKPRVAPVYAHASVSLEREKLCKLGFTVVDFFQSGCSVEIKVHAISGKNHVSPGVYMLTSIWTQGTIALFKNGEKYLVSLSSISDIASNLKRC

SEQ ID NO: 6327 - protein, 1181 aa, synthetic construct
  REGION 1..1181: note = Synthetic
VSSFQNVLQSYKSLPQKILYAMKKILGLDIGTNSIGWALVTEPETEHEESSILKTGVRIIASDTTHIRQYEEGKSVTLNADRRMKRSMRRNNQRYKLRRKLLLKKLVSMGMMTRNILEDQNGWDQHLKVADTLYLYEIRDRAVRGEQLTLEELGRVFYQLNQKRGYKSNRKAYSKEDETSEVEKSGSTNPKKKGLLEQIKDREFILKENGWTIGQFFYHKLLENPNIRIKQNTFTREAFQEEFDRIWASQQDFYPNVLTEDARVEIRDKILYYQRPLKSQKHLISGCQFETRTYRDKQGKSITQPIKVIPRSAPLFQYFKLAQQISNLTISNLSKAGEDAFNRYGERNLTDNERSLVFIYLDSRKRVKEKEVLKKVLGLNPNDGYKLNYEELEGNDSKAKIIEAFEKEDCLMPDGLLSFDPFQPYEKQPFFRLWHLIYSLEDPNHLAGKLEQQFQLPEKVAKRLAKVHLLPDYGNLSAKAILRLLPHLQKGLTYDKAQLEVANETGLEAYKRHKLTLDDQKQRMLAKAITEVKIKSLRNPVVEQILNQVVNLVNAIVADTDLVSEEERRNDQFEIRVEMARQLKSSAKQRAKTEKKIKENRQKNDEAVKKIMELGIAKPSLSDIEKYKLWLECHGVSPYSFEHIPLAKLFDKNYYEIEHIIPRARFFDDSLQNKTIAESSINRKKGNMTAYEYMESQGLLKKFERFVLDNKNFSKGKRKRMLDPNVPDDFVNRQLNETQYITSAIREKLLEISYTVTTTTGSITDYLRNDWGLNEVLQKLNWERYEAAGQVYDDIDKETGEIKKRIRGWSKRDDHRNHALDAIVVAFTRQGYIQSLNNLNQLFQTNNGLRQSGRKFPKPMAHFTRKVQEALESLLVSHRKTNKVATRRMHKHLVKGKESGKVQVTLTPRGRLHEETVYGKIKFIPEGKKGMENQKEDYVVRYPLNQNFEAKSVPYIVDKAVREKVRERLAQSNNDPKQAFKDLENNPIYLNEEQMIPIKKVRCFAGLKKPVALRENSNGEPKDFVQTGKNHHMAIYQDEDGNRIVQPVSFLEAVARKIAGAEVFQQEHEGKPLVATYAINDMIIVGLDPNDIDFFDPVNNVLLSKHLYRIQNTYADGKKIDIRFRHHLITKNEKTNEEKGIAKKMKTLLIVQSLKNLQGTKVFINRLGDITGIGETLRKLE

SEQ ID NO: 6328 - protein, 1192 aa, synthetic construct
  REGION 1..1192: note = Synthetic
MKKVLGLDLGVASIGWAFIQEGDNKSEILGLGSRIIPLDTDEKDEFNKGQKISKNQKRTLRRTLRKGYDRYQLRKKDLHEKLEEHSMLPDAKYFSLSALELYGLRNNAVQDQEISLKELGRIFLHLNQKRGYKSSKKEITADDKTTDYEKVINDRYDIIRNDNITVGQYFYQQLQKDERFRIKEKVFPRHAYLEEFDKIWAVQQKYNPETLTEDLYKKIRNEIIFYQRPLKSQKGLVSVCEFEGSYYTTKEEKEIFSGPRVSPKSSPIFQVCKIWESINNIRIRNKRGEEFEITLEKKYEMFNYLDNNDRLSQTELFKILEIGKNEGYYTDALTKKKGIQGNITKADLRKAIDNDELSEKLFVFNLLIEESDAVDTDTGEIVKRKKIKAEFEKQPLYKLWHIAYSIPEEKDIVNKLQKEFGLSAEVAARIAKIDFSKGGFGNKSTRAIRKILPYLQEGHKYSLASAFAGYNHSDSITTEENMARKLADKLKLLPKNSLRQPVVEKILNQLINLVNALMENPKYGRPDEIRVELARELKQSREERNDTYSRINDAESYHNKIREKLLAHEEFKKKKVTRKDIERYKLWEEFGMKSPYEPSKVIGIGELYNGGYDVEHVIPKSRVFDDSFSNKTICPRRLNSGENAKNQMTAFDFMETQGDGKFHDFLALIEAAYNNRKISKTKRDKLLMPVNKIPGDFIERQLVETRYISRKAKEILTQVCRNVWSTSGSITNYLRYQWGWDDVLIKLNWDKYPEEMKRVEEVDGKTRYFIDGWTKRDDHRHHAIDALTIACTTQGTIKRLNDLNKVVEAKQNQSQQQALKESNENGLKAYIDKTKPFSTSQIESITSGVLISYKAGKKVATYGKRMIKKHGKTIIAQDKIIVPRGPLSEEGTYGKIRFNGKDEYVVKYKLGAGLGYLFSGNETVKTSKKGKEKDQIQVVLDSVVDKGVRTAIQRRLHTFNNNPKLAFKDLDNNPVWMNEEKRIPIKTVRCFTGLSAVEPVKVHDAPNNIVYTKFVKPGNNHHIAIYTDENGEKQEHSVTFWHAVDRKAHELPVVITKPKEVWDKILQGKSNYPDDFLNKLPKDKWVYECSMQQNELFVFNLTKNKIEELLSQREYSSISSNIYRLQKVSTNNYYFRHHLETKVDNKINGVKNEMLFKKMRRIILIQSLEAYFKYNPVKIKVSNLGEIIKIGE

SEQ ID NO: 6329 - protein, 1186 aa, synthetic construct
  REGION 1..1186: note = Synthetic
MKKVLGLDLGVTSIGWAYILENENKSEILGLGSRIIPLNADEKDEFNRGNKISKNQQRTLKRSLRKGYDRYQLRKKYLREELEKNSMLPQPKYFSLPALELYGLREKAIQENHVVGLEELGRVFLHLNQKRGYKSSKKELASDDKATEYEQEINGRYDEIQRKGITVGQYFYQELKKDERFRIKEKVFPRHAYIEEFDLIWKAQQKNHPEKLTDELYKRLRDEVIYYQRPLKSQKGLVSVCEFEGKFYTTKEGKEVFAGPKVAPKSSPLFQVCKIWETINNITIKNKRGEEFEVSIEKKHEIFEYLDSNDKLTQTELFKILGIGKNDGYYANALIKKKGLQGNITKSGIIQALDGHEVLESLLKFRMTVEEAEPVVDSETGEVVKRKQIKADFEAQPFYKLWHIIYSIPEEKEIVETLKKEFGLSEEMAKLLAKIDFSKGGFGNKSAKAMRKILPYLQEGHMYNIACLFAGYNHSDFLTKEDNIARKLADKLKLLPKNSLRQPVVEKILNQLINLVNALIENPKYGRPDEIRVELARELKQSREERNETFSRNNEMEAYHTKIRNLLLEHPEFPKKKVTRKDIERYKLWEEFGNRSPYEPNKIIGVAKLFNGEYDVEHIIPKSRVFDDSFSNKTICPRYLNSGDLAKNQMTAYDFMQKQSEDKFNDFLTVIDKAFGTGYNGRKISKSKRDKLLMPVEKIPANFIERQLTETRYISRKAKEILSQVCRNVWSTSGSITSYLRHQWGWDDVLIRLNWDKYPKESKRTEVIGGRTRYFIDGWTKRDDHRHHAIDALTIACTTQGIIKRLNDLNQVVETRQNQSQLQAIKETDDGLKATIDKACPFTTKEIENIAAKVLVSFKPGKKVAAYGKRTIRKHGKNVVVQEKIIVPRGALSEEFTYGKIKVNGKDEYVIKYKLGAGQGFLFSGKETVKKSETGKEKDQIQDVLNSIVDWGVREAIRKHLVKFNYNIREAFKVTVWMNEEKQIPIKTVRCLTGLNAVEPINVVDTGNNIAYQKYVKPGNNHHLAIYIDENGEKVQDTVTFWHAVERKKYGVPVIISNPKEVWDKILMNKEDYPKSFLEKLPNDKWKLDVSFQQNEMFILGMAKEEFENAIANNNYALLSNYLYLTWSISEGDYWFRHHLETKNSELKSSPGAKQSKRYYRCQSIAAFENLLPRKIQINYLGEIIK

SEQ ID NO: 6330 - protein, 1326 aa, synthetic construct
  REGION 1..1326: note = Synthetic
VTAWRTGKRFALSNFVLIPKTGSEYRFHVMNAMEISPDLELAFDVGHSSIGWAVLQRAAATPPATPSADDPALSVNLLGCGAVIFRADDCLASDRRTYRRQRRHIRSTRQRIKRLKLLLGHLGSLTPPQLDQPGCAWPWQLAARVLQGGRLLTWPELWDVLRWYAHNRGYDGNRRWSGAGAAASDNSDSDDAALDNILNDASATEDEKDDAKKVKEAKSIMRKFGVRTMAETFCAVCGIDPLGDKRSCNLPGEKRPKGMNAAFPRATVEGEVRRILQAHFGKLPQVNADLERSLLGRDNRDALAWQAIPHPGLKLPNRYQGGLLFGQLVPRFDNRIIAQCPITFAEEYQRLTGEGYSEAEAKDKAGVLAKVPGKYCTEFLNFRWAMTLASIRIGHSSETYRDRDGKMVKLRSLTADERCKVDARARRLGFLKVEADKPGKDGLVREGKNELRQIVTEETKCDRHNLDTLLLDPNARDGLELVPADGSAAAFRLAWACFDNPGHDANGSYRDSTLRHRFFVQLLRQKKLSLNRMIQQLDKTGGSAVASRIREAARKEVADRRGNVNEEKLDKLMAAEFFCPKLRGRACFSRAKLRQAFQEVFRREKPIHPQETGGCLAQTEDVKQATMVKDLAEQTNNHLVRHRLLILAGSERAKPQRKEGLLQHIVQEFAGGDQRRIARITIELARDLQAMSGMKVKDKAQALSAKLAHHQKVSADLAEKLRDANGNPLRDANGRPFAASPGMIRKARILADLEGKCPYTGRDIEFVHLANPHPQLGTADKDHVVPRSLRLSDALEAQVITFSEVNRLKGQRTALQFIRDMNLPENNHNKDRFGIKTEAQFRRDVDALWPKSDPFRRARAGGSKPTDDEARCWRRKQLLLKVAWEGNEFTPADLANTRYVVKLAKQQLEASFFGLPKEARPPVIAVTGAVTASFREKSWRLWGELAAVNPAVRAVLAEGMNEWDAGKNFNPKKAVREISHLHHAVDSVALALVTHLLVPLKHQSLDGTLARFVVKGKLSVDKEKAIDEVAAFRALCARLGLPRFARLDSQNRLHIAELPESLKAQIRQRLAEKRVVQHIPADTSGLACDDTVYRVLDPHDPSPNARRLRRWFEGILLAGQVKKLKELPDPKDPTKPLVVLVARKRRNPSGAETGKTLHDTGKEWRWIYLVAAKSSLHGLEPAAGHEGKLAALKGVKLLGENFGVAAITKAGEKPTFEIIRPRKVWKQVDSLRSAQPGAKIRLIRKGALVELQEADGQRTRLRIFGCGERPGRGIYFDAGVPDAIDREREIPVSAFANGRAKLVPVSLTGAAACPSTSSTLMPPTVR

SEQ ID NO: 6331 - protein, 1248 aa, synthetic construct
  REGION 1..1248: note = Synthetic
VVRCRSSYIANIGEKIEIPKKLLTFTKTDTRYMEKRLGIDMGTNSLGWALVEVTDEGCLLLDKGVNIFQEGVARDKSSEKPAVQDRTDARALRRHYFRRRLRKIELLRVLVRHDLCPYLSPEQLREWKNKGVYPVTEEFIRWQRTDDNTDKNPYRDRFRALTEELDLGNRADRHTLGRALYHLCQRRGFLSNRKDAGNEAEDGKVKQEINTLSADMSAAGCTYLGEYFYRLYQNKEKIRKHYTSRNEHYLSEFRAVCRKQHLDEELEQALERAIFYQRPLNSQKGTVGKCTYEKGKSRCPMSHPRFEEYRMLQYINNVRVMGPGDAELRPLSWEEVEKIRPLFLRKSKPHFDFDDIAKKIAGKGNYACKGELLQAPYRFNYAEKATVMGCPVSALFASVFGTDWLKELCSLYTLGAGKSEEQILNDVWHALFEFEDEARLQAWLQEKLQLSADDAKTLAAFRLPQGYASLSLNAVNKILPYLRRGYRYDESVFFANLGKVLPAEVYADPTRRREAEQGITAQMDDLGQEEKARKGERVRDYLRRYWGVGDTRLELLYHPSKDESYPAAHADENGILKLGSPRISAVRNPMAMRALFRLRALLNELLREGKIDRGTKINIEFARELNDANKRKAIARYQREREAENRTYAEEIRRQYAEATGRVIEPSEEDILKYRLWEEQGHRSLYTGNPIPISDFLGDGRKYDIDHTVPRSREGADAQYNKTLCEEKFNREVKRDKLPSELANHSEILGVVEACGWFERIEGLERRVWGADRRAKGAPTKSAKDFAIQDRHYWRMHLDYWRGKCEAFTMAEVPEGFRNRQGVDVGIIGKYAKRYLETVFDRVFPVKGAATAAFRKMWGLQEEYTEKERVNHVHHCVDAITIACIGRREYDRWARFNRGEELYRWGEADKPHCEKPWPTFTEDVRAVTEELLVSHHTPDNMPKQSRKKLRVRGKVRRNDNGEELYCQGDTARGALHQETFYGAIRREDEIRYVVRKSLGQLLPADVDKIVDDTVRWKVQEAIDTYGFKLAMDTTKHTIWMNEEKGVPIRKVRIFAGKMMSPQPLGGKTHRDASLYPYKRPVYVSLGSNYCMALYEGTDAGGKLKRTYEIISSLKAAQYFKKSADKRDGMLVPQSDGNGYPLRCILKAGTMVLFYESSPEELRYCTRAELAARLYKLTKFSTQQSKYGVLVFRHHQEARPVGELQEKGGPWKRGEAYRPLIKMLHTGFQAYVEGYDFDLTVTGEIRFKH

SEQ ID NO: 6332 - protein, 1239 aa, synthetic construct
  REGION 1..1239: note = Synthetic
MEICNILFNFTRNNFFHMAKVLGLDLGTNSLGWALADEYEQGYALLDKGVEIFQEGVARDKNNEKPAVQDRTDARALRRHYFRRRLRKIDLLRVLVRYDLCPPLTEEQLSTWRQKKQYPLDEEFLRWQRTDDNEDRNPYHDRYVALTERLDLENRAQRWLLGRAFYHLAQRRGFLSNRKEAGNEKEDGTVKESIKNLSAEMEAAGCRYLGEYFYGLYQHKERIRGKYTSRNEHYLTEFNAICDRQQLPDKWRRALHRAIFFQRDLKSQKGSVGRCTFEPTKSRCPVSHPRFEEFRMWSFINNIRVTGPGDLQPRPLSREEAEAIKPLFFRRSKNKVYFDFEEIARRIAGKGKYACREERIEAPYRFNFARTTTVSGCPVTASLMDIFGKEWLREIRSLYLLGDGKTEEQVLNDIWHALFSFKDEERLRDWACEKLQLSEEQAKAFAAIKLPQDYAAMSLNAINKILPYLRCGYRYDEAVFLANLRAALPKEVYADENRRHNIEQDIASLLLDYKRNPYDKFDSKECRIADYFSDHGLDMSRLDRLYHPSKIETYPDAKPNAEGIMQLGSPRTSAIRNPMAMRALFRLRDLINTLLREGRIDRDTKIRIEFARGLNDANRRKAIEQYQREREAENRKFAEEIRRQYTAETGREMEPSDDEVLKYRLWEEQQHICPYTGRQIRISDFIGANPGFDIEHTLPRALGGDDSQMNKTLCENRFNRETKRAKLPAELSNHAEIMERIESFGWREKVESLQKQIEAQVRRSKGAATKPEKDSAIQRRHYLQMQLDYWRGKYERFTMTEIPEGFSNRQGVDIGIIGKYARLYLKTVFDRIYTVKGSTTAAFRKMWGLQEEYIRKERVNHIHHCIDAITIACIGRREYDRWAQYAGDEERFNYGESDKPRFEKPWPTFTEDVKAVADELLVAHHTPDNMTKQTRKKLRVRGRVKLSADGKPIYQQGDTARCRLHQETFYGAIKREDEIRYVVRKSIKLLQPTDIDKIVDDAVRDRVRMAIDEVGFKTAINPDEYTIWMNREKGIPIRKVRIFTPGVTQPIALKKQRDLSDKEYKQDYHVANNGNYCMAVYEGKDKKGKLKRSFELVSNLEAAQYFKASADRETYPDMVPLADANGFPLKCILKTGTMVLFYENSPAELYECSRKELVKRLYKVTAMAAEGRVQFLFHQEARDQKTLTALYGAGTSQFCQSNPSPKLRLSVSNFNMLVEGYDFELTVTGEIKFKGDRPC

SEQ ID NO: 6333 - protein, 1230 aa, synthetic construct
  REGION 1..1230: note = Synthetic
VIRCRFIRNKDRKKLNKTQDMERILGLDLGTNSIGWAVVDRKEDNERILVDKGVHIFQDGVAHDKSGEKPAVQDRTAARASRRHYFRRRLRKIELLKVLVENQLCPPLREEDLDRWKAEKKYPMDPDFLEWQRTDDNCEKNPYHDRHVCLTRELDMKQKSERYILGRALYHLNQRRGFLSNRKDAVKNDDNGKVEKDITSLSTEMAEMGCEYLGEYFYHCYGKKKIRTRYTARDIHYRKEFEAICKKQGLSEPLVQQLERAIFFQRPLKSQKGTIGRCTFEKDKPRCPVSHPRFEEFRMWQFINSIRVNYMGEGTRPLNQSEIRTIFPLFFRKTKPDFDFNEIAVKMAGKGNYKCDDETIEVAYSFNYKMNSDVPGCPVIASLLSALGIDASPEWDTDLCSIYTRGEGKSIEQIINDIWHALFFFDDDKRLTSWLMDALQLDEKAATSIVKSRFPQGYASLSHKAIIKILPWLKKGLKYSDAVFMANLPATLPRTISQSKRDEVEENVRILLEDFDANPLNRESNKLQAVSDYLITTAKDVNTKKLYHPSMIDIYPKALPDASGKIRLGSPRTDAFKNPMALRALFRLRALINQLLDEGVIDKETKINIEFARGLNDTNKRKAIEDYQRELEKQRKEDRAKIIEACIDTFGKDYEPSDDDLIKYRLYEEQNHICLYTGKQIGLAQFLGAATEFDIEHTLPRSRGGDDSMMNKTLCDSHFNRFDKKAKLPSELANHDEIMQRISSWKDLADGYEKQIASWLRNKRNAASKEAKDSAIRRIHYLKMKRNYWKGKYERFVMPNVPDGFSNRQGVDIGIIGKYARMYLATVFEKIFVVKGATTADFRKAWGLQKDYVKKARTNHAHHCIDAITIACIGKNEYDTWKEYMLREENYLWGNGKKPDYQKPWKTFTEDVLRIPNQLLVSHYTPDNMAKKSRKKMRVRGIIQRNEVGEIKYCQGDSARGLLHLDTVYGAIKRDEEVKYVVRKALDSLEEKDIKNIVDDVVRKKVKTAYEQFGSLKKAVEKGIWMKENVVPIKKVRLFASSITNPIHLKRHRDVSTKEYKRSTYVANDSNYCMAIYGDVKPSFKLYSKMDTVQYFKKGLSLKDWIPTTDGQARPLRCILKIGTMVLLYQSSPQELYNCPQDDLVKRLYKVVGLSSSPTKSGNRIYLFGRATLRFHQEARLSSELKEKKGVWTEGEDYRAIIGLSHNQLNCLVEGIDFELSTTGRVSFKA

SEQ ID NO: 6334 - protein, 1229 aa, synthetic construct
  REGION 1..1229: note = Synthetic
MTKVLGLDLGTNSIGWAVVEESENGYRLLDQGVDIFQEGVARDKNNEKPAVQDRTTARASRRHYFRRRLRKIALLKVLIAHDLCPPLSDEQLQTWRTRQIYPQTEAFLQWQRTDDNRDKNPYHDRYRALTERLDLNLQSDRYALGRALYHLAQRRGFLSNRKEAGNEKEDGQVKSSIKELTVQMHDAGCRYLGEYFYKLYQRKEKIRNHYTARNEHYLAEFQAICDRQQLPETWVAALKKAIFFQRPLKSQKGQVGHCTFERRKSRCPLSHPRYEEFRMLAFINNIRVTTPQDDQPRPLNDAEVSAIRPLFLRKSKPHFDFEEIARKIAGKGMYACKDDRNEAPYGFNFSRTTTVSGCPVTAALASLFGDEWLTTIASLYTLADAKNEEQILNDIWHALFFFDDEERLQAWAAEKLQLSAAEAATFAAIRLPQGYASLSLNAISKMLPYLRRGYRYDEAVFLANLKAVLPATLYADPQKLQTIEAEIASIIDDYRSDPMNRHLTKEQCVKDYLQNTWDIDATRLERLYHPSMIETYPAAQPDATGQFRLGSPRTASVRNPMAMRALFRLRALINALLRERTIDRTTKIRIEFSRNLNDANKRKAIEQYQREREREHQKFADEIRRLYAEATGRTIEPSDDDVLKYRLWEEQKHTCPYTGKRIGITDFIGGATSFDIEHTIPRSREGDDSQMNKTLCENRFNRDVKQAKLPAELANHAEIIARIEDFGWQERITTLQNQIEGQIRKSKNAATKAERDNAIQRRHYLKLQLDYWRGKCDRFTMTEVPEGFSNRQGVDIGIIGRYARQYLHTVFEHIYTVKGATTSDFRQMWGIQEEYTKKERSNHVHHCIDAITIACIGPRTYAQWARYAAQEEYYRRNRATRPIVEKPWPTFTEDVKAIADTLLISHHTPDNMAKQSRKLLRLRGKAKLNARGEKVYVQGDTARGVLHQETFYGAISRDEQIQYVVRKSLNQLIPGEVEKIVDETVKERVKEAIKLHGFKAAMDPTQHTIWMNRDKGIAIRKVRIIAKLTEPLPWDKKQRDLSKHDYKQHYHVANKSNYGMAVYEGTDAKGQTIRTYEIISNWQAAQYFKRSSDKAARPDMVPLTDTHGYPLRWLLKTGTMVLFYEQSPAELYECSPRELAKRLYKVKKMSKDGRVTFMHHQEARNDDTLKNDYFKFHGHTAPNALTDGYSSVDFQYPHPKLLLSRQKFNMYVEGYDFELSVTGKITFKH

SEQ ID NO: 6335 - protein, 1219 aa, synthetic construct
  REGION 1..1219: note = Synthetic
MAQKILGLDLGTNSIGWAIISRDDDATCRLLHYGSHIFQEGVAREKGNEKPCVEKRTSSRASRRHYDRRRLHKIQLLNILIELEMCPYLSEEALNDWRYKRIYPLNEEFIQWQRTDDKINKNPYYDRYLALTSKLDLSTKKDRYILGRALYHLCQRRGFLSNRKDATQASDGPVKNGINDLTEAMEKAGCRYLGEYFYKLYGEHKKIRTTYTDRLAHTEKEFYAICKKQGLSDEEILKLHKAIFYQRPLKSQKGLVGKCVFEPSKNRCPLSHPLFEEFRMWAFINNIKIKESADCEFRPLSEKETDEILPLFYRKSKPTFPFEDIAKKIAGKGKYAYKDDKRDAAYKFNFRMATVVSGCPVITGLKDIFGEDYRRNIAECYDKADGKNLEEILNDIWHVLYFFDRDDKMEQWAVSHLQLNEEDAEKLTKIKVPQGYASLSLCAIKKILPFLKAGMRYDEAVFVANLDKVLPDNIRNNPEARKDVILSVCDTVANFAENPLNKTITKEQAVKGILEDIPDIDFGKLDLLYHPSRTEVYPEATMNSKGELRLGSPRTSSIRNPMAMRALFRLRHLINQLLEERKIDRTTTINIELARELNDANMRKAIERYQREKEKINKESIEKIKKLYQEATGNEIEPTDDEILKFRLWEEQEHICLYTGEQISITEFIGVNPKYDIEHTVPRSLGGDSAQTNLTLCNSVYNRQIKRSFLPSQLSDHETILQRIETLGWDKEIERLANEIARLKTSMASTKDAKDSIIQKRHYLKMHLNFWRDKVRGFKLTEVPEGFSRRQGVDTGIIGKYAREYLRTLFRSEDRQIFLVKGSTTAEFRKLWGLQDEYAKKERINHCHHTIDAIVVACIGRSEYQRWAKYHTERENYELGSGSKPDFRKPWPTFTEDLKSLDEKILVSHNVSYSTFNQTKKRLKRRGKIIRNSKGDPVYEKGDSVRGALHQETYYGAINREGTIKYVLRRSLSDLAEKDIKNIVDPAVREKVELAVKERGFKNLLSEPVWMNREKGIEIKKVRIFTPSVTNPIHLKPLRDESRHPYKRFVNVANDSNYCLCIYEGNITGKKTKRSFELINLLEAARRHKSGDDLYPLSDKDGLPLKWKLRVGDMVLFYEKKPNELYECTKEDLVKRLYKISGLSINPTGSGYGVITLRYHKEARPSTDSIAKNINGAWKSGENIRPGIIQLHTQFNAIVEGEDFILTPTGEIHFLHPLC

SEQ ID NO: 6336 - protein, 1218 aa, synthetic construct
  REGION 1..1218: note = Synthetic
MDDKVLGIDLGTNSIGWAIITRDNDSCRLLHNGVHIFKEGVAREKGNEKPATEDRTAHRGLRRHYDRRRLHKIQLLTVLVDVDMCPFLSKEELDDWRYAGKYPLKEDFLDWQKTNDVSGQNPYSARYEALTRTLDLSLQQDRYLLGRALYHLAQRRGFLSNRKDTSKSADGVVKSGIDDLTVSMTEAGCTYLGEYFYKLYERGEKIRSRFTDRIAHVEKEFYAICEKQSLPKSLVDKLHKAIFYQRPLKSQKWAVGKCVFETSKSRCPVSHPLFEEFRMLSFINNIKIKTFVDADYRSLTDEERESIIPLFLRKSKSSFDFVDIAKKIAGKGNYGFRDDYGDIAYRFNYRMSTAVSGCPVTASLISLFGKDWKQGIGECYTGANGKTVEQCADDVWHVLYSFDREDYLKDWAKKRLQMSAEDSAAFASLQLPQGYAALSKCAIRKILPYLRSGMRYDEAVFLANLKKVLPERILNDETEKHRIEIAVVNAVVDFESSPLRKTMTKEKAVKEVLEDISDVNLGKLSRLYHPSKIDIYPEAELSHDGKLRLGSPRIASVRNPMAMRALFRLRHLINQLLDEGKIDRTTRINIELARELNDANMRKAIDRVRRENEAERLKIIEKISRLYKEATGSAIVPTETEILKFSLWEEQKHRCLYTGEQIALTDFIGVSPKYDLEHTIPRSLGGDSAKANLTLCNSEYNRKVKQAVLPALLPKHDMIIERIKTLGWQEEIDNLSNQIARIKPSMASTKEIKDALIQKRHYLKMRLDYLRDKYNRFTMTEVPEGFARRQGVGIGVIGKYAKEYLKSLFRSEPHQVYLVKGSTTADFRIAWGLQEEYTKKARINHCHHAVDAIVIACIGRGEYQRWAEYNRDMEAYEFGKGGRPQFQKPWETFTEDVKKIQDSTLILHDAPQKTFKQTKRKKRIRGKIINGADGTPLYEKGITVRGRLHEETYYGAIDKDGSTRYVLRKSLDKLSEKEIDNIVDSVVRNKVAEAVASRGFKNLCSAPVWMNEAKGIAIKKVRVYVQRVTNPIKLKKHRDVSHHAYKQYYHVANDTNYGMAIYVGDNGGKKEKRSFRLMNMLQAVDSYRNGNDFFPLEDDKGLPLKWVLYTGKMVLFYERSPKELLDCETKELTKRLYVISGLSINPTGNGYGKISLRHHQEARPSTDSAVKEKGGIWKAGEDFRPGVKVYHTQFNALVEGVDFELTITGEIKFLRALC

SEQ ID NO: 6337 - protein, 1216 aa, synthetic construct
  REGION 1..1216: note = Synthetic
MEKRLGIDMGTNSLGWALVEMTEEGCVLLDRGVDIFQEGVAHGKSGERPAVQDRTDARALRRHYFRRRLRKIALLRVLVQHDFCPPLSQEQLDAWRKQGVYPVTDEFIRWQRTDDAADKNPYRDRFRALTEELDLTRREDRHALGRALYHLCQRRGFLSNRKDAGNETEDGTVKTDIKALSADMEAAGCTWLGEYFYRLYQRKEKIRSKHYTARNEHYLAEFRAICRKQRLGEELQQALERAIFYQRPLKSQKGQVGRCRFEKKKSRCPVSHPRFEEFRMLQFLNNVRVTGPGDAESRPLSQQELEAVRPLFLRKSKPHFDFEDIAKKIAGRNNYACKGDRTEAAWRFNFARGATVTGCPMSALLEAVFGNEWRRELCRLYTLGAGKSEERIIDDVWHALFAFEHEERLRQWLQEKLQISADDAKTLAAFRLPQGYASLSLNVINKILPYLRRGYRYDEAVFFANLGKVLPAEVYADPARRREVEQGISAQMDDLGDGEKTRKEERIRDYLRLYWGVEEERLDRLYHPSMIEAYPQAKPDANGILRLGSPRTAAVRNPMAMRALFRLRALINELLREGKIDRGTRINIEFSRKLNDANMRKAIERYQREREAENRKFAAKIREEYAAATGHTIEPTEEDLLKYRLWEEQNHIDLYSDTGRMIGIAEFLGAGRTYDIEHTVPRSRGGEDAQYNKTLCEERFNREVKRNKLPMELACGEEIWARIEALGWPELIDSLQGQIEGATRRVDNAVTKPEKDEAIQYRHYLKMRRDYWRRKCESFKITEVPEGFSNRQGVDIGIIGKYARQYLQTVFDRVYPVKGSATADFRTMWGLQEEHTRKERVNHVHHCIDAITIACIGKREYDRWARYVCQDERYRRGEADRPQPEKPWPTFTEDVRAVAEELLVSHHTPDNMPKQSRKRLRVRGRVQKNDKGETKYMQGDTARGALHEQTFYGAIEREGEIRYVVRKSLDQLLPTDVDKIVDETVKRKVQEAIEAFGFKEAMDPQKHTVWMNKDKNVPIRKVRILTGVKNPILLKPHRDVSVKEYKRYYHVVNDGNYCMAIYEGRDRQGRLKRTFEIVNKLEAARYFKRSADRESRPDLVPLSDVNGYSLKYLLKTGTMVLFYENSPDELYECSVGELAKRLYKVVGMAQDGRVQFLFHQEARDRKAVTAECGMGISVFDARHPAPKLRIRVSNFKMFVEGYDFELTVTGEVKFKR

SEQ ID NO: 6338 - protein, 1215 aa, synthetic construct
  REGION 1..1215: note = Synthetic
MKTQTKEKVLGLDLGTNSIGWAVIGRNDDNSCVLLDKGVHIFQDGVAHDKSGERPAVQERTAARASRRHYFRRRLRKIELLKVLVENGLCPHLTDEQLKEWKEKKVYPLTDDFMRWQHSDNTEDGNPYHDRYAALARKLNLADIRDRYILGRALYHINQRRGFLSNRKESGRDSENGKVMTSISHLSEQMREAGCQYLGEFFYKLFRDGEKVRCRYTAREEHYRAEFDAICRKQGLEDMLKRSLERAIFYQRPLKSQKGTVGSCSFEKGKPRCPVSHPRYEEFRMAQFINSIRVGRPYENDFSCLSDDEKEAIRPLFFRKSKPDFEFEDIAKKIAGKGNYAFADDGRENQYRFNYRMSVSVSACPVTAAIINALDLDSPVDWEIVLCSVYTKGEGKTSDQILNDVWHALFSFDDESMLSSWLRSSLQLTEEKADALAKIRMPQGYASLSLKAINKILPCLKKGYIYSDAVFYANLPAALPPQISGAPVKMDDVIENVRVILDDFSKDPTSRESSKIKNISDYLLGLAEGVHPERLYHPSMIEAYQAVLPDEKGRLHLGSPRIDSVRNPMAMRALFRLRALLNSLLDEGVIDADTKVNIEFARELNDSNMRKAIADWQKEKENQRKKDSDEIRAIMGENYEPTEDDLLKYRLYEEQKHVCPYTGRQITPRLFLGNALEFDIEHTVPRSRGGDDSQANKTLCDSRFNREVKKAQLPSALEGHEQILQRIAEWKDTVESLEVQMSILRRKCKSASSKDEKDLAIRRLHYLRMKRDYWKGKYDRFTMTSVPEGFSNRQGVDIGIIGRYARMYLKTMFKRIYVVKGATTADFRKAWGLQGEYAKKERVSHSHHCIDAITIACIGKNEYDTWAQYMRKEEDYRFGKGTKPHFQKPWATFTEDVLTVSSSLLTSHYTPDNLPKLGKKKIRVRGAIQRNGDGEPMYAQGHTARALLHKDTFYGAIKKDEEIRYVIRKAVDSLDEKKDVPRIVDDAVREKVQEAIAIHGSLKKAVAETIWMNREKNVPIRKVRVYAPTITSPIALKAHRDQSDKEHKQKYYVANDSNYCMAIYGDEKPSFKLFNALAAVNHFNGKQGEWVETHDAKGRPLRCVVRPGTMVLFYEKSPKELYGCSQEDLSKRLYEVTGLSSMTIQGKYHYGTLTLKHHLEARPSTELKEKKGLWESGEALRPVIGINHNQTMFLVEGQDFVVSISGRIRFLMDRR

SEQ ID NO: 6339 - protein, 1215 aa, synthetic construct
  SITE 1153: note = misc_feature - Xaa can be any naturally occurring amino acid
  REGION 1..1215: note = Synthetic
  SITE 380: note = misc_feature - Xaa can be any naturally occurring amino acid
  SITE 271: note = misc_feature - Xaa can be any naturally occurring amino acid
  SITE 382: note = misc_feature - Xaa can be any naturally occurring amino acid
  REGION 311..312: note = misc_feature - Xaa can be any naturally occurring amino acid
  SITE 1209: note = misc_feature - Xaa can be any naturally occurring amino acid
  SITE 16: note = misc_feature - Xaa can be any naturally occurring amino acid
  SITE 1118: note = misc_feature - Xaa can be any naturally occurring amino acid
  SITE 395: note = misc_feature - Xaa can be any naturally occurring amino acid
  REGION 375..376: note = misc_feature - Xaa can be any naturally occurring amino acid
  SITE 321: note = misc_feature - Xaa can be any naturally occurring amino acid
  SITE 385: note = misc_feature - Xaa can be any naturally occurring amino acid
  SITE 135: note = misc_feature - Xaa can be any naturally occurring amino acid
  SITE 368: note = misc_feature - Xaa can be any naturally occurring amino acid
  REGION 1191..1192: note = misc_feature - Xaa can be any naturally occurring amino acid
  SITE 365: note = misc_feature - Xaa can be any naturally occurring amino acid
  SITE 1176: note = misc_feature - Xaa can be any naturally occurring amino acid
  SITE 218: note = misc_feature - Xaa can be any naturally occurring amino acid
MSQKTLGLDLGTNSIXWSIINHEEVPEEKITLLDYGVYIFPQGVLETKSGEEPAVKKRTEARASRRHYARRRLHKIQILKVLMDNDMCPRLTNEELATWRTKKQFPTNPEFREWLKTDDNIDKNPYHDRHEALSXTLDLSIREERYVLGRALYHLNQRRGFLSNRKDMSKDSEGVVKSGIDQLSREIDEAGMLYPGEYFYRLYQNRDKIRNRYQHRTXHVEEEFHAICEKQGLPEHTVVALHKAIFFQRPLKSQKGQIGRCTFERNKQRCXVSHPEFEEFRMLCFINNIKIKNPSDPAFRKITAEEREQIXXLFYRKSKPXFNFEDIAKKIAGKNNYTYGDSTSSLVQFNYAMDHQVCSSSVTSXLKXIFGDDYXXGIRXTXILXGAKSDAEIIXDIWHVLTSFDSDDLLIGWAEKNLGLTHDKSAKFAEIRMPQGYASLSLKAIHKIVPFLRQGLRYDQAVFLANIPAVLERWHERTEQEKTEVINGVCNVVDSFVSTDLTPNIQTAIRQYLEDMSDLNFGRLNKLYHPSKIDKYPEAELNEKGELLLGSPRTEAIRNPMAMRALFSLRHLINTLLREKKIDRSTRINIEFSRMLNDANMRHAIQRYQRELNKENESNLKELRNLYFEATKKVIEPTETDLLKFKLWKEQGKCCLYTGRQIGISQFIGSMPEFDIEHTIPRSLGGDNSQENKTLCEVRYNRSVKRNILPANLVDAEVILERIKKAGWDKEIRDLRARISRKTTSGFMTKEEKDKVISERHYLKLKLNYLLNKYRRFMMTEVPEGFTRRQGVDIGIIGKYAYHYLASLFKSENRQIFTVKGATTAEFRVMWGLQEEYKSKERNNHCHHAIDAIVIGCIGRDQYHKWAQYNRDMEGYELEGKPRPVFPKPWPTFTQDVKGIVDDLLVVHRNDDRRLRKSKRQLRKNGKIVRNSNNQPVYAQGDTARMRLHQDTFYGAIQNEGTIKYVIRKPLSALDAKDIPNIVDPVVRKVVQEAVDEKGLSALASPIYLNKQKGVEIKKVRLISSLKNPLQLKSHSHISKKEHKKNYYVANDTNFCMGVYEGMSDRGKMVRTFKVVNALEAVEKIKLRESILPLSDDNDYSLKYTLYPGLMVIFYEKXPKEIYEANDTELSKRLYKITGVNIQRVGKYQYGIXALKHHQNAQSSSELITKNGKWTXGESFRPGIAMNHSQXXALVEGVDFVISDTGKIXFLHPSI

SEQ ID NO: 6340 - protein, 551 aa, synthetic construct
  REGION 1..551: note = Synthetic
MNADMTKILGLDLGTASIGWALVERNDTGYALLDQGVDIFQEGVAREKNSEKPAVQDRTAARALRRHYARRRLRKIDLLRVLVRHDLCPALTDEQLKDWKQKKIYPLTDEFIRWQRTDDRTDKNPYRDRYKALTETLDLDTQRDRYTLGRALYHLAQRRGFLSNRKDAGDESESGKVRQNIEDLTVDMEKAGCAYLGEYFYRLYARKEKIRTKYTSRNEHYLAEFRAICEKQRLADDLRKALHRAIFYQRPLKSQKGSVGRCTFEKGKSRCPVSHPRFEEFRMLSFVNNIRITTPDDPEPRPLSRQETETILPLFRRRTKSHFDFEEIAKKLAGKGRYACQGDRSEAPYRFNFARTATVTGCPVTASLIALFGDDYLTKICDLYTLGAGKTREQILGDVWHALFSFDDEERLSAWAKQKLRLSDDEAGRFAAIRLLQDYAALSLHAINKILPYLREGYRYDEAVFVANLKAVLPPDIYSDESERSAIEADIAALITDFRRNPLNRGTTKEQCVRDYLRNCRGIDEKRLGRLYHPSMIEIYQTAQPDAQGIL

SEQ ID NO: 6341 - protein, 985 aa, synthetic construct
  REGION 1..985: note = Synthetic
MEKRLGIDVGTNSLGWAIVEVDDEGCTLLDRGVDIFQEGVAREKNQEKPAVQDRTDARALRRHYFRRRLRKIALLRVLVRHDLCPALSEEQLNAWQSKGIYPLDDAFIRWQRTDDNADRNPYRDRFRCLTEELDLACREERYVLGRALYHLCQRRGFLSNRKDAGNEAEEGKVKQEIKTLSADMAAAGCEYLGEYFYRLYQRKEKIRKHYTARNEHYLAEFRAICRKQRLDEELRQALEKAIFYQRPLKSQKGLVGKCTFEKDKSRCPVSHPRFEEFRMLQFINNVRVTGPGDAEPRPLSPEEVEIVRPLFLRKSKPHFDFEDIAKKIAGKGNYACRGELLQAPYRFNCAGKSTVTGSPVSALFASVFGDDWQREICSLYTLGAGKNEEQILNDVWHVLFAFEDEERLQAWLQEKLQLSADDAKTLAAFRLPQGYASLSLNVINKILPYLRRGYRYDEAVFFANLGKVLPAEVYADPARRREVEQGISAQMDDLGDGEKTRKEERIRDYLRRYWGVEEKRLERLYHPSMIEAYPSASPNGQGLLQLGSPRIPAVRNPMAMRALFRLRVLLNELLREGKIDRGTKINIELARELNDANKRKAIERYQREREAENRKYAEEIRQQYVEATGHSIEPSEEDILKYRLWVEQGHCSLYTGKTIGISEFLGDGRRYDIEHTVPRSRGGEDAQYNKTLCEEEFNRDIKRDKLPSELANHTAILACVESCGWFERIEGLEHRVWGADRRAKSATTKSAKDFAIQDRHYWRMHLDYWRRKCEAFTMTEVPEGFSNRQGVDVGIIGRYARLYLQTVFDRVYTVKGATTAAFRRMWGLQEEYAAKERVNHVHHCIDAITIACIGSREYALWAQYVRQDELYRRGKRINPVAASRGRPSPRMSGRRPMSCSFRITRPITCPSRAGNGCVCGERCSGTTGERSNTCRAILPGVLSINRHFMEPSNETARFGMSCASRSTNCCLRMWKKSWMRRSDRK

SEQ ID NO: 6342 - protein, 1207 aa, synthetic construct
  REGION 1..1207: note = Synthetic
MKRLGLDLGTNSIGWAIVNYKNGTYDLLDRGVNIFKDGVEHGKNGELPMVQKRTEARAMRRHYFRRRLRKIELLEVLVAHSLCPNIPQEALDLWKSKKKYPMLPAFIEWQRTNDEKDENPYHDRHRCLNEKLDLKKEGDRFCLGRALYHLNQRRGFISNRKEGTKESEGNVKAQISDLSEKMKTVNCNYIGEYFYQLYKTKGKIRTTYTSRIQHVRAEFDAICKKQGLTEDLRNALERAIFFQRPLKSQKGQVGNCTFEKGKKRCPASHPNFEKFRMLCLLNNIKVKTKAEDKMRPLTPDELAKITPKFFRKSKPNFDFEDLAKALVSKKEKYAYYKDDKNAETADILFNYRMDTNVSGCPVTASLMEIFGEDWENGICSLYVKGETKTPQDIINDVWHVLQTFDDDDKLKDWALRNLQLTDEQAQLFVKIRMPQDYASLSLNAINKMLPYLEAGYRYDQAVFLANLCDVLPKEVWQDHSMRTEIIGKINAIISNYDTDPISRLREGKTISKQQCIKEFLQSKYGVDERHADRLYHPSMIETYPAAKPNSQGQVTLGSPRLSALKNPMATRALFRLRHLINQLIIDGKIDSDTVVNIEFARELNDANMRKAIETFQNEKQKEHDRIVQEIKKLGLEPTENDILKYQLWDEQKHMCIYTGKEIGVTDFLGPNPKFDIEHTIPRSLDGDDSQKNKTLCDSKFNREVKIGKIPYELSNHTEILARIESMGWAEEIDRLEAAINIRKKKAKMATTKEEKDKAISERHYFKMKLDYWKGKLETFTIDCVSEDFTNRQGVNIGIIGKYARLYLKTVFNKIHVVKGATTADFRKAWGLQQDYEKKERVNHAHHCIDAITIACIGKREYDSWKQFTEDQEKYLRKEGKKPLFEKPWDTFTEDVKAVTNELLVHHYQPDNMGKNTKKKLRVHGIIQKGKDGKPIYQQGAGARRSLHLESFYGAIQREDGIKYVIRKSLASLAEKDIKNIVDDAVREKVEEAVKKYGIKDAVSGENTIWFNEAKQIPIKKVRLYATNITKPIHLKEQRDASPKEYKQMYHVASERNYCMALYEGLNAKKRLKREFELIKNYDAAKGYDIPSTKNTLPLKYILKQGTMVLFYEGTADELENLPKKELSKRLYKVIVMTTKSGSGYLSFLHHMEARSDKELKTIDFKLNGAWCNDDDYRPRMDMYSTAVNVLVEGYDFELTITGEIKFK

SEQ ID NO: 6343 - protein, 762 aa, synthetic construct
  REGION 1..762: note = Synthetic
MEKRLGIDVGTNSLGWAIVEVDDEGCTLLDRGVDIFQEGVAREKNQEKPAVQDRTDARALRRHYFRRRLRKIALLRVLVRHDLCPALSEEQLNAWQGKGIYPLDDAFIRWQRTDDNADRNPYRDRFRCLTEELDLACREERYVLGRALYHLCQRRGFLSNRKDAGNEAEEGKVKQEIKTLSADMAAAGCEYLGEYFYRLYQRKEKIRKHYTARNEHYLAEFRAICRKQRLDEELRQALEKAIFYQRPLKSQKGLVGKCTFEKDKSRCPVSHPRFEEFRMLQFINNVRVTGPGDAEPRPLSPEEVEIVRPLFLRKSKPHFDFEDIAKKIAGKGNYACRGELLQAPYRFNCAGKSTVTGSPVSALFASVFGDDWQREICSLYTLGAGKNEEQILNDVWHVLFAFEDEERLQAWLQEKLQLSADDAKTLAAFRLPQGYASLSLNVINKILPYLRRGYRYDEAVFFANLGKVLPAEVYADPARRREVEQGISAQMDDLGDGEKTRKEERIRDYLRRYWGVEEKRLERLYHPSMIEAYPSASPNGQGLLQLGSPRIPAVRNPMAMRALFRLRVLLNELLREGKIDRGTKINIELARELNDANKRKAIERYQREREAENRKYAEEIRQQYVEATGHSIEPSEEDILKYRLWVEQGHCSLYTGKTIGISEFLGDGRRYDIEHTVPRSRGGEDAQYNKTLCEEEFIPRYWPVSSRADGSSASRGWSIGSGGRTVAQRVRRPNRRRISPFRTGTTGGCTSITGAGSARPLP

SEQ ID NO: 6344 - protein, 745 aa, synthetic construct
  REGION 1..745: note = Synthetic
MKRVFGIDLGTNSIGWSIVEQLENGKYRHIKSGVDIFKDGVDHDKSGEHPCVQLRTNARGLRRHYFRRRLHKIELLKILIEERMCPPLTDEDLKRWRFKKIYPKEDNFMEWQRTNDNLEKNPYHDRYVALTRKLDLSIESDRYILGRAFYHLSQRRGFLSNRKDSTKEQEGEVKAAISELSDKIKEAGCSYLCEYFYKLYQAGDKIRGHYTARNEHYLKEFQAICDKQCLGADLCKRLNNAIFYQRPLKSQKGNIGRCTFELGKQRCSTSHPAYEEYRMLCFINNIRLHRQGEDSDFRVLTKEEVGAIIPKFVCKSQFKFEKLAKVLAHKKENYGFKYDSDESTLKFNYRKETSIAGSPVTAGLKEIFGEEWKSEICSVYMKSEGKTEDRIIDDVWHVLYSFDNDENIRDWAKKNLQLDDEQAEKFAKIKIERDYASLSLNAIRKILPYLRRGLRYDEAVFCANIPAALGNVEDVDEYRKIEDDVVACVRNFKSCEVAGRKNTLEKEVAELLEEKYGVDKRHLGKIYHPSKTETYPTAQPDNNGLRLLGSPRTASVRNPMAMRALFRLRALTNELLKKGEINSETVVNIEFARGLNDANMRKAIENYQREIADRHQKYAKEIKDCYLKETGKNIEPTENEILKYQLWEEQNHQCLYTGKMISVADFIGANPKFDIEHTLPRAAGGDDSQVNKTLCDSRFNREVKKAHLPSELANHAEILLKAKNLWQKKIYELTKQIEGGSYRVL

SEQ ID NO: 6345 - protein, 569 aa, synthetic construct
  REGION 1..569: note = Synthetic
MATKTLGIDLGTNSIGWAIVENQETSKRLLDRGVNIFQVGMKVEKNVESPTVSKRTEARASRRKYFRQRCRKIKLLEILVEQKMCPPLSDDDLKLWRTKKLFPLNEDFIEWIHTSDNDDRNPYHDRHRCLHQRLNLDDEADRFTLGRALYHLAQRRGFLSNRKDPGEGSDDKDSETGKVKKSISELSAEMNACGCEYLGDYFYRLYGTGTRIRNRYTARKEHYLAEFDQICRTQQLDDALVRRLNNAIFYQRPLKSQKGSVGHCTFEKGKPRCNLSHPAFEQFRMLQVLNNIRIRRPGDAEFRSLNAEERQSAEPLFYRKSKPKFEFAEIAAAIAGKKTPRAFRESANPDAVLFNYPDTFTVTGSPVTARIREAFGNDYMAALRRDCKIADGKSDSQLVNDLWHALYSFDDEDALQKWLTDNYGLSADAARKLAKPLPQGYASLSLNAISKILPWLLRGMRYDQAVFLANLKAVLPADLWNSPDDREAVVEDMERIVVEDARLIVHLAEHRDRLMQVEVALAFRLDALRREDQRLMAVELREVRALPHEALIAVRLGHDVLELPVLEVL

SEQ ID NO: 6346 - protein, 1219 aa, synthetic construct
  REGION 1..1219: note = Synthetic
MATILGLDLGTNSLGWAVVEETEHGYTLKEQGVDIFQEGVAREKNNEKPAVQDRTNARALRRQYFRRRLRKIDLLRVLVRYDLCPPLSGEQLTAWRKEKRYPLDEAFLQWQRTDDNADRNPYHDRYVALSEQLDLGNRQHRYLLGRALYHLAQRRGFISNRKEAGKEQEEGTVKSSIRSLTAEMEAAGCRYLGEYFYQLYQHKEKIRGKYTSRNEHYLAEFEAICERQQLPDEWRKALHRAIFFQRDLKSQKGAVGRCTFEPRKSRCPASHPRFEEFRMLQFINNIRITSPQDAAPRPLTQEEVEMIRPLFYRKSKPHFEFEEIARKIAGKGKYACREERIEAPYRFNFARTTTVSGCPITASLIAVFGSDWLREMCSLYLLGEGKNEEQVLNDVWHALFFFKDEECLRTWALEKLQLTAEQAKAFAAIRLPQDYAALSLNAINKILPYLRLGYRYDEAVFLANLKAVLPKEAYDNEERRHEIEHDIAELLLGYKRDLDDKYDSKEHRIANYFSDHGLDLSRFDRLYHPSMIETYRKAQPDAAGLLQLGSPRTPAVRNPMAMRALFRLRALVNRLLRDGKIDRNTKLRIEFARELNNANLRKAIEQYQREREAENRKFAEEIRSQYAAETGRTIDPTDDEVLKYRLWEEQQHVCPYTGRQIRISDFIGADPGFDIEHTIPRARGGDDSQMNKTLCENRYNRAVKRSRLPAELSDHAEIMARIESFGWQEKVESLQKQIDAQIRKSKAAATKAEKDGAIQRRHYLKLQQDYWRGKCERFTMTEVPEGFSNRQGVDIGIIGRYARLYLKTVFEHIHTVKGATTSDFRKIWGLQAEYEKKARVNHVHHCIDAITIACIGHREYLAWKRYAEEAERYQLGEGDRPDIEKPWPTFTEDVKAVADELLVSHHTADNMAKQTRKKLRVRGLVRLNDAGKPIYMQGDTARRKLHEETYYGAIERDGKIRYVVRKSLANLELTDVEKIVDPEVRLRIEEAVRTEGLETVKKADYTVWMNREKGIPIRKVRIFVRKTTLIPLDKQHRDQSDKEYKRKYLVSNEGNYCMAIYEGVDKKGKKKRTFEIVSNLEAARYFKASTDRNDRLDRVPLPDVNGYPLKCILKTGTMVLFYENTPVELYECSRKELVKRLYKVTAMAAEGRVQFLFHQEARDQKTISSIYGAGASQFSLSKPSPKLRLSVSSFNMLVEGYDFELTITGEIKFKHAMPC

SEQ ID NO: 6347 - protein, 1221 aa, synthetic construct
  REGION 1..1221: note = Synthetic
MAKVLGLDLGTNSLGWALVDESEQGYALLDKGVEIFQEGVAREKNNEKPAVQDRTNARTLRRHYFRRRLRKIELLKVLIRYDLCPPLTDGQLSTWRQKKQYPLDEEFLRWQRTDDNEDRNPYHDRYTALTRQLNLGERRQRWLLGRALYHLAQRRGFLSNRKEAGDDTEGKVKTDIKNLSDEMTAAGCSYLGEYFYELYQRKERIRGKYTSRNEHYLAEFDAICNRQQLPDECRKALHRAIFFQRDLKSQKGSVGRCTFEPTKSRCPVSHPRFEEFRMLSFINNIRVTGPDDNAPRPLTQEEVETIRPLFFRRSKNKVYFDFEKIAGKIAGKGRYACKEDRTEAPYRFNFAGTATVSGCPVTASLMAIFGDDWLREACSLYLLGEGKSEEQVLNDIWHALFSFNDEERLREWACKNLQLTTEQAKDFAAIRLPQDYAALSLNAINKILPYLRCGYRYDEAVFLANLQAALPKEVYADETRRREIERDIASLLLGYKRNPYDKFDSKERRIADYFSDHGLDMSRLDRLYHPSKIETYPDAKPNAEGILQLGSPRTSAIRNPMAMRALFRLRDLINILLREEKIDRDTKIRIEFARGLNDANRRKAIEQYQREREAENRKYAEEICRQYAAETGREITPSEDELLKYRLWEEQQHVCPYTGRQIRISDFIGANPGFDIEHTLPRAKGGDDSQMNKTLCENRFNRETKRAKLPAELSNHVEIMERIESFGWREKMESLQKQIEVQVRRSKSAATKSEKDGAIQRRHYLQMQLDYWRGKYERFTMTEIPEGFSNRQGVDIGIIGKYARLYLKTVFDRIYTVKGSTTAAFRKMWGLQEEYANKERVNHVHHCIDAITIACIGRREYDRWAQYVADEERFSYGESGKPRFEKPWPTFTEDVKAVADELLVAHHTPDNMAKQTRKKLRVRGQVKLNTDGKPIYQQGDTARCRLHQETFYGAIERNGDIRYVVRKALGQLQPGDIDKIVDDAVRDRVREAIDEVGFKTAINSDEYTIWMNREKGIPIRKVRIFTPNVTQPIALKKQRDLSDKEYKRDYHVANDGNYCMAIYEGHDKKGKPKRSFELVSNFEAAQYFKASADREARPDLVPLADANGFPLKCILKTGTIVLFYENSPAELYECTCKELTKRLYKVTAMAAEGRVQFLFHQEARNQKTLTALYGAGASQFCQSNPSPKLRLSVSNFNMLVEGYDFELTVTGEIKFKHGTPC

SEQ ID NO: 6348 - protein, 1471 aa, synthetic construct
  REGION 1..1471: note = Synthetic
MSEVKTPWKDYMGDVPMHLDYFQGSMFEAVERMAELYPNNIAFDFMGKSTTYKKMVQEIEKCAKSLKTLGVRPGDKVTIAMPNCPQAIYMFYAVNLVGGIANMIHPLSAEKEIEFYLNASESTTAITLDQFYDKFEHIRQNTGIINIIIASVKDALSRTIRAGYMLTEGRKIQKIPEDAPVIRWKEFMDMSRYCFYKNYRVERGYNDPAVILYSGGTTGTTKGIVLTNGNFNALGQQIIATNPMFRPGDRMLAAMPLFHGFGLGVCVHSMLSQGGRCILIPRFTAKSYAKQIVKYKCNFIAGVPTLYEALLRLPSMDGADLSSLKGVFSGGDSLSIELKKKFDKFLYDHHAVIQVREGYGTTETVTACCLTPTNIYKEGSIGLPFPDTYIKIVEPDTDKEVPYGTEGEILLAGPTVMKEYMNNPEETARTLRTHDDGLTWVYTGDLGTMDDQGFIYFKGRAKRMIITSGYNVYPGQLENILDAHEDVQMSCIIGVPDPYKMQKVKAFVMLKPGVPASEATKQTLLDYCRKHVAKYAMPYDIEFRKTLPTTLVGKVAYRELEAVRPLFLRKSKPHFDFEDIAKKIAGRNNYACKGDRTEAAWRFNFARGATVTGCPMSALLEAVFGNEWRRELCRLYTLGAGKSEERIIDDVWHALFAFEHEERLRQWLQEKLQISADDAKTLAAFRLPQGYASLSLNVINKILPYLRRGYRYDEAVFFANLGKVLPAEVYADPARRREVEQGISAQMDDLGDGEKTRKEERIRDYLRLYWGVEEERLDRLYHPSMIEAYPQAKPDANGILRLGSPRTAAVRNPMAMRALFRLRALINELLREGKIDRGTRINIEFSRKLNDANMRKAIERYQREREAENRKFAAKIREEYAAATGHTIEPTEEDLLKYRLWEEQNHIDLYSDTGRMIGIAEFLGAGRTYDIEHTVPRSRGGEDAQYNKTLCEERFNREVKRNKLPMELACGEEIWARIEALGWPELIDSLQGQIEGATRRVDNAVTKPEKDEAIQYRHYLKMRRDYWRRKCESFKITEVPEGFSNRQGVDIGIIGKYARQYLQTVFDRVYPVKGSATADFRTMWGLQEEHTRKERVNHVHHCIDAITIACIGKREYDRWARYVCQDERYRRGEADRPQPEKPWPTFTEDVRAVAEELLVSHHTPDNMPKQSRKRLRVRGRVQKNDKGETKYMQGDTARGALHEQTFYGAIEREGEIRYVVRKSLDQLLPTDVDKIVDETVKRKVQEAIEAFGFKEAMDPQKHTVWMNKDKNVPIRKVRILTGVKNPILLKPHRDVSVKEYKRYYHVVNDGNYCMAIYEGRDRQGRLKRTFEIVNKLEAARYFKRSADRESRPDLVPLSDVNGYSLKYLLKTGTMVLFYENSPDELYECSVGELAKRLYKVVGMAQDGRVQFLFHQEARDRKAVTAECGMGISVFDARHPAPKLRIRVSNFKMFVEGYDFELTVTGEVKFKR

SEQ ID NO: 6349 - protein, 1260 aa, synthetic construct
  REGION 1..1260: note = Synthetic
VVRCRNSYIANIVHFFENTKLFANFTEERSNTNYYMAKILGLDLGTNSIGWAITEQQDDNYTLLDKGVDIFQEGVARTKSGEEPMVKTRTDARALRRHSYRRRLRKIELLKVLIANDLCPYLDKEQLDNWRYKKQYPLNDEFMLWLRSSDSNNPYADRYKALTEQLNLSATADRYALGRALYHLSQRRGFLSNRKEEGGDDGAIKGAIKQLDEDMAAAGCGYLGEFYYKLFLAGEKIRTGDGYGYAGRITHYEKEFKAICEKQNLSEELQKALHRAIFFQRPLKSQKGLVGNCTFEKDKSRCPISHPSFEEFRMLCFINNIKIKTPADSELRMLNADEVRLIESLFYRKSKEHFDFEDIAKKLAGGKKNSYAHIADKVDAPYKFNYKMSQNVPGSPLTAALRNLFGEDWLSTMSSVYLKGEGKTESQILNDVWHVLFSFDDDDKLKEWAKTNLQLNDEQADAFADIKVKQGYTALSLNAINKILPYLRGGFRYDEAVFIANLPAVVPQEMWQNENTRNAIIKDICSLLNEFAENPLYRHLTKKQTIDNMLLDNYGISYNDSARLYEPSNIETYPQAQPNREGLLLLGSPRTSSVRNPMAMRTLFRLRALVNQLLKDGKIDKATKINIEFARGLNDANMRNAIERYQRENEKNRATYAADIAKLYKEQCGVDITPTEDDILKYQLWIEQNKLCLYTGESISICDFIGANPKYDIEHTVPRSRGGDNSQMNKTLCQADFNRRIKREKLPAELANHAEIMAHIEQLGWDKEIEKLEKQIYGCDRSVKSAATKESKDKAIRDRHYFRMRLSYLRGKLSRFTMTEVPEGFSNRQGVDIGIIGRYAKMYLETVFCRVYTVKGATTADFRKMWGLQEEYAKKERVNHIHHCIDAITIACIGSGAYAKWAQFQRDTERYYWHRENKPVFDKPWPTFTEDVKAIAYELLVSHHTANNLPKHSRKKLRIRGKVQFNAEGKPIYVQGDTARASLHQQTFYGAIKRDDEIKYVVRKPLDALQQSDVDKIVDEAVRACVKAAIEREGFKEAMSKPICFNEAKGVYIKKVRIYTPSVTSPIHLKKHQMLSRFDYKQNYYVANDGNYCMAIYEGVDAKGKTKRSFQIVNNLEAAKFYNGKTSRYDLVPQSDENDFPLKCILRTGTMVLFYEKSPEELYECSRAELAKRLYKVVKMMKDGRITFKYHQEARNDEQLKIDYEKMYGVKAPKSLTNGYSCVNFETPYPKLLLSTGNFNMYVEGYDFELTVTGEIKFKH

SEQ ID NO: 6350 - protein, 1220 aa, synthetic construct
  REGION 1..1220: note = Synthetic
MSKVLGLDLGTNSLGWAITEETASGYALLDKGVDIFQEGVAREKNNEKPAVQDRTDARALRRHYFRRRLRKIEVLKILIDNGLCPWLTDGQLTEWRKHKTYPLDEAFIRWQRTDDNADKNPYHDRYRALTETLDLNNESDRHTLGRAFYHLAQRRGFISNRKEAGKESEDGQVKQSIKNLTADMENAGCRYLGEYFHMLYLRKEKIRKKYTSRNEHYLAEFRAICDRQHLPEPLEQALYRAIFFQRPLKSQKGTVGKCTFEKQKSRCPGSHPHFEEFRMYSFINNIRIVTPKENDFRPLTQSEVETIVPLFLRKSKQHFDFEEIARKIAGKGRYACKGDRNEAPYRFNYARIATVSGCPVTASLISVFGDDWLPEICRRYTLASGKSEQQILNDVWHALFSFDDEERLRTWAREKLRLTDEQAAAFAAIRIPQEYVALSLNAIDKILPYLRAGYRYDEAVFIANLKAALPQEIAEDETRLQEIERDIVRLLLDYKRNPYDKYDSKERRIEAYFSDNGLDVSRLQRLYHPSMIESYRAQRPDSNGILQLGSPRTASVRNPMAMRALFRLRALVNRLLRDGKIDPTTKINIEFSRGLNDANKRKAIERYQREREAEHRQFADEIRKQYAAETGTEIEPTETDILKYRLWEEQKHVCPYTGRQICISDFIGSATGFDIEHTVPRSRGGDNSQMNKTLCENRFNREVKRAKLPSELSAHAEIMACIEWFGWQEEVEALQKMIEAQVRKSKGATTKTEKDNAIQRRHYLQMQLAYWRGKIERFTMAEVPDGFSNRQGVDIGIIGRYARLYLKTVFERIYTVKGATTAEFRKMWGLQAEYAQKERVNHVHHCIDAITIACIGRNEYDHWARYVGDEERYLRNEGVRPQFEKPWPTFTEDVKAIADELLISHHTPDNLPKQSRKRLRIRGKVQVNGQGKPIYMQGDTARGSLHQQTFYGAIKRNDEIKHVVRKSLDQLQPTDVEKIVDEAVKQKVKEAIDCVGFKTAMNPEEHTIWMNQEKAVPIRKVRIFTPSVTQPIHLKKQRDASEKTYKQDYLVTNDGNYCMAVYEGTDKRGKTRRSFEIVSNLEAAQYFKASADRTARPDLVPVTDTNGNPLKCLLRTGTMVLFYENSPEELHECSRKELAKRLYKVIAMSAEGRAQFLFHQEAREQKALKEICGSGASVFEAKCPAPKLRLSTSNFNMYVEGYDFDMTVTGEIEFKHGPSC

SEQ ID NO: 6351 - protein, 1030 aa, synthetic construct
  REGION 1..1030: note = Synthetic
VSVPRRIFLRTVPTQGTNPRQIHLAQRTLPGRVQCHLRPAAIARRKALHRAIFFQRDLKSQKGSVGRCTFEPTKSRCPVSHPRFEEFRMLSFVNNIRITGPGDNAPRPLTQEEFETIRSLFFRKSKPYFDFEEIARRIAGKGKYACKEERTEAPYRFNFARTATVSGCPVTASLQAIFGDDWITEIRSLYLLGAGKNEDQMLNDVWHALFSFNDEGRLRSWACEKLQLTDEQAKAFAAIKLPQDYAALSLNAIGKILVYLRCGYRYDEAVFLANLRAALPKEVYADESRRHEIEQDIVSLLLDYKRNPYNKFDSKEHRIADYFSDHGLDASRLMRLYHPSKIETYPDAQPKANGILQLGSPRTATIRNPMAMRALFRLRNLINTLLREGRIDRDTKIRIEFARGLNDANRRKAIEQYQREREVENRKYAEEIHSQYAAETGREIKPSDDEVLKYRLWEEQQHVCPYTGRQIRISDFVGSAPDFDIEHTLPQARGGDDSQMNKTLCENRFNRETKRAKLPAELSNHVEIMERIESFGWREKMESLQKQIEAQVRRSKSAAIKSEKDDAIQRRHYLQMQLDYWRGKYERFTMAEIPEGFSNRQGVDIGIIGKYARLYLKTVFDRIYTVKGSTTAAFRKMWGLQEEYARKERTNHVHHCIDAITIACIGRREYDRWAQYVADEERYGYGESGKPRFEKPWPTFTEDVKAAADELLVVHHTPDNMTKQTRRKLRVRGRIKLNADGEPIYQQGDTARCRLHQDTFYGAIKQDGEIRYVIRKSLAQLQPTDIDKIIDDAVRDRVREAIDKVGFKTAMNPDEYTIWMNREKGIPIRKVRIFTPSVKHPIALKKQRDLSAKEYKRDYHVVNEGNYCTVIYEGQDKKGKTKRTFELVSNLEAAQYFKASADREARPDLVPQTDTNGFPLKYILKTGTMVLFYENTPAELYECTRKELVKRLYKVTAMAAEGRVQFLFHQEARDQKTLTSLYGAGTSQFCQSNPSPKLRLSVSNFNMLVEGYDFELTVTGEIKFKDDRPC

SEQ ID NO: 6352 - protein, 818 aa, synthetic construct
  REGION 1..818: note = Synthetic
MRFMSKILGLDLGTNSIGWAITEQTDSGYTLLDKGVDIFQEGVAREKKSEKPAVQDRTDARALRRHYFRRRLRKIELLKVLIRHDLCPSLTEEQLGEWRKKKIYPLTEEFLLWQRTDDNTDKNPYRDRYRALTEELHLDSRRDRYVLGRALYHLAQRRGFISNRKEAGKEAEEGKVKKSIKDLTADIEAAGYHYLGEYFYQLYQQKDKIRKKYTSRKDHYLTEFHAICEKQRLPEELRKALEHAIFFQRPLKSQKGLVGKCTFEKTKSRCPASHPRFEEFRMFSFINTIRIQTPADSEPHPLSQEEVETIRPLFLRKSKPHFDFEEIARKIAGKGQYACKGDRIEAPYRFNYAAHTTVSGCPVTAALVSIFGDNYLTEICSLYTLGAGKSEKQMLNDVWHALFSFDDEEQLCAWAKEKLQLSDDDAKRFAAIRLPQDYAALSLNAIHKMLPYLRRGYRYDEAVFLANLGAVIASDIWHAPAQRDKIIEAVATTVAEYRPNPYDKNDSKENRIYACLRDCGIPNEAIKSEKLYHPSMIDVYQDAIPNGNGILQLGSPRTSAVRNPMAMRALFRLRILINKLLRDGKIDRTTKINIEFARGLNDANQRRAIEQYQRDREAEHKKYAEEIRRQYAAETGLDIEPTDDDLLKYRLWEEQNHICLYTGSQIRISDFIGDAARYDIEHTVPRSRGGDNSQMNKTLCENRFNRDVKKAKLPSELSVHTEILARIEALGWLEKIDSLQKQIEGQTRKSKSATTKPEKDNAIQHRHYLRMQLDYWRGKYERFILTEVPDGFSNRQGVDIGIIGKYARLYLKTVFERI

SEQ ID NO: 6353 - protein, 752 aa, synthetic construct
  REGION 1..752: note = Synthetic
VYQHKERIRDKYTSRNEHYLAEFNAICDRQQLPDEWRKALHRAIFFQRDLKSQKGSVGRCTFEPTKSRCPVSHPRFEEFRMLSFVNNIRITGPGDNAPRPLTQEEFETIRSLFFRKSKPYFDFEEIARRIAGKGKYACKEERTEAPYRFNFARTATVSGCPVTASLQAIFGDDWITEIRSLYLLGAGKNEDQMLNDVWHALFSFNDEGRLRSWACEKLQLTDEQAKAFAAIKLPQDYAALSLNAIGKILVYLRCGYRYDEAVFLANLRAALPKEVYADESRRHEIEQDIASLLLDYKRNPYNKFDSKEHRIADYFSDHGLDASRLIRLYHPSKIETYPDAQPKANGILQLGSPRTATIRNPMAMRALFRLRNLINTLLREGRIDRDTKIRIEFARGLNDANRRKAIEQYQREREVENRKYAEEIHSQYAAETGREIKPSDDEVLKYRLWEEQQHVCPYTGRQIRISDFVGSAPDFDIEHTLPQARGGDDSQMNKTLCENRFNRETKRAKLPAELSNHVEIMERIESFGWREKMESLQKQIEAQVRRSKSAAIKSEKDDAIQRRHYLQMQLDYWRGKYERFTMAEIPEGFSNRQGVDIGIIGKYARLYLKTVFDRIYTVKGSTTAAFRKMWGLQEEYARKERTNHVHHCIDAITIACIGRREYDRWAQYVADEERYGYGESGKPRFEKPWPTFTEDVKAAADELLVAHHTPDNMTKQTRKKLRVRGRVKLSADGKPIYQQGDTARCRLHLRRY

SEQ ID NO: 6354 - protein, 527 aa, synthetic construct
  REGION 1..527: note = Synthetic
VLSFVNNIRITGPGDNAPRPLTQEEFETIRSLFFRKSKPYFDFEEIARRIAGKGKYACKEERTEAPYRFNFARTATVSGCPVTASLQAIFGDDWITEIRSLYLLGAGKNEDQMLNDVWHALFSFNDEGRLRSWACEKLQLTDEQAKAFAAIKLPQDYAALSLNAIGKILVYLRCGYRYDEAVFLANLRAALPKEVYADESRRHEIEQDIASLLLDYKRNPYNKFDSKEHRIADYFSDHGLDASRLMRLYHPSKIETYPDAQPKANGILQLGSPRTATIRNPMAMRALFRLRNLINTLLREGRIDRDTKIRIEFARGLNDANRRKAIEQYQREREVENRKYAEEIHSQYAAETGREIKPSDDEVLKYRLWEEQQHVCPYTGRQIRISDFVGSAPDFDIEHTLPQARGGGDSQMNKTLCENRFNRETKRAKLPAELSNHVEIMERIESFGWREKMESLQKQIEAQVRRSKSAAIKSEKDDAIQRRHYLQMQLDYWRGKYERFTMAEIPKDSAIGRESTSASSANMHGSI

SEQ ID NO: 6355 - protein, 1128 aa, synthetic construct
  REGION 1..1128: note = Synthetic
MDDQLAGDFVLGIDLGSNSVGWALLRLANGKPCGIIRQGSRVFDAAYENYMQGEKEHTSNVNRRDALHRRRQSKRKRRRIVKVFHILQRFGLLPPTDDVPEPFRKSATWVESSDCNHRERRGDIRQDYFNWLDKTIRSSPWFVDRCRSRTYPEPDQTLPYILRAAACDEPLEPYFVGRALYHLAQRRGFLSNRVRPVKEDEEEGVVASEISELKERMRAENTETLGHFFAGRSPAGQPLEVNQRIRRNRTERRMYKDEFPRIWQEQEGHHADLLTEECKKQLHRAIFYQRGTRQRASAIGWCELEPGRRRARAHLLISQRYRLLQKVNDLRISRSGEPQRDLTREERGALIYELERRGDLKFSEVRDILSLKKSHRFNLQSGGESKMPGNRTASQLYKVFGDEWLSFSDELRQKIVGDVHSILSVRDEDDRKRRATLYLRKYGRESAAEDMAKSTLEGGHLGLSGAAMYKLMPFLERGVSYGHIAPDYRCLSDEIARQLLDKLDQGLSYQEARKGLLPDIAPTTEPLPMLPPARDVVRSLLNPVVMRVLTEMRKVVNAVIRRFGGKPLRIYIELARDLNKSKEQRETMAVEMRANEAARRKARGLIEELTGDPYPSREDIRKVQLFDAQSNGLCPYCLHHMGERSFLGSGTEVDHIIPRNCLLDDSFLNVVLCHTECNGAKGDQTPFQAFSGKPDLYAQMLKAVSKFSGKKGIIEEKLRRFKMDGEELEKFVADFSSRQLNDTRYASRAAAEYLGLLYGGKVGSDGKQHVFTTTGKYTSLLRNIWNLNSILKDGETNHGGWEEKKRADYRHHAIDALVIALTTKRRIDELMEAVRRAQNEGKRRPRLDDPWPGFLLEVRQRVNDIVVSHRVSTKVSGALHQENFYWARGEGRQPGLSIGERRIRKPVDRSMTRERAERIVDAGVRKAILEKLDEHGGDAKKFSDPKNLPSLGLRGELRTPIKSARIADTIKTFTFGEGDNARAVKPARNHHLEIYAETDSHGNEKRWKAKCVTMIEAYRRLRAHEPVVQQEHGSGTKFKFTIAPTEVLRCDGEQDGKALRGLFVVKSVSQEEKARSIKIEMVSVSDARPQPEIKKAHARITKSPNELFKWGAKKVVVSPLGEVSEAHG

SEQ ID NO: 6356 - protein, 1059 aa, synthetic construct
  REGION 1..1059: note = Synthetic
MLKKHYRLGIDMGSSSIGWAIILLDEDNEPCGVEKMGVRIFPDGREDKTPTPLSVKRRGFRGARRNHDRFLQRMRNLLDVLDKHGLLPKDQEERKSVFAQDPYRLRALALDQKLEISEFARTLFHLAKRRGFKSNRKTDDPDATTKFMTAIENLHDKLQQGNARTIGEYLYKKQTLSPNEHTKGAIRFRYDSKLYTEDELIFPHRDMVISEFELIWEAQSKYHPELINSLKEEIYHAIFYQRPLKPTVKGKCIFEPEEFRAPKAHPLFQEFRILQDVNNLLVEEIADQSYRPLTAEERSKIIDVLMNSKESKLSSLRNKLFGKNKEYYKFNYETNNRDKLLGNQTNCAFIKKKDSPLPKYWNSLSHEQQEFLVELLCSDLDEQDLSDSLTKICESSEIVEALLYMKLPTDFCNVSIKALKKIVPFLRQGYIYSDACSRAGYNHSEKWNGVVYHNADLPYYGELLKHSVLPLARPSYDLDADVHGKINNPTVHIALNQIRKIINALEKVYGPPAQIVIELARELKMNKTDKEEFDKRQRNQATANERIAKELKHFKIDNNYENRTRFKLWEELSNDPLERRCVYTGRIIPIEKLFSPEFEIEHILPKSRTFDDSIPNKTISYYAANRYKGEHSPYEAFGQSNDNYDWEAIVNRASTLPENKRRRFLKDSMERYSDEKEVLARMLNDTRYMSRVAKEYLQYVVGERNIWVVNGQQTSMLRGKWGLNRILNEDGSGTKNRADHRHHAIDAFVIGMMGHSTVNRLSTAVKQSRDRYLEKMADPYPGFDHKDLERKVHNIMVSYKPDQINPVKLRKRNQTAGPLLKDTAYGFVGPNPKNPQMYLYSERVAVTEIKLSDIERIIDPVIKELLKKQIASISDAKLLKTSLADWSKKTGIKKVKMLFNANPDTMIHVYDKSGKIYKCYASGENLFTDIYCIKPWDKSGKWSMEIVTSYNAHQLDFTPKWKQEYPMAKLIMRLFKNDVVCVDSEQGRQYRRVKKMSPGRVYLRDLNIAKRDKEERDDGESFSVSRLQTLNARKAGIDAIGRAFDPYVGDTNASTGDQS

SEQ ID NO: 6357 - protein, 1013 aa, synthetic construct
  REGION 1..1013: note = Synthetic
LSKQSETILGLDVGTNSIGWALLEVRGEQLLSIKNCGVRIFPEGITRDNKGKETPLNQERRLARSMRRQTQRKTGRMRHLLLTLQKNNLLPLGELHDLESPLAILMKEDPYILRKKALYESIELHLFGRALYHLAQRRGFLSNRKSISQGEAKEKSVMKVSFSQTRKAMEEMHALTYGEFLANLNSHEQRRRGQYILRQWIEDEYEKIWCRQSVYYPEILTPELKESIKKIIFYQRPLKLVNHLIGNCQLEPHRKRAPMAFPAAQYFRMLQMINDTQIQYEGQTRKLAQEERSKLIEKLLQKNLKFNDARKVLKLPKSSSFNMENGSRKDFLGVSTIPKFIKIFGDKWEALTPEDKSQVFEDWWSYTNEEALIKRMQEKWQLPLEKAEKFAKLELESGYSAFSRKALSKLIPLLEEGLSLQTSIIKIYGEKPSQIGVDKLLPAENVRNPIVQRSLSEIRKVVNDLIKKHGKPEIIRIELARDLKRNIAQRQEIFNKQEQRRKQREKIAHKITQEIEIQYPLRRDIEKALLYDECKGICPYTGKSISFCDLFGAHPLFDVEHIIPFSRCLDNSFNNKTLCFVDENRNIKENSTPWEIYGHDPENWQEIIQRVEKFGNFEKLRRFKLKDVFNGGDNSAWDEFASQQLNDTRYITRFATRYLSQLYYSDSKLHVQPIRSGRITAFLRNAWGLNNILGDGIKNRNDHRHHVIDAITIGLTTSSTIKDLSMASKRSFRSGSFDSDSFPKPCNDFFNTVKKSIDKIIVSHRVSHKINGPLHKEKMYGFIESDTHGEPVKAVIRKPIETLSINEVEKIVDPVVKKAVKEKLRESSYKEPSNAFAVKENHPLLFSKNGTQTPIHKVRVFQNDKPKTIGRKQNKRNVLTSNNHHLELYLSKSHRGKETFQGKVVTNLEMMQSLAKLKKRNSQQSLYPSHDENGNPLAMVLFKGDMVKVTWNKKDVICVIQSISKGDIEMRLHNDARPNKERKKERIRFRSFPSLYDANIKKIHISPTGFIHE

SEQ ID NO: 6358 - protein, 1012 aa, synthetic construct
  REGION 1..1012: note = Synthetic
LLIQTKTILGLDVGTNSIGWALLETQGEKLLSITDTGVRIFPEGVAKDNKGKETPLNQERRLARNMRRLTQRKAGRMKHLLLTLQENNLLPHGNLFDLEGSLAILMREDPYLLRKKALYEPLELHFLGRVIYHLAQHRGFLSNRKNTSKDEEEKGAMKTSFLQTEETMEEMHALTYGEFLANVNPHEQRRRGQYILRQWIENEYEEIWSRQCIYYPEILTPKLREHIKRIIFYQRPLKPVNHLIGNCQLESHRKRAPMAFPEAQILRMLQIVNDTLIQYKGQTRELTEQERSILIEKLLLKNLKFNDARKLLKLPKGSSFNMENGTQKYFLGVSTVPKFIKIFGDKWDTLSSQDRSQIFEDWWSYTNEEALIRRMQKKWELPLEKAQNFASLELESGYSAFSRKALSKLIPLLKKGFSLQTSITKVYGGKGYQIGTNKLLPAENIRNPIVQRALSEIRKVVNNLIKEYGKPEIIRIELARDLKQNTAQRQEIFKKQEQRRKQREKIAHKITQEIGIENPSGRYIEKALLHEECKGICPYTGKSISYNDLLGAHPLFDIEHIIPFSRCLDNSFNNKTLCFVDENRNKKKDHTPWEIYSHDVEKWQEIIQRVEKFGNFEKLRRFKLKDVFNGGDDSAWEEFTSQQLNDTRYITRFATRYLNQLYDSDGKKHVQPIKSGKITAFLRNAWGLNNILGNGIKNRNDHRHHAIDAIVIGLTSTSAIKSLSIASQKSFRPGSFNPDSFPQPCNNFLNKTKKSIDKIIVSHRGSYKINGTLHKEKMYGFIKSNTKDKTVNAVIRKPIEDLSTNEVEKIVDPVVKKAVEERLKELACKEPKKAFAAKENHPFLLSKDGSQTLIHKVRVFQNVNPKTIGQEKNKRNVLTSNNHHLELYLSKNNSGKETFQGKVATNLEMVQSLAKLKKYNSRQSLYPFHDEKGNPLAMVLFKGDMVKVTLNGKDVICVILSISNGDIEMRLHNDARINSDRKHERIRFRSYTTLYNANIKKLTVSPAGFIRE

SEQ ID NO: 6359 - protein, 1042 aa, synthetic construct
  REGION 1..1042: note = Synthetic
MFKGDLMGKKVFAFDMGKASIGYCAREDFEIKEANSIIIDKDHSDISSIRDRRRVKKTIIAHKAREQFFVNLWKSCNLTPIDTKDDNFKKEFANKKDSTIYTSCLLRIALLQNKKLEQWQIFKALYNAIQRRGYDANLAWKSAQTNDDKENIELTQKYTQENGIELIKNEKYKYPCYYDAKRLGLWDENFPNRFNQAINLDNVIKVRTTTYVAPRQLVEKELKQLWINAQIQIPELNKYSVEEFLYGEYKEAYGSYVNPEFKKYMGTAHDWQGVLGQKIPRFDNRIIAKCKLLPKRNVCKANTIENVTFVLLMKLKNLRITNNLGEKIILSPEEIKHIYENWLSKVEQNVIKMQEKCKKENKTPDKEDKKLDTTITKKEIENVINQVISDKIEPMKANISGRSSFCKRACQIMNKFILGGYLYPQEMDITEFIDSENSPNGITKQEIQVMLSRIGDWNNLYIPDNRGENINDSEKIRTNTDLIIGSITNPVIRNRLQIFRDLLLSLEKDYGKPDEVIFEFVREGADNSLFGKAKAQAAETNMKAMEKQNQQLVKELKNYDAYSSINFEKLKLLKMQCGQCAYSGQKIGISDFDKCEIDHIYPRTMGGNDALYNKVLCYRVENQKKQGRIPYEWLSSDKEKWANYVFRLNEIKKSLGKKKFELLTSKPEDCEKLIDSYNGLAETAHIAKVAQQIAAVCFSWGLQIEGEKRHIYVNNGSSTHAIRHRYGLNSLLGNDIKKNRDNDKHHALDAICISFSRDFKYDEESKKDIIKGFTREMVKKVIDEIMPVPYTNKKPFKGNTRPLETIYGLRAYNGKSYITQRVPLESIEPKEKKVRTIIDEVIKNDLLEKLNQKIDSKEWISMLQNYIHPKKKTIVKKVMIVVSEASIEKDSNGVERIGEFCDFGTKGTKHQFKHSKGHKGQILYFDEKGLVKVMPIYSNIRTQDIKDKLMTMGCKLYNKGEIFYSGCLVEIEKPFVATVYYKETDADGKEKTISVKQEVPYGIFKIRTIMGDGKIKLENNCGLEILSSAKVLVPLNMKKYKN

SEQ ID NO: 6360 - protein, 1036 aa, synthetic construct
  REGION 1..1036: note = Synthetic
MGKKVFAFDMGKTSIGFCVREALEIKEANSIIIDKEHSDISSIRERRRVKKNLEAHKAREAFFINLWKSCGLIPLDTKDENFKKEFATKHEDVIYTSCLLRIALLQNKKLEQWQIFKALYNAIQRRGYDTNLAWKSAQSDDDKENQELVKKYTQENGIEMIQNEEYKYPCYYDAKRLGLWNETTPKVCKRTLNNENLIKIRTTTYVAPRQLIEKELCNLWKNAQAQIPELNKYTVEEFLYGEYKEPYGSFVNPKFKQYMGTNHDWQGVLGQKIPRFDNRIIAKCKLLPKRNVCKANTIENVSLVLLMKLKNLRLTILDGSKRILAPAEIKHIYENWLSKVEQNVIKMQEKCKKENKTPDKEDKKLDTTITKKEIENVINQVISDKIEPLKANISGRSAFCKRACQIINKFILGGYLYPNEMDITEFIDSENRPNGITKAEIQNMLSKIGDWNNLFIPDNRGETIDNSENIRVKTDLMIGGITNPIVRNRLQIFRDLLLSLERDYGKPDEVIFEFVREGADNSLFGKAKAQAAETNMREMEKRNQQLIEELKNYDAYSSKNFEKLKLLKIQCGQCAYSGEKIGIGDFNKCEIDHIYPRAMGGNDALYNKVLCYRVENQKKQDRTPYEWLSSNKEQWANYVFRLNKIKQSLGKKKFELLTSKPEDCAKLIDSYNGLAETAYIARVAQQITAFCFGWGLQVEGEKRHIFVNNGSSTHAIRRRYGLNSLLGNDIKKNRDNDKHHALDAICISFSRDFKYDEKSKVDVIDGFTKEMVKKVLDEIIPYPYTNKKPFKGNIRPLETIYGLRTYGNNSYITQRIPLESIEQKDKKIKTIIDEAIKNDLLEKLTQKMDSKDWIKMLQNYVHPTKKTKVKKVMVVVSEGKIEKDSNGKERIGEFCDFGTKGTNHQFKHSKGHKGQILYFNEKGSVKVMPIYANIKTQDVKDKLLALGCKLYNKGEMFYSGCLIEVEKPFNATVYYKETDENGKDKTISVKQEVPAGIFKLRTIMSNGAIKLENNCGMEILSSAKVLVEANMKKYKN

SEQ ID NO: 6361 - protein, 1027 aa, synthetic construct
  REGION 1..1027: note = Synthetic
MVKKIFAFDMGKSSIGYCAREGLKVLELGSLIIDKDHAEIVSNRDRRRVFKTLNAHKAREKFFNDLWKSCNLEPLEKEDKLFKKEFGKKDEETIYNSTLLRIALLQNIELEEWQIYKALHSAIQRRGYDTSLAWANANTDDEKENKKRTLEYTTNKENDELISQEEYKYPCYYDAKRLGLWEEENPKTLKTYVDVYNNDKIRTAGIVAPRNMVEKELKQLYINAQKQLPELNKYSADYFLYGVSEKAYATYLDSDYKKYRGTNWEWENGGVLGQKIPRFDNRIIAKCKLLPKRNVCKAETVENVSLVLLMKLKNLRFTDVLGEKSMLSAEAIKQIYENWQKKATKNDGSIKLDTTITKQEIEKVIGEKILEKFEPMKAKLSGRSSFCRRACKIMCKIILEGIENPATMDVGEFIDNIDVKNGITEKEIRTMLSKIGTWDNLYIPDNRYEMAEISSDEREKTDILIGNITNAIVRNRLQIFRDKILELKYKHGTPDEVIFEFVRDDNSLFGAKKTQEYISNINKNQKENEEIAQQLKDANCFSSKNLEKLKLLQKQGGHCIYSGRPIAISNLEECEIDHIYPRSRGGNDALSNKVLCYAIENQNKKEQTPYEWLHNNEHSWNEFVKRVTNKQEALGKIKVKLLISKPEDSEKLIKSYNGLAETAQIARVAQDITAFVFGWGLQLEGEKRRIFVNNGATTSAIRKTYRLNKLLGNDVKKNRQNDKHHALDAICISFSRGYKYNATTKRDEIEGLDIHDNEFRDLVKSSIDSLLPYPYSNDKPFKGNIKPLETIYGYRKLGEKTYITQRVDITSIEQKDKKIKSIIDEIIKNDLLAKLEDKMTSKEWANMLSKYVHPTKKTRVKKVLLVVSEGITNFDENGRARIGEFVDFGTKGTKHQFKHSKGHKGQILYYNEKNAIKVMPIYANQKLGEVKDKLEQMNCKLYKKGMMFYSGCLIKVDKEFEGTAYYTIADENGKEKQTPKKEILPAGIYKLRTLKSDGRVQLESSVGIEIWTNAKNLVDTDFKKLTK

SEQ ID NO: 6362 - protein, 1022 aa, synthetic construct
  REGION 1..1022: note = Synthetic
MSKKVFAFDLGKASVGYCVREGFDIRKVGSIIIEKDHAEITTNRDRRRVKKTLEAHKAREQFFKKLWQNAGLETLDKEDERFKKEFGNKKDKNIYTSCLLRIALLQNKKLEQWQIYKALFNAFQRRGYDANLAWANAKTDDDKKNAEYMAKYTKENNVELINNDDFKFPCYYDAKRLGLWSEENPSELKTTIPLTGSKKVRTNGLVAPRELVEKELKQLWLNAQKQLPQLQNIDAEYFLYGDYRQAYGSYVVKEFRKFRGTKNDWQGVLGQKIPRFDNRIIAKCKLLPKRNVCKANTLENVSLVLLMKLKNLRLTDNMGEKFLLSPIDIKKIYENWLIKAKIDTNEEKLDTTITKKEIETVLNRKIKDKIDPMKANISGRSSFCRRACKIMTKIILSCELYPQNVDITEFVDKPNTQNPITIEEINTMISKIGDWNNLYIPDNRDEMAENSSDNREQTDTLIGNITNPIVRNRLQIFRDLILNLKQEYGTPNEVIFEFVRDGADNSLFGAKKANDTLKVMKENEKDNEQIVSELKDANALSSENILKLKLLKKQGLKCIYSGKSIAISNFDACEIDHIYPRSMGGNDALYNKVLCYSMENQKKAGRTPYEWLHKDEKTWFDFVNRLEAIKDTLGKKKYELLTSKPEDCKILIDSYNGLAETAQIARIAQQITALVFNWGLQVEGENRHIFVNNGSSTASIRRTYKLNKLLGDDVKKNRDNDKHHALDAICISFSRDYKYNKEKKVDEIEGLNPEIIKEVINNLMPYPYANDKTFKGNIKPLESIYGKRVKNGNTYLTKRADITSLEPKEKKINNILDDDIRKDLLNHINNKPTNQEWNELLANYTHPKKKTHVKKVLMIEAKGQIELDKNERERMGEYVDFGTKSVKNQFKHSKGHKGQILYFDPKNAVKVMPIYANKKTQDVKDKLIDMGCKLYNKGEMFYSGCLVEIPEDFEANVYSLIVDENGKEKKVSSKSIVSKGIFKLRTIMSNGGILIENNSGIEILTSINNLVYLHFRKYKNEK

SEQ ID NO: 6363 - protein, 1020 aa, synthetic construct
  REGION 1..1020: note = Synthetic
MVSKKGKKVFAFDLGKASIGYCVREGLEINEVKSLIIEAEHAEVVSQRTRRRIHKTINSHKKREEFLNKLWIEAGLKILERTDVRFKKEFPAKNEDVVYTSCLLRIALLQNKKMEEWQIYKALHGAIQHRGYDAKADWYNAKNKDEKDNVERAKNYTGGLIKNERYSYPCYYEACRLGLWLENEPNNLQKCVPLNGAQKVRTAGFVAPRELVEKELKQLWENAQKQLPQLRRFTAEYFMYGPSGIAYGAYKNNDFSSYNQIEGVLGQRIPKFNNRIIMKCKLLPKRNVCKAATIENISFVLLMKLKNLRLTISTGDKIILTAEQIKAIYENKLPIWRENLIKLRKDKKPTFSIGSSDIKKVLAEKVVDEIEPLKANIGGRSSFCRTACRIMNKIILAGIDKPGQDLDISEFIDDPKSPNPITDREIKTMLAKIGSWHNLYVPDNRNELQEQASDAREKTDLLIGNITNPIVRNRLQILRDLLLDLKKKYGEPDEMVFEFIRSGIDNSLLASKIAKETEAYQKKQEKCNEELVQKLKRVDAFSGKNLEKLKLLELQNGECVYSGKKIGISDFDRCEIDHIFPRSRGGNDALYNKVLCCKEENQIKKERTPYEWLHTDPERWSIYVARISKLRDKLGKKKFNLLISTPEECAKTIEKYNALAETGQIARAAQSIAAFVFSWGLQTAGDNRRIFVSNGANTAAIRRTYGLNKLLGDDVKKNRANDKHHALDAICISFSRDYKYDAAKRTDEIQNVERGLFKKIVAEAIGNLIPYPYTNDKPFKGNFAPREMIYGKRVGTDGKIYLVKRDVLESVKRDEKSIAYIWDREIRGDLLAKWQSYTNAEWAELLKNYRHPKKQTIVKKVLFIEKADAQVEYDTNGRERIEEFVDFGNKGVHGQFKHSKGQTGRILYYDIQGKIKVWTIYSNQNKQEAKEKMNQQGFKLYRNGEMFYPGCLVYIPQEFRVGKNDYQPGIYKFVRVENSKKGLILLEDNNGLPILTNVGYLAGVNFRRINRTELETIARK

SEQ ID NO: 6364 - protein, 1000 aa, synthetic construct
  REGION 1..1000: note = Synthetic
MAKKVFAFDLGKASIGYCVREGHDIKEANSIIIDKDHAERVSSRDRRRIKRTLDAHKAREQYFDKIWQECGQEVLDKKDKRFTKEFGGKSDDTIYTSCLLRIALLQEKPLEKWQIYKAIHNAIQRRGYDPNVAWATKSEDDEDNLKLIEKYTKENDVELIQSDKYKFPCYYDAVRLGLWAEDKPQELKTYIRIGNSGKVRTTDYVAPRQLIENELQLLWQNAQKQIPELKKISAEEFLYGEYREAYGSLVNPDYRKFMGTERDWQGVLGQKIPRFDNRIISKCKLLPKRNVCKADTIENVTFVLLMKLKNLRFTDVSGEKVKLSPDEISAIYEKWQKKVKEKDGRLDVTIIKKDIEEVTGKKIIDKIEPMKANISGRSSFCRRACQIMNKIILTGELYPTEMDISEFVDDKNAVNGITEEEIKTMLSKVGDWNNLYISDNREENAKNASSSRIKTDIMIGNITNPIVRNRLQIFRDLIIDLANQYGKPDEVIFEFVREGADNSLFGKVKASKAEAYMKSQEKENDQIKKELEDADALNGKYFLMHKLLKMQGGSCAYSGQKIGITDFPKCEIDHIYPRTMGGNDALYNKVVCLREQNQLKKGRTPYEWLSSDEQKWADYVNRLNKIKGSLGQKKYELLTSKPEDCAKLIESYNGLAETSHIARVAQQMTAFIFGWGLQVEGEKRHIFVNNGASTFAIRKRYGLNSFLGDDEKKNRSNDKHHALDAICISYSRDFKYDKETDKDIIDGFNPLKVKEVIDSIMPYPYANKKPFKGNTKPLETIYGLRQKGGKNYITNRVEITSIDQKESKIKNIIDETIKNDLLSKLEEKMSAKEWTNMLENYIHPKRKTHIKKVMLVVSEGELEKDSNGRERIGEFVDFGTKGTKNQFKHSKGQKGRILYYDSKNNIKVMTIYSNQKNTDVNDILENMGCKLYRKGEIYYSGCLINVCDDFIGGKNTFKKGLYKIRSINGAGVAWLIDNSGVEVLTNVKYLVQAKFSKYNG

SEQ ID NO: 6365 - protein, 1004 aa, synthetic construct
  REGION 1..1004: note = Synthetic
MSKKVFAFDMGKASIGYCAREDNEIKEANSIIIDREHSDISSLRDRRRVKKTLDAHKAREKFFIKVWTDCGLVPLDTNSAEFKKEFSAKNDQTIYTSCLLRIVLLQNKKLEQWQIFKALYNAIQRRGYDPNLAWKSAQSEDDKENLELIQKYTQENDIELIANDDYKYPCYYDAIRLGLWCENKPDEFERTVNQQSLIKVRTTSYVAPRQLIEKELKQLWINAQKQLSELNKYSVEEFLYGEYEEAYGSYVNPDYKKYMGTEHDWQGVLGQKIPRFDNRIIAKCKLLPKRNVCKANTLENVSFVLLMKLKNLRLTMLNGRKKKLDPSEIKKIYDNWLQESNNGKILTTTITKTKIEKVLGEKISAETKTLNDDLKVNISGRSSFCKRACKIMNKFILSGELYPLDMDITEFLDPEDCPNRITEEEIRSMLSKIGDWNKLYIPDNRGENISDEELTRVKTDLMIGDITNPIVRNRLQIFRDLLLYLEKKYGKPDEVIFEFVREGADNSLFGRAKAQAAETNMKIMEKNNQLIVNELNAADAYSAVNFEKLKLLKMQAGRCVYSGDNICVEDFDKCEIDHIFPRTMGGNDALYNKVLCFRVENQDKRGRTPYEWLSSDEDKWANYVKRLNDIKGSLGKKKFELLTSKPEDCAKLIESYNGLAETSHIARVAQQITAFVFGWGLQVEGEKRHIFVNNGSSTHAIRKRYGLNSLLGNDTKKNRDNDKHHALDAICISYSRDFKYDEKSKKDIIKGFTREMVKKVIEEIIPYPYTNKKPFKGNVRPLETIYGLRTYGDKSYITQRVSLEDIEQKDKKIKSIVDEVIKNDLMEKLSQKMDSKDWVNMLQNYIHPKKKTRVKKVMIVVSEGEIEKDNNDRERIGRYCDFGTKGTKHQFKRSKGHKGQILYFNEKGAVKIMPVYANIKTQDIKDKLLALGCKLYRNGEMFYSGCLIDILNEFNVGNITYPPGTYKLRTIEEVGTTKIETNNGIELRFNIKNLVRANFKRNWS

SEQ ID NO: 6366 - protein, 1028 aa, synthetic construct
  REGION 1..1028: note = Synthetic
MNKKVFAFDLGKASIGYCVREDLKILEAGSLIINKDHAECISNRDRRRVQKTLLAHKKRESFFNNLWQNCDLNILNKDDKRFSTEFGKKNDSTIYNSTLLRIALIQNKPLEEWQIYKALHNAIQRRGYDSKLPWANAKSDDDKKNEELSARYTQNEQGEELIKNENFKYPCYYDAVRLSLWSENMPEKLQTYVPLDNVKKIRDAGIVAPRNLVEKELKQLYINAQLQLPQLNKYSVEYFLYGEGEVAYASYNKKDYKCHRGTEWDMQGVLGQKIPRFDNRIIAKCKLLPKRNVCKANTLENVSFVLLMKLKNLRYTNINNEYSMLSADTINKIYQNWLNKALKDDGSYKLDTTIIQKEVEKVLGEKIQDKFEPLKANISGRSSFCRRACKIMNHIILNGIEDPTTMDVAEFTDNIDTPNGITEAEIRTMLSKIGTWENLYIPDNRYEMAELSSDNREKTDILIGNITNPIVRNRLQVFRDKLIELKQKYETPDKIIFEFIRDGADNSLYGAKKAQDFLKTIKENEKTNNDLAIELKNADCFSVVNLEKLKLLKQQDGICIYCGQRIGISDLDKCEIDHIYPRSRGGNDAISNKVLCYSIENQKKKDRTPYEWLHNDERTWADFVNRAKLLKDKLKKTKYTLLTSKPENCEELIKSYNGLAETAQIARVAQDITAFIFGWGLQLKDEKRRIFVNNGASTSGIRKTYRLNKLLGNDVKKNRNNDKHHALDAICISFSQNYKYNKHTKRDEIEGLDIHDNEFRELIKQTLDAIIPYPYTNDKPFKGNTKPLETIYGYRCIDNKHYITQRVSLETIEQKDKKIKCIVDEVIKNDLLEKIKEKMPTKDWTTMLQNYIHPTKQTKVKKILVIVSEGELTKDSNAHSRIGEYADFGTKGTKHQFKHSKGHKGQILYYNEKGVIKVLPIYANQKDSDVKSYIEQNGCKLYKKGMKFYSGCLIQINKDFEATAYYTQTDENGNDKQIPTKEKLQAGVYKLRTMMIDGKVKLESSTGIELLTNAKVLVEADFSKFSKY

SEQ ID NO: 6367 - protein, 1028 aa, synthetic construct
  REGION 1..1028: note = Synthetic
MRAFMLLCIKIKGVIMGKRVYAFDLGKASIGFCAREDFNILELGSLIVDKDHAEVISNRDRRRVYKTLYAHKNREDFFNKLWSDCGLNILEKDDKKFTTEFSKPNDNTIYNSALLRIALLQDKQLEEWQIYKALHNAIQRRGYDADIAWANASSADEKDNIERVSRYTQDDKGIEIIKNEKFKYPCYYDALSLSLWEENNPAEYKKHLPLADITKVRTKGLVAPRAFVEKELTELFFKAQKQLPQLNKYSVEYFLYGQYGSAYATFRKPEQGKEKDYGVLGQKIPRFDNRIIAKCKLLPKRNVCKANTKENVSFTLLMKLKNLRFTDSLGNKCMLDSEAIKEIFNNWLIKANKNDILKLDTTITKKEIENVIGCKIQDKIEPLKANISGRSSFCRRACQIMNKIILEGIQNPATMDVAEFTDDINSDNGITEAEIREMLSKIGTWDNLYIPDNRYEMAELSSDDRQKTDFLIGKITNPIVRNRLQILRDKLLELKDKHGIPDSIIFEFIRDGADNSLYGAKKANDYLKNTKENEKENLEIKKELEDANAYSPSNFEKLKLLRMQGGACIYSGNKIGIGNFDECDIDHIFPRAKGGNDALYNRVLCYSKLNREKGDRTPYEWLSSDREEWAKYLLHLNDLKSSLGKKKFELLTCKPQDCEKLIESYNGLVETAQIAKVAQQLAAFIFGWGLQTEGDKRHLFVNNGSTTAAIRRRYGLNKILGNDIKKNRENDKHHALDAICISFSQDFKYDPKSKKDVIQDFTYDFVKNAIDKLIPYPYSNDKPFKGNTRPLETIYGYREYGEKKYITNKIDISTLEQKEKKIKTIIDETIKNDLLNKMNLSKEDWKNMLQNYIHPKKQTHVNKVMVIVSEGKLDFDKNGRARMNEYVDFGTKGVKNQFKHSKGHKGQILYYNEKGAIKVMPIYANQKTLDVKLKLLDMGCNLYKKGIIFSSGCLVEIPNDFEANVYYHLADNDGKDKLVPTKEKVNNGIFKIRTIMSDGKVKLENNNGIEILTNAATLVNANFHKYKI

SEQ ID NO: 6368 - protein, 1017 aa, synthetic construct
  REGION 1..1017: note = Synthetic
MAKKVFAFDLGKASIGYCVREGHDIKEANSIIIDKDHAEKVSFRERRRIKKTLDAHKAREEYLDKLWKDCGQEVLDKKDKRFTKEFGGKNDNIIYTSCLLRIALLQNKPLEKWQIYKALHNAIQRRGYDPNVKWATKSADEEDNIKNIEKYTQENGIELIKSDDYKYPCYYDAIRLGLWSENKHDELKTYIPLTNNNKVRATDYVAPRLLVENELTKLWENAQSQISELKKYSVEEFLYGEYREAYGSLVNPDYRQYMGTPNDWQGVLGQKIPRFDNRIISKCKLLPKRNVCKANTIENVTFVLLMKLKNLRFTDVSGEKLRLSPNEIKQIYENWLEKVEKNVEKAKEKTLEFNKADNKLDTTITKKEIENVIERKIIDKIEPMKANISGRSSFCRRACQIMNKIILTGELYPAQMDISEFVDSPDAINGITEEEIKTMLSRVGDWNNLYIPDNRDENAKMASNSRIKTDIMIGNITNPIVRNRLQIFRDLIMDLAEKYGKPDEVIFEFVRDGADNSLFGKVKASKAEAYMKLQEKENEQIKKELEDADALNGKYFLMHKLLKMQGGKCIYSGEKIGISDFPNCEIDHIYPRTMGGNDALYNKVVCFRSQNQLKEGRTPYEWLSHDEEQWANYVNRLNKIKGSLGQKKYELLTSKPEDCEKLIESYNGLAETSHIARVAQQMTAFIFGWGLQVEGEHRHIFVNNGASTFAIRKRYGLNSFLGDDAKKNRDNDKHHALDAICISYSRDFKYNKELDKDVIDGFNPIKVKEVIDSIMPYPYANKKPFKGNTRPDATIYGIRQIGGKNYITNRVDLIKIDQKESKIKNIIDETIKSDLLSKLEDKMSVNEWKTMLENYVHPKKKTRVKKVMLIVSEGKLEKDSNGRERIGEFVDFANYKKGHTRHQFKHSKGHKGQILYYNEKGSVKVMPVYSNKKTQEVKDKLEQMGCKLYNRGEMYYSGCLINVPNEFFAGKVTCPAGIYKVRTITEAGQIKLENNTGNEILSSAVNLSNAKFSKYKD

SEQ ID NO: 6369 - protein, 1375 aa, synthetic construct
  REGION 1..1375: note = Synthetic
MTKIVGIDVGTNSLGITVRDTDNPQGEQIIYSTVHQFKSGIIKENNKEFSLATQRTKAKGPRHLNKVHRYRKWATLKMLIEHNCCPLTNEELSHWSHYDKAQGRRTYPTDIQQFNNWIKLDFNSDGKPDFISPYELRAWLATTPDIDFSLPQNRYKLGRAIYHIAQRRGFKSSKGETLAEKADQSEANIDLKESEKARSGKLDEFMKDTYPTVGCALFELSKTQRVRASEYQAVRSQYKDEIRYIFDYQKALHQEKDFLETILSEKKSDGTIFYKCPLKSQKGTIGKCTLEPNKPRCPQSRPEFELFTAWSFINTIRFGNECATELTLEQKNRLYNEKFIRASDFDFKTIRKWIEKEYDTELLYSKNPSERTVNYSDDTKVEACQVTSRLKDLLGNDWQQWQYQPQKQHTTGNSKENRHPITYTWEDVWHVCFNADDEEPLKRFANDAHLDITLLKRLFNTMSIGYASLSLKAIRNINRFLLKGMLYNDACLFAKLPDILGDKWNENLIDDVKAVLSNTRDEKTIIHIVNALISSYKAEEKPWAFHDPTYKLQASDFDDVQSFSIAEIGDYTWNGMTTKEQEDVITRVASLYQQFFADKDRKYFKVTSIEDRLKHYLAERYPEIPSNKLSKIYHHSKIQFYRPAQEHRIIKGDAVLSLKLLGSPVLSSLRNPMALRVLHTLRNDINDLLYNGTIEEEDTRIVVEVARELNDANMRWAINEYDKRRRDENTFFASLLEDYVVTDEAIAKVRMLAEQSPDLLTHAEKQQIRTYNEYMSNLMKRYKLWNEQKGFCIYTGKPITLTEVLSGNGVDIEHTLPASQSFDDSLANKTLCKSFFNRNIKCNRLPSQLDNYDEILRNIQPWIEKVNRLKDNIRFWRYRSKKALDKDSKDYAIRQRHLWEMEYEYWNKKVNAFRMKEIKQGFRNNQLADTSTIAKYATLFLKSLFTSVDVEKGTVTAAFRNIMQVPQKKRDNNSHHAVDALVLTYIPKAAQREKLLKLYYERQELENVGHDASHIIKEIEREKRLCGLDVNINPTISFLRSTVISRYSSHEQIITPAKRRMRSAGKIVPRLDSNGNKIYETDKNGELRLNKYGNKIPQARFISGGDSIRGKLFEDNFYGKIIIDGEEKTVIRRGGGIIKFEEKHIKDIIDKDIREAIQKLTDEKGFEQAKKEGFYIIWSTGKRTPIRHVRCQIKTAVVPVKPHAYVSDKEYKRYAYAENGKVVLYALYSDGKARAHRCVTLQEVAIANRQSKLNRIEELLPTSVTEKKKTLPLAFVLHRGDLVILKDADEPLSSLSESEISKRLYRFCALHDTDRGRLIIQHHLYSQSGDDKAKANSTYKVGDAQPLLLVSKEKQNFWIEHVDFKIEKGKIFPIK

SEQ ID NO: 6370 - protein, 1367 aa, synthetic construct
  REGION 1..1367: note = Synthetic
MKFKHVLGLDIGTNSLGWFLIKEFEDGTIEMVKSGVHVFPIGTIVDDKSNKETTKNEQRRKYRGASRLRYRFKLRRKNLKDILERLGMLPDYSKLFKPLSSEEKEQIQNHERGQSYLLYKLRSEAINSKIPLDEIGRIFMLLNKYRGFKSNRKNQKEDKETGEVKKGIANLQKLIDESGARTIGEYFFKMHEKAKEWYDENKWHNPNEPVDERALNKETGEFVLFNSNGIRRHHGRYTLRDMYLHEFDLIWKAQKEAYKEEKPEIFTGSKEEYDAILSLPHTERIKALKEFRKTNYWHIREYCIYYQRPLKSQKKFVSTCQFERGEYYVMNEKVIGGDTEKIVQKRKWKKKSKKACPKSHPLFQEFRIWQKLHQICYSSSSEEVYNKPLKTGWFPVIADYLMQNKELNLSKPGKNSQEDVQWMSKLLYQNGLVENHEGYTFFIDKADEDVDGDDKNVNKIAGNITYSSFKEALGEETFTQFLNEKITRIENINKETESQVEENRLFLLWNVLHQAKDGLFKEDVWLLSILTDKWKLKVEQASALIEKGLQPDYGSYSSKVLKAILPFMRKGLNEYEALKAAGRGYVNYDNTVGLKVQIKEKISQLAYQELRNPVVERALSKTIKLVNAVLEKYRHEINRETFEIRIESTRALRKPRQERESERRKNAEKDKLREQYAAFLTKNKDKLGFKRDIYKYNSIVAKYELWLQMNMNEDDEVFISGFKAFSKIIKQEDRLKHKLWLECGRRCPYTGAVINFTDCFSPEVEIEHIIPLSRSLDDSFNNKTLTYRATNVLKGSKTPLEFISKLGKEKLKEFRSRMNSKYHGFADSKLMLFLADDIKSVQEFSNSQLSNTSYIARYAVKKMQEICKNVQFTNGAATFQLRSYDWSLSALLDKIRYEEETGVNIDEFYKEYNGIKRDFLNWYSKKVESSDFRRVDALNSDIDKATYLQETNNDLTYWEKEIKAFEEFRNKSGKKDRSDHRHHAVDAFITSCCSPAIVKLMSTYNAVREENDLQNRDKILRRFDYEQLKQFISNILVSHSEKQALIKKRKNRIKTKSGIIEDVTYAPQGSLHKETFYGKLKQPQNQGFSKRNVYVSRSPLLSKNGSTEAYLFESKEAIERDVYEPSKKQVLRNRLDVIAGLEDEKGNKLKPFSEKAMRLFPLYTPTANEDKTKSRKGKSLPVIKSVRTRYQNARSVVEISARKYADKGGNFLMVFYEKEQFDKKGKRRKPVKDFRLLSFWDATKSKRQNEKLFSDEIEDLTLCKHCQWLKKGDLIFLGDKEDEFEKVDWSDTLMISSKLYRINELGYNPTGEGYAVIKVEPHKKMKTSKDKYAANGKFLKLSESLNGIKVRLNILGEIEAKGEECFE

SEQ ID NO: 6371 - protein, 1374 aa, synthetic construct
  REGION 1..1374: note = Synthetic
MKFKFVLGLDVGTNSLGWSLIKEFEDGSVEIIKTGVHIFPIGTIVDDVSNKEKTRNEQRRGYRGASRMRYRFKLRREKLKLILEKLNMLPDYSFFHKAKGSGQSYELYKLRADAVNPNKKIPLKEIGRIFMLLNKYRGFKSNAIKLQQDDAEAGEVKAGYESLQNLIDKSGATTIGEYFFKMHELGQKWYEENKWHNPNEPIDERAFNENNEFVLFNSNGIRRHHGRYTLRDMYLSEFDKIWDNQKKYYLNIFTGSKREYDEICLLPYQKRIEELKKFKNTNFWHIRNYCIYYQRSLKSQKKFVNNCQFERGKFTANKIKYSEGNIEKTKESKTWFKKAKKVCPKSHPYFQEFRIWQKLHQIRYSSVAEDIYRLPLKIEWIQVLAQELNENFELFLNKTGKVKNDNKIWFGKILREKGLIPNDEDYSFFIDKSDENLENDEKNENRISGNITYASFLKILGRTKFENIKNQTIIRKEQSNKNDYIEINESKLLTLWHHLYIAKDDLFQQDEWLRCILTEKTKWDLSLEQANGLIETGLQPDYCSYSSKVLKAILPEMRKGLNEYEALKATKKGYINEDNTVGQHVQLKTKVTQLKYQELRNPVVERSLSKTIKIVNAIVEKYQNEIDFVKFEIRIESTRQLRKPRKERENERFNNSVKDKLREQYAEYLTLNKERLGFNKDIYKNDPIIRKYELWLEMNMNETDEFFKSEFKAFSRITKKDDRLKHQLWLECGRICPYTGKTISFSKCFSSDIEIEHIIPLSRSLDNSFKNKTLTFQNINAEKGQLTSLEYMQKLGGDSLKNFKQRIKSKNNSFADSKIKQFFAEKVDDGFLESQLSNTSYIAKYTRTKMQEICRNVQFTNGSATFELRNNDWGLSTLLDKIRYEEAFGIDIDNIYHNLYQIKKDFRSWHYRRYQTTDIRINWQNAKEEPDFVDYHSETGNDTLYFMTEIEQFDQFRNKDGKKDRTDHRHHAIDAFITACCSTKIIKELSEYNANKEIMHLEFRDKIRRCFSYDDLKNNIRTILVSHSEKQTLIKKRINKIKTSSGVKEQITFAPQGKLHEESFYAKHNDATVRRVELFDNKRKDKVLFDKINDLDYNVKGILKWNYIEDKSLYDITKRRILKLQSKAFSKDEMEKNPFYRVSNKNPETIISKKGKPLPIVKSVRKRFNIDKSLINLPVKDENKKILSTNRYAGNVSNAILILYESINKDKKSQPKKAVRHFEIISFFDFVSKKNPFSKLNYDDGKLFLDEKNEVGLKKDCHWLKIGDIVLLYIDEDDKQSLDWTNNELIKDRLYIVKGLSSSPVISKGKIYEYGYVNLLKTRISKPGSYNSEKDINKCIKLNSFMLSHKKLNAIKLKLNILGEIEKIGEDCFI

SEQ ID NO: 6372 - protein, 1361 aa, synthetic construct
  REGION 1..1361: note = Synthetic
MKFKHIIGLDIGTNSLGWSFIKEYETGKVEIIKSGVHIFPIGTIVDEKSNKEKTKNEQRRGYRGANRLRYRFKLRRKNLKNRLALLGMLPDYEKLYKPFSKQGKREKINYERGQSYQTYKLRADAINPKIKIPLEEIGRIFMLLNKYRGFKSNAKNIIEKDKETGEVKKDIESLQKFILDCGAKTIGEYFFKMHEKAKQLYDANKWHNFNEPIDERAYNDISKELVLFNSNGIRRHHGRYTLREMYLLEFDKIWEAQKNHYPEILTGSKKEYDEILSLPYSERILALKKFKDTNYWHIREYCIYYQRPLKSQKKFVSNCQFERGKFEIIKHSVIENDLEKIKEKRIWKKKAKKTCPKSHPLFQEFRIWQKLHQINYSSNELDVFNKPLETNWILVLAEVLMQNFKVFLKGTAKVKRDKELYFGKILQDAGLLKNGDEPSFYIDKSDEDVDGDDANENKIDGNITYASFKEALGIDTFKKIKNEFIYRTEQVNKLNYNVIEESKLFLLWNTIYQAKDGLFKEDDWLKSILTEKTKWNFTELQAQKLIENGLQADYCSYSSKVLKAILPHMRNGLNEHEALKATGLNYINEDNTVGVKVQLKDKISQLNYQELRNPVVERALSKSIKLVNALLEKYKNEIDKEHFEIRIESTRQLKKPRQERETERRKNADKDRLRQQYADYLTKNKERLGFKNVISKYDSIVGKYELWLQMNMNEEDEVFINEFKAFSKITKEQDKLKHKLWLECGRMCPYTGRIINFTDCFSSEVEIEHIIPLSRSLDDSFNNKTLTYRNTNAEKGSMTPYEYLKKKSANDLKAFKARIKNEKGNAFSDSKKELFLAENISADFSSNQISNTSYIAKYTRTKMQEVCKNVQFTNGSATSQLRNYDWEISNLLDKIRYDEDNKTDIDLDLQTYHRIKKDFKQWHDNKYKSTDIRIDWKNLKEYDPLKQYITETNNDLLYWELEIQKFADFRNKFGKKDRSDHRHHAVDAFITACCSQKKIKELSTYNAIREKQHLRDREKIEKPFDYKDLKDSISNILVSHTEKQTLIKKRKNRIKTKDGIKEHFTYAPQGSLHKETFYGKLKRPIDQGYDKKNVFVSRSLLMNKNGSAESYEFMNTTELEKIYEKNQKKTLANRFDFINGKTDEKGNELKPFSEKSMKEFPIFSYTPNVDKTKSIKGKPLPIIKSIRTKYKNERSVIEISNNRFADNDSNFIMVLYEKTQTDKKGNKKKPLRDFKLISFWDANKSKRENEKMFNDEIGDIGLNYDCQWLKKGDIIYLGDEEINLDDSIFLSSKLYRVNELGYNPTGDGYAVIKLEPHKQMKTSKDKYASIGKFLKLSESLNAIKIRLSILGEIEAVGEDCF

SEQ ID NO: 6373 - protein, 1086 aa, synthetic construct
  REGION 1..1086: note = Synthetic
MNYTLGLDLGVTSIGWAVVSEEDSFLDTGVRIFPAGIDNFDTSNEQSTNVQRREARSARRRIKRRAQRRQLLRENLTALGWIPSSKHALDEQAIADWEALDPYALRHRALTEKISLAELGRIFLHLNQRRGFLSLRKSDETAADKEEQGILAEMSSLETAIQDSGHQTLGSYLYHVREADLAEHNGSPFVRIRGSHLRRSLIHAEFDAIWKQQALHHPEVLTDTLRFGQAGQRSAPISVVTPERRQKGVTLLEQFGFENLLFFQRRVYWPEASIGICELEGHVLFEQLRAEDKLGPDFNDYRKELESGIRRSPIDDRRFQEFRMLCEINNLKLTDYSTSVPESRPLAPAERTIVEDYCRSVAKPSFKMIKKRLIKHVGLQSVDQISLNLEEGGRKEISGLHTDALLSGKKGMGKRWHEIPEETKNQIVEYLCNPTATDEELTQRLFATGALSRDEVFSLSKCSLGTNHGNLCIRALEKLLPHLRKGMIYMAKGEGDSSALHAAGYQRRDEHENDEHDLLPRFDDPLLPYAKQVNSPIVKRAMTELRKVVNGLIKKYGKPARIHVEMARSLKMSPTQRQDYNKRTRSLEEKRKKAAKEITNLRFLPTRDAIERLLLWEQQDRVCAYSLKPVSISKLFSGDVDIDHILPIKRSGDNSFNNKVVCFRSENAAKDNQTPYEWLRSDQDRYDKVIQFAYRHLREGGKSKKIVLKEIPEGFIARDLNDTAWMAKACRQYLTCLFPSDKSHLVQGTKGSHTSVIRDMWELNGLLRSDGLNLKTRDDHRHHAIDAVIIALTTQARIQHVVKTQRFETVITDAREEGMKRYVLKRRIEHEEFPWEGFRDDLKKSLAQIFVSFRPRKKVSGALHKETFYGKTSEGLLTARKEVKSLTAKDLKNIRDPFISKLIQGHLESGKTLEDDLLLPNGTPVRKVKILIKQAHLTLRENTRHEMHVWSDGTHHAAIFSLGGGKCHVQPVSLMEAAERKRRGEPIVQKTNKDLPPESEFMCSLSKGDTILCEKEGREELFVYSDMPSTTLQMRFRQQYDARKGKKDEQTGKTLLVTAKPGTLLKNFPNFQKVNVLPTGEIRRTQ

SEQ ID NO: 6374 - protein, 960 aa, synthetic construct
  REGION 1..960: note = Synthetic
MARIWGFDLGTSSVGFAVIDYDEGSSQGKLVRVGVRVFPEGVDEKKKEPRNAVRRAKRLARRQFRRRRWRKRHMRELLVDAGLLPASERKPRSHQGRDDFFLNSDGADPYRLRARAVNERIEPFEIGRVLFHLCKHRGFTGSRKFDTSRADDRSRASEERQIRQEIEDLRRQLAGRTLGEYLHGLPPTEAKRRRHIHRDMVQDEFRRIWDKQRTFYPDLLTDDLRERIWHTLFAQRPTFFSLKTIGKCELEPDEWRCLKGDWHAQRFVMLQMLNNLRFLGDRQLSAEQRERLLNELEAKASLTFDQIRKKLGLGDERFNFESGGEKKIIGNATECELAKVFGRQWETLPARDRIRAEIAERLWHLEYRQVGDKRAEIRTAAQWQAERDAFVKSAMRDWSITAEQAESLSKLDLPAGYVMHSKRAILKMLPYLEQGLRYDEAKDRAYPKPPPARPPAEKLSEPDPNRVRNPTVIRTLGELQKVVNNLLRVDGRPDLIRIELARDLKLPRTRRLKLMAEQRQNEKRRKDARDELARRGLPVTHENVEKYLLANEQGWRCPYSGEQISCDGLFQSGLFEVDHILPRSRSFEDSFANKVVCHRDANKEKANRTPFEAWGADPERWAAIEHILSDIQKHAGFPISKVDRIKRKEFPALGGEDFTNRQLVDSAYIARMAVDYLSELGVKVEPTNGRVTAHLRRLWGLETILSDAPEGKNRDDHRHHAVDAIAVALTTPAFVKRLSDYYGTDRTPDRERFRVPWDSLRADAERAVAEIVVSHRAQRKVSGALHDENPWRDTGEESEENGIRYRLYSQRKSSGQRAVERIQQKLMRPVGPDRAAWVKTNSNHHILIYTDEAGKLRYETVSMFDAAMRISKRQPIVDRSRPQAAPFRSLCIGDMIERTVDGRKTYWTVKKLSANGPITIQPHNFARDLGRTGPSVTTLVREGARKVVVDPIGRVSYAND

SEQ ID NO: 6375 - protein, 1019 aa, synthetic construct
  REGION 1..1019: note = Synthetic
MSQFTILGLDLGPSSIGWALFNGGADGVPTELIDLGVRHFEEVAEPKTGVLLNKKRRTKRGMRKNIRRRRERLDSLLAAMRQGGLAPTGQHPFAESGVDPLAAYRTRARAVEEPVSLEELGRAIYHLARRRGFLSNRGTKFARIANLQEVANLLAEQEGERESTERGKKRNAEEEEKAKEEGVILKEITELRTQLDGRTLGQYFLQELEAGRGVRGRHTHRDMYEDEFERIWSCQSSHHPQLTQELRARIYRAIFHQRPLKEQHGFKGFCSMEPQRLRAQRSQLVAQRYRYWQDIVNLKVREPDDVEHRPLTREERLSLAHFLDGRVEATWEAVRKHLQLAKGTDFNLKKSKDQLRGNSTAVRLAAIATDWGSMDEAARERLVETLLTISDRGKLYLTMREKFGYDVETAYRLAKLELEDGTAALSSRAMRRILQALEQRPETATMYEAQLAAGYTIREVQQALRIERAPNRLEITNPRVRKGLAQLRRVMNALIAKYGRPDIVRIELARDLSLNEDEKRGLDKAKKQLERENAEADRWLRDQGIQNPSRSDRFWYRLARQCGWVCPYTGQPIPQELASTSRFQIEHIVPYSRCLDDSFNNLTLCESQTNQEKGDRTPWEAFGQTAAWEDMEARVQQWRGIGTGRKKSLFLRREAPPEDQMVARQLNETRYMSRKAMEFLEPVVGRVEVTKGGATAMLREHWGLFHALNTEGEKNRDDLRHHAVDAVAIAFTTRSVFMKATAHRKRHADGRVGKITPLSAETVPAAPEWLHDALKQRLASMVVSHEATRKIRDAFHEETAYGMRDPNAKVFHYRKNLVDLTASAIADIADHGLRRRAEEILKATSLPPKEAFKEGIPMGTTVARRARLVKPMPGAKLLAVPNDNPTKFYPLGNNHHVAIFEDERGKRVGVFVSMLDAARRLRRVKAKHPVDTNPPSPGLRFVMWIAVNDTILLPDDDGPGLYRVASLWSTTNQICLYDLKKSNSSGSEGRLLKGPNTLRAVKVEVDPIGGVREVPEGKL

SEQ ID NO: 6376 - protein, 955 aa, synthetic construct
  REGION 569..570: note = misc_feature - Xaa can be any naturally occurring amino acid
  REGION 1..955: note = Synthetic
MSQFTILGLDLGPSSIGWALFNGGADGVPTELIDLGVRHFEEVAEPKTGVLLNKKRRTKRGMRKNIRRRRERLDSLLAAMRQGGLAPTGQHPFAESGVDPLAAYRTRARAVEEPVSLEELGRAIYHLARRRGFLSNRGTKFARIANLQEVANLLAEQEGERESTERGKKRNAEEEEKAKEEGVILKEITELRTQLDGRTLGQYFLQELEAGRGVRGRHTHRDMYEDEFERIWSCQSSHHPQLTQELRARIYRAIFHQRPLKEQHGFKGFCSMEPQRLRAQRSQLVAQRYRYWQDIVNLKVREPDDVEHRPLTREERLSLAHFLDGRVEATWEAVRKHLQLAKGTDFNLKKSKDQLRGNSTAVRLAAIATDWGSMDEAARERLVETLLTISDRGKLYLTMREKFGYDVETAYRLAKLELEDGTAALSSRAMRRILQALEQRPETATMYEAQLAAGYTIREVQQALRIERAPNRLEITNPRVRKGLAQLRRVMNALIAKYGRPDIVRIELARDLSLNEDEKRGLDKAKKQLERENAEADRWLRDQGIQNPSRSDRFWYRLARQCGWVCPYXXADPPRTREHEPLPDRAHRALLPLSGRLVQQPHALRVANEPGEGRPYTLGSVRPNRRVGGHGGSRPAVERHRNGEEEVPIPATGGPARGPNGRTATQRNALHVPQGDGVPRAGGRQGGSDQGRRDGDAPRTLGSVPRPQHRGRKEPRRPAPPRGGCSRHRVHDAIRVHEGDRAPQAPCGRQGGQDHSALGGDRPCGARVASRRPETTVGLNGGQPRSDAQDSRRLSRGNGLRHAGPECESLPLPQEPGRPHRFGHRRHRRSRSAAKSRGDPQGNQPASERSVQGRDSDGHDGRPTSASRQAHAWGQAACSAQRQPDQVLSFGEQPPRRHLRGRTRQASGSLRFHAGRSPAPAARQGETPCGHQPAESRIEVRDVDRRQRHYPSAGR

SEQ ID NO: 6377 - protein, 1145 aa, synthetic construct
  REGION 1..1145: note = Synthetic
MKRKGIAWRLGLDLGTNSIGWCVFDLSKPDKEGRRHPIGIRRMGVRIFPDGRDPQSGASLAASRREPRSARRRRDRFLMRRATLLHALIRHELMPGDPAARKALEGLDPWRLRAEGLDRALTRYEFGRALFHLNQRRGFLSNRKADRKAKADEKQGMKAGQKKLEEAIAARGARTLGEFLHRYGRENRSPRGGDEKESERGIRFRARIGQGGKAEWDFYPTRAMLRHEFDALWNAQAKYHPDLTDVARAEIETIIFRQRPLKPVSPGPCTLEEGDERAPLALPIVQEFRILQELANLELVRRTNPTDRHRLTMEQRDRLLEKLLIKEKLTFKRMRAILGIDSIWAFNLESEKRKDLKGDRTSYLISKPEAFGVRWFTLSDGERNSIVEWLLDIEDEPKLIAKLTTEFDLTPEQAEQIANAPLEDGYGRLGRIALGKIVPELRAGRSDDGRPLRYSEAVQRAGYLHHSDFRDGEILDLLPYYGDVLRRYMAPVSSLTAPEEERRFGRIANPTVHIGLNQLRRLINALVERYGHPEEIVVELARDLKLSREEKERIEKDQAANQKKNEMRRAKLAEVFAPGQKPPGDAMLRMRLWEELNLEDPNDRKCIYTGKQISIQRLFSPEIEIEHILPFTKSLDDNPSNLTVSIRHANRDKGNLTPFEAFGHSPTIGGFKYEWDEIVLRASSLPKSKQWRFRPDALDLVKDRARRAVEAAKGTLTKEDMDDIERSGGFLARQLIDTAYLARVTRQYLWKICHPDRTWVIPGTMTALMRRKWSLNNLLGDHNRKNRADHRHHAIDAFVVGLTDRSMLQAIAGAADEQRERVIDDMPDPIDWASFRDDLRAALDRIVVSYKPEHGVQGRLHEETAYGLVKEPEREGGNVVVRKSIENLSEGEIDRIRDKKLRGRLQQHLAARGVLVDDSALEAAKRAQSEARKGKDRHAMERAQLEIERLKEKRRKDRKDIAKGLKAALVEFGQDNGVRRVRLVKPEAAVVTVRGTNGIPYKAYSVGDNHHVEIFQRADGSWSREIVSVFDANRPTFVPLWRADTSNRLLWSIYKNDLLKLSIDEKGDDSDTGSTTGEAKRVMRVVSIWENYLQLAEHKETNLAQRYRDGEFKWTFARYERLKELGTRKVSVDALGRIRDPRSPR

SEQ ID NO: 6378 - protein, 1028 aa, synthetic construct
  REGION 1..1028: note = Synthetic
MKRTLPFRLGLDLGTNSIGWCITDLGKPGKDGRMHPVRIRRMGVRIFPDGRDPQSGASLAEARRTPRSARRRRDRFLDRRADLMKLLIAHGLMPADPAARKALAALDPWALRGEGLDQQLTLHELGRALFHLNQRRGFKSNRRTDKKADDKEAQGMKAGAAALAAKLDGRTPGRRTLGEYFYAAYRKDRTPRGAPDGSTLPIAAVRFRAHAGKGNKLEWDLYPTRDMVEAEFDALWTAQAAHHPALTEEGRAAIRDAIFYQRPLRPVEPGPCTLDPEPDPHKRERRAPLALPLQQEFRILQELANLELRHRRTGQVRRLGRQERDKVLHELKRREKYSFSQIRKLLGIDNVWSFNLQDDRRDGLKGDVVAYKLAKNGFGKSWHDMAVEQQDEVVRFLLDEEREDEVLRVATTSWGLALEAAAGVAGTPLPEGYGRLGRTALARIVHHLRHGVSSKDGGLMHYDEAVQAAGYRHHSDFSTGEVFTDAPYYGQILERYMVPVSGVSGSADEQQYGRITNPTVHVSLNQLRQLLDAIIAAYGHPDEIVVELARELKQTREQKRETQTRQLENQKKNERRKQQLEAAGIALRGDALLRMRLWEELGENVADRACVYTGEPIGIKTLFSDKVEIEHILPFTLTLDDSPSNLTIAMRHANRDKGDRTPHDAFGTSPTIGGQSYDWDAIALRASALPWAKQWRFRADALQLIKDRLLREEQRAKGSLPRDVMADIENTGGFLARQLVDTAYLARVARQYLTSVVPSETVDGVMRSKVWVVPGGMTGMLRRLWGLNRYLWGNRPEAADEGPDDWRGKLRTDHRHHAVDAFVLTLIDRPLLNSIQYQAGQSGRRTIDDMPDPIDWPTFREDLKDRFDRIVVSYKPEHSPSGRLHEETAYGIVREPAKEDGATLVYRATFVDLDTDGIARIRDLHLRARVLAAVEGVTSDKKKLRETLTAFAATEPQALRHVRLLKVKSDYRTILHSRSHYSKAFVPGKNHRVDVFERPDGTWQAAGNFSPAQARDSAASLRRDRSAC

SEQ ID NO: 6379 - protein, 1020 aa, synthetic construct
  REGION 1..1020: note = Synthetic
MSRANSYILGIDLGVNSLGAALIDKSNREIVWTGVRIFTPGFEGDYASGNEESRARQRRLARQQRRQTDRRRRRLLNVFRILQQYGLLPCGDREKILPALDAELALKYPETEVLPYYLRARSLDHKLTLYEIGRALYHLAQRRGFRGRAALDQSENSSEFKKSIEGLWKEIHASGSRTLGEYFSKLNPHETRIRGQRTHRRMYEEEFAAIWTAQQQHYPDVLTDARRQVLERAIFYQRPLKPSDDLVGDCELEPGEKRAPLWTIEAQRFRVLNAINNLMVVQKGVAPRKLEDHERQTLIEATRTKEKISFPQVRKLLSLPASSRFSIEEDGDTNLPGDIVSSRMFAALGSSWLEMPEERQRELVADLGDARRNETDEDLFRCLTEKWGYSPDVAQRLCEVALPSGYSRLSSKAICKALPFMEQGMTFGEARRKLWPEQFEEKEPLDYLPPVLEAPGLKDIRNPAVIRALSELRKTVNAVIRRFGKPASIHIELARDMKRSREERRKEARRNQQRRKLREEAREALRPYLGDNVPSRQIEKYLLWLECGRHCPYSGQPISLEALFGDHPRFDVEHIIPFDRCLDDSFQNKTLCEAGFNRLKGNRTPWEAFGHTEEWPLMVERVRAFRNVAKLRRFIMTETDAEKLLGEFVSRQLCDTRYASRLAAKYLGLLFGIDRPDNNRIIVCAGAVTAFLRQKWDLNRILNEKPEKNRDDYRHHAVDAIAVALATQAQIQQLADAARRARAEGHRRFGSLPDPWPGFREQARNAVLRCVVSHRPKRRLKGALHNETYYSAPEQREGKMVVRCRKPVTSLTKTDIEAIVDERIREIVRAAWEAVGSDAKKFEGNWPFIESNGRKIPIKRVRCFQVETVRSIAEDRPERRRHVIPGGNHHIEIWAETDPKSGLPKRWHFRAVSRLEAMERYRRRHEGVRIVQRDHGPNTQFCFSLSEGDMVAVRRAPDQPETLWCVRSARTRGSFELQPATDARLKKDAEIWDVALNTLMKLGCRKVVVTPLGDIVDAHD

SEQ ID NO: 6380 - protein, 1092 aa, synthetic construct
  REGION 1..1092: note = Synthetic
MKYSIGLDIGISSVGWSVINLDRKRIERLGARLFDAAENPKNGSSLATPRRDARSARRRLRRRRYRVGKVRRFILERGLLTKGQVNQLYNWKDGDLDIWLVRVNALERLLTDREFARVLIHLAKNRGYRSNRKSEAKQGENGQVLSAIKTNKALMDEKGYRTIAEMLVCEFEKFAGRKRNRGGEYTHVIARGELEKEIHLIFEQQRLMGNRFATTENEAAYVKIWAAQRPVATKEDILNKIGDCTFEKSEKRAPKASYAFQYFRALDKLNRLRILNPHQPSRKLTDQERDLIVLALFNHESQKYSDLRRLLKLSDDQRFNEIFYDPSVSLKNNEKRTFLSLSEQYKIRKVIKNVQGKEALLHYRPVDYDTFAYALTVFKDDQDTKDYLANRYVNDNGKQVANLANREYDEGLVEQLLNLSFSQFGHLSRKAIYRLIPQMEQGLSYYEACEKVGYHINEQIGQGKQYLLPVIPADEIRNPVVIRSLSQTRKVINAIIKRYGSPAYMYIELAREMGRPYSERRDLEKQYNKNRTNNDQVKEHIQELYPAMSAPRGHDILKFKLWQQQQGKCAYSLEKIPADEVFETGYVEVDHIIPYSRSFDDSNSNKVLVLSRMNQEKKNRTPFEWFGEDEHRWQRFESYVNTLKVDKKKKSLLTKKDVDEEQEATFKSRHLNDTRYITRYIKNFIADNLQFRELDGDIKQRVFTVNGAFTSLMRKRWGFNKNREESDLHHAVDAVIIAVSRPFRQEVSTYFKHREVSLRQLMKRTWDYFPEPWDNFVKELKARIIQEPEKLKLALLSMELESYDQEFIEETKPIFVSRMPKRSIKGQIHDETLRRNRGKTEDGLVRTVTKTRLENISFDKNGDFPMYGKESDPKTYQAIKRRYLENGKNSKKAFIKPLYKPAKDPNKQSIIRSVKIEDKKNQVFPLKEKTVAYNSSIVKTEVFQNKETGKFYLAPVYVADVMVGREPKKFITQKKPYDEWLDITEEYNYLFSLFPNDVVHIKMKKTKKTKSFLNEPVTWQEGYFYFKNVHTGTAQIGIIDHMRSFKDEIGSQNLVILEKYQVDPLGNLSKIHGEKRYGVPSSSHSQPVTTVD

SEQ ID NO: 6381 - protein, 1085 aa, synthetic construct
  REGION 1..1085: note = Synthetic
MKYNIGLDIGISSVGWAVVNTEVERIEKMGVRMFDAAENPKNGSSLATPRREARSARRRLRRRRYRVSRVRDLILKRGLLTQVEMDQLYEWQPEDLDIWLVRVNGIERKLTDREFARVLIHLAKNRGYKSNRKSEETERNETGAVLSAVKENTALMQEKGYPTVAAMLLYEEEKFKGHKRNKGGEYTHVISRIELEKEIQMIFACQREFGHTFATIENEEIYLKIWNSQRPFSSKDDVMKKIGNCTFEPNEKRAPKFSYTFEKFRALDRLNRLRILSTSNPQRKLTDEERKTALESLLSKKEIKYKDLRKLLKLTETERFNELFYDPSLSIEKNENAKFLSLEGQWKIHKIIEKVEGKVLAHSYRPIDIDTFAYALTVFKDDQDIRDYLLNIYVNEKGRKERNLANRSYDEKLIDALLSLSFTKFGHLSLKALNNILPYLEEGYMYHEACEKAGYEFSKKINRQKQFLLPVIPSKEIANPVVIRSLSQTRKIINGIIKRYGSPSGIYIELAREMGRPYNERREIEKMYNKNRTVNDHAREHIRELYPEISDPRGHDILKYKLWQEQNGVCAYSLQSIPIERLFDAGYAEVDHIIPYSRSFDDSNGNKILVLKTENQNKQNRTPFEWFGHDEKRWQAFTSFVTTLKVAKKKKDLLLKENFDDEQAENFKSRHLNDTRYITRFLKNFIEENLQFREEEGRKQYVYSVNGAYTSLMRKRWGFNKNRQENDLHHALDAVIVAVSHPFRHQVSTYFKRREISVAKLLDRKGERFPEPWDGFVKEVEVRMIQDKELMKRALLSLELSSYDGPFFEEVQPIFVSRMPKRSVKGQIHEETLRRNRGINDKEYIRIVTKTKLENITFDKNGDFKMFNKESDMKTYEAIKQRYLEYGKDKKKAFSIPLYKPAKDASRASIIRSVKIEDTTNRVVSLDDKTVAANASIVRTEVFRHKETGRFYLAPVYVADVMKGLVPKKFITPNKSYNNWVEISDEFEFLFNLYPNDVIRVKLPTEKETKNNLGDIISWQEGLFYYKGVDIHTASIAIIDHMNSLKDRIGTQRLAIFEKYQVDPLGNLIKVHGEKRYGVQTYSYS

SEQ ID NO: 6382 - protein, 1084 aa, synthetic construct
  REGION 1..1084: note = Synthetic
MKYSIGLDIGISSVGWSVINLDRERIELMGARLFDAAENPKNGSSLAAPRRDARSARRRLRRRRYRVGRVRHFIIDRGLVTRGQADQLFDWKDGDLDIWLVRVNALERLLTDREFARVLIHIAKNRGYRSNRKSEAKSGENGQVLSAIKANKELMEEKGYQTVAEMLVNEPETFAGRKRNRGGEYTHVIARSELEHEIRLIFTKQRAFGNRFATEENENTYVKIWAAQRPVATKDDILKKIGDCTFEKGEKRAPKASYAFQYFRALDKLNRLRILSVREPSRNLTDDERNLIVPALFNHDKQKYSDLRKILQLRDDQKFNELFYDPGKSLKENENKTFLSLAEQYKIRKVIRDVQGKDGLLQYRPLDIDTIAYALTVFKDDQDTRDYLSNTFVNGNGKQVLNLANRAFDAELIDGLLSLSFAKFGHLSLKALHKLIPHMEQGLSYYDACKKVGYHDNEQVGKSKQHLLPVIPADEIRNPVVVRSLSQTRKVINAIIKRYGSPTFMYIELAREMGRPYNERRDLEKQYNKNRTVNDSAIEQIHELYPEIGAPRGHDILKYKLWQQQDCKCAYSLEKIPAEKIFEPGYAEVDHIIPYSRSFDDSNSNKVLVLSRMNQEKKNRTPYEWFGGDEHRWNKFESYVNALKVNRKKKSLLTKKNMDTEEEDTFKSRHLNDTRYITRFIKSFVEDNLLFREIEGAKQHVFTVNGAYTSLMRKRWGFNKNREESDLHHSVDAVIIAVSQPFRNEVSRYFKHREISLPQLLKRTWDYFPEPWEGFVKELRARTLQDPEKLKLALESLDLDSYDPEFIDEVKPIFISRMPKRSIKGQIHDETLRRNRGKTKDGFVKIVTRTRLENIKFDKNGDFPMYGRESDPKTYQAIKQRYLENNKDKKKAFIEPLYKPAKNPNNASLIRSVKIEDKANQIVPLRDEAVAYNASIVRTEVYRNKETGKFYLAPVYVSDVFAGREPRRFIRANVPYEQWVNITDKFTFLFNLYPNDVIYIKMKKVKTTKSNINKTISWQESYFYFKGTDIHTGAITIIDHMNSFTDRVGTQGLQLFEKYQVDPLGNLSRVHGETQYGVPALSHS

SEQ ID NO: 6383 - protein, 1078 aa, synthetic construct
  REGION 1..1078: note = Synthetic
LRYHIGLDIGVTSVGWAVINLDKERIENLGVRMFEVAENPKDGSSLAAPRREARSVRRRLRRRKYRVSRVRHFIIKQGLLTKVQAESLYDWQDGDLDIWLLRVNALERKLEDREFARILIHCAKHRGFKSNRKSETKETENGLMLSSVKENQQIMKEKNYKTIAQLLVYETELFDGRKRNRSGQYTHVFARDDLENEIKIIFEKQREFGHPFATKENEQKYLNIWSSQRPFASKEAIMSKVGDCSLIKGEKRAPKFSYQFERFRALDKLNRLRILSIDQPGRKLSEIERELALDLLFDKKEVKYSDLRKALSLDESARFNELFYDESKSVKENEKVVFISLEGQYKIKSIIKGSEGKTAVLEYRPVDYDTIAYALTVFKDDQDIKDYLKNEYVDSKGKKLKNLANRVYSDALIEGLLGLSFSKFSHLSLKALKELLVHMEAGYSYTEACELCGYTINQRNNMEKSKLLPVIPGNEIRNPVVLRSLSQSRKVINAIIKRYGSPSGLYIELARDMGRPYNERSKISKEYNANRLVNDKARSRIQELHPSISDPRGHDILKYKLWEEQNGKCAYSLEPITIERLFEPGYAEVDHIIPYSRSFDDSNQNKVLVLGRENQNKQNRTPFEWFGHDEKRWEKFISYVSSLKVGRKKKSLLLKTAFDEEQEEAFRARNLNDTRYTTRFLKNFIEENLQFREEKGKKQYVYTVNGAYTSLMRKRWGFNKNREENDLHHALDAAIVAVSHDNYHKVSAFFKRKEISTAQLLKREKEQFPEPWEGFSKELEARLLQNPLHLKMALESLASDAYDEQFINEVKPIFVSRMPKRGVKGQLHEKTFRRQRGENDKGYTVVVTKTGLDKITFDKNGDFPMYGKESDPRTYNAIKERYLAYGKDKKKAFAEPLYKPSKNPEKAPIIRSVKIEDKRNLFVALDEKTAADNASIARTDVFQHRDNGKYYLIPIYVSDVKEGRVPNRFITQNKPYNDWLECTEDYQFKFSLYPNDLIHVKLPQSKQVKLTNKEEILWQENFFYYKKVDVASGQITIMSQEGSLLDRIGVQRLVTFDKYQVDPLGNIKKVNKETRHGV

SEQ ID NO: 6384 - protein, 1077 aa, synthetic construct
  REGION 1..1077: note = Synthetic
MKYSIGLDIGISSVGWAVINLDKERIEDLNSRMFDVAENPKNGSSLATPRREARSARKRLRRRRYRVGRIRNLIIKKGLLSEVEADHLYEWQDGDFDIWLIRVNGLERKLTEREFARILIHYAKNRGFKSNRKSETNESEGGVLLKAVRENALLMEEKGYRSVAEMLVLDEKFNGKKRNKGGDYSHVLARDEIEKEIKDVFENQRKYGNEFATINIEKEYIDIWSSQRPFSSQDDIAKKIGNCTLEEDQKRAPKFSYTFEKFRGLDKINRLRIISTEGPQRSLTGKERQEVMNSMLTKKEIKYKDLRKVLQLKDCERFNELYYDPGDTNEKNENKIFISLAGYYALKKIVKEVEGKTLAESYRPIDYDTFAYAVTVYKDDHDARDYLSNEYVNKNGKRVSNLANRHYSSELIEALLNLSYSKFGHLSLKALNKIIPFLEEGLLYNQACEKAGYNFNQKVGDKKEKFLPVIPADDIANPVVIRALSQTRKVINAIIKRYGSPSSIYIELARDMGRHYKERKEIEKQYNNNWKLNEKAKNQIHELHPEISNPRGHDILKYKLWEEQDGRCAYSLRPISQEKLFDYGTAEVDHIIPYSRSFDDSNANKVLVLARENQNKQNRTPYEWFGNDEVRWDKYISYVNSLKVRKKKKDLLLKQNFDDEQAEQFKSRHLNDTRYITRFLKAFIDDNLQFRGEEGNKQYVYTVNGAYTSLMRKRWGFNKNRSENDLHHALDAVLVAVSLPFRHRVSNYFKHSELHSSQILKRKGERFPEPWEGFSKELEARMLQNPEKLKLALESLSLASYDGDFLNRVKPIFVSRMPKRSVKGQIHEETIRRHRGFTEKGLNLMVKKYALKDINFDKNGDFPMYGKESDPKTYAAIKERYLEYGKDAGKAFSTVLYKPSKNPENAPIIRSVKLETTANQVFHLNDKTVAENASIARTEVFRHKENGRYYLAPVYVSDVLKNRVPEKFITALKPYSEWEEITSDYEFLFSLFSNDIIKLKMPREKKSKLNTGDLVTWDEGMFYFKGVHTGTAQINIIDHMSSFKDAIGSKSLQSFVKYQTDPLGNLTQVQKEKRYGV

SEQ ID NO: 6385 - protein, 1077 aa, synthetic construct
  REGION 1..1077: note = Synthetic
VRYSIGLDIGISSVGWAVINLDKERIEDLNTRMFDVAENPKNGSSLATPRREARSTRRRIRRRRYRVSRIRSFIMNKGLLSEIQADQLYTWKDDDLDIWLVRVNGLERKLSDREFARILIHYAKNRGFKSNRKSEKKEAETGRLLEAVSENTRIMEENKYRTVAEMLLLDDRFEGRKRNKGGDYSHILARTEIEKEIRLIFAKQREFGHRFATTENEEEYIQIWGSQRPFSTQEDIVKRIGSCTFEPGEKRAPKFSYTFERFRAYDKMNRLRIISDKDSQRPLTDDERDDIIRMLFNKEEVKYKDIRKTLQLQHYERFNELYYDLNETNEKNENKTFLSLEGQYKLKKVVSNIEGKTLAESYRPIDYDTFAYAVTVYKDDHDAREYLLNTYVNENGKQVKNLANRAYNEELIEGLLNLSFSKFGHLSLKALNKIIPYVEQGHAYHEACEKAGYQFNQRVGNEKQKLLPVIPTKDITNPVVIRSLSQTRKVINGIIKRYGQPSEIYIELARDMGRHYSERRELEKQYNKNRKLNSQAKERIHELHPEISDPRGHDILKFKLWEEQDGRCAYSTKKIKMDDLFDHGVAEVDHIIPYSRSFDDSNANKVLVLKKENQDKKNRTPYEWFGNDSVKWDQFTSYVNTLKIRKKKKDLLLKKNFDDEQAEQFKSRHLNDTRYITRFIKGFIEDNLELREEKGRKQQVFTVNGAYTSLMRKRWGFNKNREENDLHHAVDAVLVAVSLPFRHRVSNYFKRHEEHASQLLKREGEKFPEPWEGFRKELEARLIQDPDKLKLALESLALPSYDEDFILEIKPIFVSRMPKRSVKGQIHEETIRRHRGFTDKGLNLMVKKYALEDIPFNKNGDFPMYGKESDPKTYEAIKQRYLDNGKDVKKAFSTTLYKPSRKPEKAPIIRSVKIETTANRVFHLDDKAVAENASIARTEVFRHKETGKYYLAPVYVSDVFAKKQPERFITAHKPYNEWQEITTDYEFLFGLFPNDVIKVKMPREKTSKTNSGGFLKWVEGVFYYKGVHTGTAQINISDHMGRFVDAIGSKNLQLFEKYQTDPLGNLTKAHGGKRHGV

SEQ ID NO: 6386 - protein, 1077 aa, synthetic construct
  REGION 1..1077: note = Synthetic
MRYSIGLDIGISSVGWAVINLDKNRIEDLNSRMFDAAENPKNGSSLATPRREARSARRRLRRRRYRVGRVRQFLIQQGLLSEVEANQLYDWKDGDLDIWLIRVNGIERKLTDREFARILIHYAKNRGFKSNRKSETKEDEGGVLLKAVKENASLMEEKGYRTVAEMLVLDDKFSGRKRNKGGDYSHVLARSEIEKEIREVFSNQRELGHSFATKENEETYINIWGWQRPFSTQEDIVKRIGNCTFEPNEKRAPKFSYTFEKFRALDKINRLRIISDSKPQRPLTREERLLTLESILNKKEIKYKDLRKTLQLQEDERFNELFYDPGETNEKNESKKFVSVDGYYQLKKIIHDVEGKTLAESYRPIDYDTIAYAVTVYKDDHDARDYLLNDYVNENGKRINNLANRVYSEELIEQLLNLSFSKFGHLSLKALNKLIPYLEEGFQYHEACEEAGYHFNQKIGTEKAKILPVIPADNIANPVVIRSLSQTRKVINAIIKRYGSPTEIYIELARDMGRHYTERREIEKQYNKNRLVNEKAKDRIQELHPEFSDPRGHDILKYKLWEEQDGRCAYSLKPIPMDDLFNPGYAEVDHIIPYSRSFDDSNANKVLVLSKENQNKKNRTPYEWFGRDVVRWDKYTSYVNTLKVRKKKKDLLLKQNFDEEQAETFKSRHLNDTRYITRFLKGFIEDNLQFREEDGRKQYVYTVNGAYTSLMRKRWGFNKNREENDLHHALDAAIVAVSLPFRNRVSNYFKHSELHASQLLKREGERFPEPWEGFTRELGARMLQNPEKLILALESLSLASYDEEFIEQVKPIFVSRMPKRSVKGQIHEETIRRHRGFTEKGLNLMVKKYALADIRFDKNGDFPMYGRESDPKTYQAIKSRYLESGKDPVKAFSTILYKPSKDPENAPIIRSVKIETTANQVFHLDDKTVADNASIARTEVFRHKESGKFYLAPVYVSDVMAKRVPDRFITPHKSYGNWIRITSDYEFQFNLFPNDLIKVRTPRQKLSKTNSGEIVKWNEGVFYFKGVHSSTAQINLTDHMNSFKDTLGSQGLEVFEKYQIDPLGNLTMVHKEKRYGF

SEQ ID NO: 6387 - protein, 1077 aa, synthetic construct
  REGION 1..1077: note = Synthetic
MKYSIGLDIGIASVGWAVINEDIERIEDLGVRIFDVAEQPKTGASLSTPRRLARSTRKRLRRRRHRVERVRKFMIQKGLLTQVQMEQLYDWKDGDLDIWLVRVNALERKLSDREFARILVHFAKNRGFQSNRKSELQEEDNGAVLSAVQENKRLMEEKGYQTISEMLLYDEKFEGTKRNKGGEYTHVVARSDLKREIQLIFEKQRAYGHAFATMENEDKFLQIWSSQRPFATKDDIAKKIGNCTFEPKEKRAPKSTYTFERFRALDKLNRLRILSGTSPARSLTQEERDLILNSLFSKKEVKYKELRKLLKLNDEQRFNEIFYDPNEKIEKNENRTFLSLESQYKIRKILQKIEGKSLNDTYRPVDLDTIAYALTVFKDDQDIRDYLQNQYVASNGKKELNLANRKYNDELIEELLHLSFTKFGHLSLKALRNILPFMEQGIPYHQACEKAGYQFNKKVNREKQKLLPPVPAKDIVNPVVIRSLSQVRKVINGIIKRYGSPSSIYIELAREMGRGYKERKDLEKQYNKNRQMNEGAKKHILELRPEFGDPRGHDILKYKLWQEQDCRCAYSFKSIPIKQLFEIGYAEVDHIIPYSRSFDDSNNNKVLVLAAENQNKQNRTPYEWFGHDETKWQEFTSLVTTMKVSKKKKSLLLKKNFDEEQAEEFRSRHLNDTRYITRYIKTFIEDNLQFRMEEGKKQYVHTVNGAYTSLMRKRWGFNKNRQENDLHHALDAVIVAVSLPFKHKVSAYFKRREEYAHNQLKREGEFFPEPWPGFIHELEIRMMQDSENIKLAMESLNLKTYDESFIKELKPIFVSRMPKRAMRGQIHEETLKRVRGRTDDGYIRTVKKVKLDQIPFDKNGDFPMFGKETDMKTYEAIKSRYLESGKDKKKAFNTPLYKPAKNPENAPIIRSIKIEEKANRVVMLDEKTAADNASIVRTEVFRHKETGNYFLTPVYVADVLAKKVPDRLITTKKPYSEWRKITDEYEFLFSLYPNDLIRVKMPKEKGTKTHTGEKHVWQENFMYFKGVHSGSAGVRMIDHMNSFEDEIGVRKLVVFEKYQVDPLGRMNKVHGEKRHGI

SEQ ID NO: 6388 - protein, 1076 aa, synthetic construct
  REGION 1..1076: note = Synthetic
MKYSIGLDIGISSVGWAVINQDKQRIEDLGSRMFDVAENPKNGSSLASPRREARSQRRRLRRRRYRVGRVRHYIIDKGLLSEMESDRLFEWQDGDLDIWLIRVNGLERMLTEREFARILIHYAKNRGFKSNRKSETNDGEGGVLLKAVRENASLMEEKGYRSVAEMLVLDDKFNGRKRNKGGDYTHVLARNEIEKEIRDVFEKQRDFGNLFATKENEEAYINIWNSQRPFSTQEDIAKRIGNCTFEENEKRAPKFSYTFEKFRALDKVNRLRIISTNSPQRPLTNEERQAVMNSVMDKKEVKYKDVRKTLGLNDDERFNELFYDPGETNEKNENKTFLSLKGYYELKKIVRDVEGKTLAESYRPIDYDTFAYAVTVYKDDNDVRDYLSNDYVNKNGKRIHNLANRAYSQKLIDELLNLSYAKFGHLSLKALNNIIPYLEQGYLYHKACEEAGYSFNQKVGKKKEKLLPVIPADDIANPVVIRSLSQTRKVINAIIKRYGSPSAIYIELAREMGRHYKERKDIEKQYNNNRKINDKAKSRIQELHPEISDPRGHDILKYKLWDEQNGKCAYSLKPIPMEHLFDYGFAEVDHIIPYSRSFDDSNANKVLVLSKENQNKKNRTPFEWFGSDEVRWEQYISYVNSLKVRKKKKDLLLKQNFDEDQAEQFKSRHLNDTRYITRFLKGFIEDNLRFREDEDKKQYVYTVNGAYTSLMRKRWGFNKNRAENDLHHALDAVLVAVSLPFQHRVSNYFKHSELHASQLLKREGERFPEPWEGFTKELEARMLQDPGKLKLALESLSLAGYDEEFMERVKPIFVSRMPKRSVKGQIHEETIRRHRGFTEKGLNLMVKKYALQDIKFDKNGDFPMYGKESDPKTYNAIKERYLEYGDAAKAFSTVLYKPSKNPENAPIIRSVKIESTANQVFHLDDKTVAENASIARTEVFRHKESGKYYLAPVYVSDVLARRSPDRFITAAKSYGEWTKITDEYEFLFNLFPNDVIKVKMPREKISKTFTGDIKRWVEGTFYFKKVHSGTAAITIIDHMNSFGDDIGSKNLKLLEKCQTDPLGNLTKVQREKRYGV

SEQ ID NO: 6389 - protein, 1063 aa, synthetic construct
  REGION 1..1063: note = Synthetic
LDIGITSVGWAVINRDKKRLEDWGVRLFEVAENPKDGSALAAPRREARSTRRRLRRRKHRVERIKHFITQNALLTKQELDELYPLTKEDEDVWVLRKLGTERKLTNREFARILIHCAKHRGYQSNRKSEEQDDESGKVLSAIKENHNLMVEKRYRTISHMLVEEDKPLRNKDGDYSGVLLRADIKKEIVSIFDKQQEFGHSFATTANKERYIELWGSQRPVASKDDILEKIGSCSLEQNAKRVPKATYTFSKFRALDKLNRLHIMDVKGEKRQLTVEERELVVHKFFDKKDAKYSDIRQALKLSEDQKFSELYYADDVKLSESEKRIFISMEDQYKIRKAIKKELGKKRLEAFTAIDFDTFGYALTVFKSDEDIQDYLRNQWINSKGKPMRNIANHCYEDDLIEVLLKLSFSKFGHLSLKALNNLLPFMEQGDYYTDAAKKAGYMLDQEKNLPKQKLLPVIPEQEILNPIVLRALSQARKVVNSIIKKYGSPRHIYIELAREMGRNYQDRREIEKQFDKNRSINENAKEEIRDLFPERSDIKGHDILKMKLWKEQQHCCIYSKQHIPLEKLFEPGYAQVDHIIPYSRSFNDSNHNKVLVLAGQNQDKKDRTPFEWFGSDHARWEQFSTYVDGLHMSRKKKQNLKNKSFQRSEQEFRDRHLNDTRYITRFFKTFIADHLHFDSNSKQNVYPVNGAYTALLRKRWGFNKVREENSLHHALDAAIVGTSGPFRDEVSNYFKKAEEHPKQLLRKNDIKFPQPWKKFAKELRTRLIQDPDAMMTAIMNNNFYEDDAAFRDQVRPIFPSWMPKRSVKGQLHQEKFRRNRGETDDGYQLIVTKTKLADIPFDKDGHFPMFGKENDRKTYDAIRDRYLSFNGNKQKAFAEPLYKPSKNMKNAPLIRSVKIEDKKNRLVSVKGEDTVAYNASIARTDVYQDVNTKKYYLLPVYVADIKQGNRPDRFVTAHKPYNKWVKKVDNHEYKFSLFPNDLMYIQLAKIKTVKGTNIDWQQGYFYYKGLDTATGAISIVKSDSSFDERTGIKSLKQFEKYNVTPIGDLQKVQKELAYGL

SEQ ID NO: 6390 - protein, 1076 aa, synthetic construct
  REGION 1..1076: note = Synthetic
MRYSIGLDIGISSVGWAVINLDKNRIEDLGTRMFDAAENPKNGSSLAAPRREARSMRRRLRRRRYRVSRVRKLIIQSGLLSEVEADQLFDWQDGDLDIWLIRVNALERKLTDREFARVLIHYAKNRGFKSNRKSETNEGEGGALLKAVRANALLMEGKGYRTVAEMLILDEKFNGLKRNKGGEYSHVLARSEIEKEIREVFKQQRAFGHSFATTENEEAYINIWSSQRPFSTQDDIAKRIGNCTFEENEKRAPKFSYTFEKFRALDKINRLRIISDRNPQRALSDEERNNVLESIMNKKEMKYKDLRKILQLEDNERFNELFYDPGETNEKNENRKFISLDGYYEIKKIIKEVEGKTLAESYRPIDYDTIAYAVTVYKDDNDTRDYLLNDLVTNDGKRIRNMANRTYSNPLINELLNLSFSKFGHLSLKALNKIIPYLEEGLLYHEACEKAGYNFNQKVGKEKQKLLPVIPANDIANPVVIRSLSQTRKVLSAIIKRYGSPSAIYIEMAREMGRHYNERREIEKQYNKNRTINEKAKSRIQELHPEISDPRGHDILKYKLWEEQDGRCAYSLYPIPMEHLFDYGFAEVDHIIPYSRSFDDSNANKVLVLTKENQNKQNRTPYEWFGSDAVRWDQFISYVNSLKVRKKKKDLLLKQNFDDEQAEQFKTRHLNDTRYITRFLKGFIEDNLKFREEKGRKQYVFTVNGAYTSLMRKRWGFNKNREENDLHHALDAVLVAVSLPFRHRVSNYFKHSELHASQLLKRKGERFPEPWEGFTKEVEARMLQDPETLKLALESLSLDSYDNDFINRVKPIFVSRMPKRSVKGQIHEESIRRHRGYTEKGLNLLVKKYPLQDIKFDKNGDFPMYGKGSDPKTYQAIKERFLEYGDAAKAFSTPLYKPSKNPEKAPIIRSVKLETTANQVFHLDDKTVADHASIARTEVFRHKENGKYYLAPVYVSDVMAKRVPERFITANKPYNEWTVVNDEYEFLFNLFPNDVIRVVMPREKESRTWNKTNIRWTEGLFYYKGVDSRTAAISLIDHMNSFLDRIGSKNLLLIEKYQTDPLGNLTKVQKEKRYGV

SEQ ID NO: 6391 - protein, 1084 aa, synthetic construct
  REGION 1..1084: note = Synthetic
MKYSIGLDIGISSVGWAVVNMDMERIEKMGVRVFDAAENPKNGSSLAAPRREARSSRRRLRRRRYRVARIRNLILKKGLLTQVEMNQLYEWRPEDLDIWLIRVNGIERKLTEREFARVLIHFAKNRGFKSNRKSEEAETETGVVLSAVKENAILMQEKGYRTVAEMLLLEEEKFNGRKRNKGGEYTHVISRTELEKEIRLIFACQRKWGQTFATHENEEEYVQIWSSQRPFATKDDILSKIGNCTFEKAENRAPKFSYTFERFRALDKLNRLRILSASDPQRALTDAERQLAIASLLHKKEVKYKDLRKLLNLKETEKFNELFYDPSLPPEKNENVTFLSLEGQWKIRKAIEAAEGKELANAYRPIDMDTFAYALTVFKDDQDIRDYLTNSYVNERGKQVSNLANQKYDDVLIDSLLALSFSKFGHLSLKALNNILPYLEDGYLYYEACEKAGYEFSKKTCLKKHHLLPVIPANEIANPVVIRSLSQTRKIINSIIKRYGSPSAIYVELAREMGRPYNERRDLEKLYNKNRLINEDAKNRILELHPEFSDPRGHDILKYKLWQEQNGRCAYSFEPISIDRLFESGYGEVDHIIPYSRSFDDSNSNKVLVLAKENQNKQNRTPFEWFGHDESKWQAFTSFVTTLKVSKKKKDLMLKKNFDDEQAESFKSRHLNDTRYITRFLKNFIEDNLEFRVEEGKKQYVYTVNGAYTSLMRKRWGFNKNREENDLHHALDAVIVAVSHPFRHRVSTYFKRRETTVANLLSRIGERFPEPWEGFVREVQARLVQDPCLFKRALESLELPSYDEDFMEEVAPIFVSRMPKRSVKGQIHEETLRRQRGLNEKGYIIVVTKTKLENITFDKNGDFNMFNKESDPKTYNTIKQRYLENGKDKKKAFSTPLYKPAKDPNKASIIRSVKTEETTNRVVELDDKTVAANASIVRTEAFRHKETGRFYLAPVYVSDVMAGRVPEKFITPHKSYENWLDINDEYEFLFNLYQNDLIKIKMPVEKDTKNYLGETASWQEGVFYFKGVHSRTAQINIIDHMNSFEDAVGSQRLLLFEKYQVDPLGNIIKVHGEKRYGVPAYSNS

SEQ ID NO: 6392 - protein, 1091 aa, synthetic construct
  REGION 1..1091: note = Synthetic
MILLGVKTLKYSIGFDIGISSVGWAVINHDKNRIEDMNVRMFDAAENPKNGSSLAEPRRNARSSRRRLRRRRHRVLRTRQFIINKGLLTNGQMLKLYDWQDEDLDIWLIRVNALERKLTDREFARILIHFAKNRGFKSNRKSEASDKENGVVLAAVKENAQLMEEKGYTTVAQLLTYESEIFKGRKRNRNGEYTHITTRHDLEHEIHIIFAKQREFGHIFANKENEETFVNIWSSQRPFATKDDISKKIGKCTLEPNEKRAPKAAYTFQRFRAIDKLNRLRILSESHPSRKVSEQERELAIQGLFSRKDVKYTDLRKLFNLSNNERFSELFYETDENIHDVEKKVFLSFVEHDKVRKIIIKVLGKEALTTFRPVDFDCIAQALTVFKDDNDIRDYLLNRYVNQNGKKERNLANRAFDKELIEELLTLSFSKFGHLSLRALHRILPHLEKGLSYDKACTEAGYSFNNKLEKEKSRLLPAVNTNEIRNPVVIRSLSQTRKVLNAIIKRYGSPTSVFIELAREMGRPYNERRDLEKLFTKNHATNEKARNAIRELHPEISAPRGHDILKYKLWQEQCCKCAYSFEPISLERLFEPGYVEVDHIIPYSRSFDDSNANKVLVLAKQNQNKRNQTPFEWFGHDEIRWGHFESFVNAMQIPSKKVAQKKRSLLLKKVFDDEQEEAFKSRHLNDTRYITRYFKNFVEENLLFREELGVKQHVFTVNGAYTSLMRKRWGFNKSREENDLHHAVDAVIVAVSGPFRHQISAYFKQREVSATQLMKRKGDYFPQPWPGFGRELRSRTLQDPKLLKMALESLELPSYDEKFISGLKPIFISRMPKRSVKGQIHEETLRRRRGETEKGYVRIITKTKLEDISFNKNGDFNMYGKESDPKTYQAIKQRYLDSGNDKKKAFIKPLYKPSKDMDNAPLIRTIKIEDKKNQIVDLGNGAVAFNGSIVRTEVFRHRESGKFYLAPVYIADVLRKRIPEKFITANKPYDQWKDITTEYEFKFNLYPNDVIKIKMSKMKSIKNNLGEVVSWQEGYVYFKGIDAGTGALKIIDHMNSYKDRIGSQNLSVFEKYQVNPLGFLVKVHGEKRHGI

SEQ ID NO: 6393 - protein, 942 aa, synthetic construct
  REGION 1..942: note = Synthetic
MVTALGKVGSIISHQGLQVSYYGKALSRGVGDRLAPHSFAEFPTYCFELRLKLLLVFFYTQNEFVIRAGGMRMRYSIGLDIGITSVGWAVINLDKERIQDLSSRMFDVAENPKNGSSLAAPRREARSSRKTIRRRRYRVGRVRKMILDKGLLSKVQAEQLYDWKDGDLDIWLIRMNALERQLSDREFARILIHYAKNRGFKSNRKSEASEKEGGQLLQAVRANKELMKENNYNTVAEMLMLDDKFQGHKRNKGGDYSHVIARSEIEEEIHTVFEKQREYGHPFATAENEDAYISIWASQRPFATQDDIVKKIGTCTFEPNEKRAPKFSYTFERFRALDKINRLKIISDTASPRFLSDEERDAILNTLMNKKQVKYQELRKTLNLADHERFNELFYDLNEANTKNENKVFLSLEGIWKMKQAVKSASNIMPETIRPIDYDTFGYALTVFKDDPDIRAYLKNEYVNTNGKKVSNLSNQAYDEALISELLNLSFSKFGHLSFKALNNILPYIEDGLQYYEACEKAGYNFNQRVGQKKHALLPVIPTKDIANPVVIRALSQTRKVVNSIIKRFGPPSFIYIEMARDMGRHYTERREIEKQFNKNRQVNDKAKERIQELHPQLSDPRGHDILKFKLWEEQNGCCAYSMKSITMDHLLDPGYTEVDHIIPYSRSFDDSNANKVLVLTSENQNKRNQTPYEWFGNDVVKWDEFTSYVNTLKVRKKKKNLLLKKNFDEDEAEQFKSRHLNDTRYITRFLKGFIEDNLQFREEEGKKQHVHTVNGAYTSLMRKRWGFNKNRQENDLHHALDAAIVAVSLPNQQKVSRYFKRSEEHASQLLKREGERFPEPWEGFRRELEARMVQDPDQLKMALESLSMAGYDEAFINEVKPIFVSRMPKRSIKGQIHEETLRRHRDIMIVDLCASLQKHHWKVYHLRKTVTFQCMVKNQTQ

SEQ ID NO: 6394 - protein, 1077 aa, synthetic construct
  REGION 1..1077: note = Synthetic
MRYSIGLDIGISSIGWAVINLDKERIEDLNSRMFDVAENPKNGSSLAAPRREARSARRRIRRRRYRVSRVRSFIVGKGLLSDAQSDQLYTWKADDLDIWLTRVNGLERKLTDREFARALIHYAKNRGFKSNRKSERKEAETGLLLKAVNENTRIMVENNYRTSAEMLLLDDKFEGRKRNKGGDYSHVLSRHEIENEIRTVFAKQREFGHRFATVENENEYINIWGSQRPFATQEDIAKRIGNCTFEPNEKRAPKFSYTFERFRAFDKMNRLRILSDQSSQRKLKDTERHAILEQLFNKKEVTYKDLRKVLQLQEHERFNELFYDLNQSNEKNENKTFLSLEGQYKFKKIIAEVEGKTLAESYRPIDYDTFAYALTVYKDDQDTRDYLLNAYVNENGKQVRNLADRAYNEEVIDALLNLSFSKFGHLSFKALYKILPYLEEGYPYHEACEKAGYHFNQRIGREKKNFLPVIPTKDIANPVVVRSLSQTRKVINSIIKRYGQPTEIYIELARDMGRHYNERREIEKQFNKNHKLNKKAKDRIYELHPEISDPRGHDILKYKLWEEQDGRCAYTTKKIEMHRLFEHGFAEVDHIIPYSRSFDDSNANKVLVLKKENQDKKNKTPYEWFGEDKAKWDQFTSYVNTLKIRKKKKDLLLRKNFDDEQAEQFKSRHLNDTRYITRFIKGFIEDNLQLRDEEGRKQQVFTVNGAYTSLMRKRWGFNKHREENDLHHAVDAVLVAVSLPFRHRVSNYFKQREEHTSQLLKREGERFPEPWEGFRRELEARLIQDPDKLKLALESLALPSYDEAFIRELKPIFVSRMPKRSMKGQIHEESIRRHRGFTDKGLNLMVKKYVLEDIPFNKEGDFPMYGKESDPKTYEAIKQRYLENGKDAKKAFSTVLRKPSKKPEKAPIIRSVKIESTANRIFHLDDKTVAENASIVRTEVFCHKKTGKYYLAPVYVSDVVEKRSPTKFVTQRKPYKDWLEITHDYDFIFNLYSNDVIKIRMPREKTSKTDSGGFVKWIEGTFYFKGVHTGTAQILIADHMNSFSDAIGSQRLALFEKYQTDPLGNLSKVHGEKRHGL

SEQ ID NO: 6395 - protein, 1077 aa, synthetic construct
  REGION 1..1077: note = Synthetic
MRYDIGLDIGISSVGWSVINRDKDRIEAMNVRMFDAAENPKNGSSLATPRREARSARRRLRRRRYRVGRVRQFIINQGLQSAVEANDLFDWQDGDFDIWLVRVNGLERKLTDREFARILIHYAKNRGFKSNRKSETKAGEGGVLLKAVQENKALMQEKAYRTVADMLLRDEKFEGKKRNKGGDYSHVLARSEIEEEIRIVFTKQREYGHPFATEENEETYIKIWSSQRPFSTQEDIVKRIGNCTFEPKEKRAPKFTYTFEKFRALDKINRLRIISTTSPQRPLTKEERLLLVEQCMEKKEVKYKDLRKILKLEDHEKFNELFYDPSETHAKNENRRFVSLDGYYQLKQIVHSVKDKTIAEAFRPIDYDTLAYAVTVYKDDNDTRDYLRNNYVNTNGKPVYNLANRVYDEQLIEQVLNLSFSQFGHLSLKALNKIIPFLEEGYQYHEACEKAGYNFNQRVGLEKKRLLPVIPADEIANPVVIRSLSQTRKIINAIIKRYGSPSNIYIEMARDMGRHYKERKDLEKQYNKNRTVNDKAKARIRELRPEISNPRGHDILKFKLWEEQSNRCAYSLDPITIEDLFDQGAVEVDHIIPYSKSFDDSNSNKVLVFAKQNQNKGNRIPYDWFGSDTVRWQEFNSYVKALKIPKKKKDLLLKENFDNDQQNTFKARHLNDTRYITRFLKGFIEDNLEFRKEEGKKQHVFTVNGAYTSLMRKRWGFNKDREENDLHHAVDAVIVAVSHPFQNRVSRYFKRSEQHASQLLKRKGERFPEPWEGFTRELEARLVQDPDKLKLALESLSLSGYDEEFISQVKPIFVSRMPKRSVKGQIHEETLRRHRGFTEKGLNLMVKKYALEDIPFDKNGDFPMYGKESDPKTYQVIKERYLEYGKDKKKAFNDPLFKPSKNPENAPIIRSIKIETTANQVFYLDDKTVAENASIARTEVFRHKENGKFYLAPVYVSDVVAKRVPEKFITALKPYSEWDLITDAYEFLFNLYPNDVIKVKMPREKTSKTNTGEIKKWIEEIFYYKGVDTATAQLNITEHKNEFSDRIGSKNLKLIEKYQVDPLGNLTKVNQEKRHGV

SEQ ID NO: 6396 - protein, 1078 aa, synthetic construct
  REGION 1..1078: note = Synthetic
MRYDIGLDIGVTSVGWAVINLDKNRIEDLGVRIFEVAENPKDGSSLATPRREARSSRRRLRRRKYRVSRVRKLIVEKGLLTSVHADALYDWRDGDFDIWLLRVNALERKLQDREFARILIHAAKHRGYKSNRKSESKEEDNGVVLSAIKENHEKMLEKGYLTTAQLLVHEAADYEGRKRNKGGQYTHVFARADLENEINIIFDKQQEFGHSFATQENKEIFLEMWGSQRPFASKDEIMNKIGECSIEKGEKRAPKFTYRFERFRALDKLNRLRILAPEQKGRPLTAEERETVLNMLLEKKEVKYTALRKELHLQEEERFNELFYDEGKSLAINEKVTFLSLEGQYKIRTIIKETEGKDAVYEYRPIDYDAIAYALTVFKDDQDIKDYLLNQYVDTKGRKQFNISNRIYSDGLIDSLLNLSFSKFSHLSLKALTQLLVHMEEGKTFKEACDFCGYSIGQTKNQKKTRLLPVLPEEEIRNPVVLRALSQSRKVINAIIKRYGSPSNLYIELAREMGRPYKERREISKEYNTNRSVNERAKSSVIEFSGIKDPRGHDILKYKLWESQDGRCAYSLKTIPLEQLFEIGYAEVDHIIPYSRSFDDGNQNKVLVLTKENQDKQNRTPYEWFGHNEIEWQKFISFTSSLKLGRKKKSLLLKTNFDSGEEEAFRERHLNDTRYITRFLKNYIEENLKFREEEDDKQRVFTVNGAYTSLMRKRWGFNKNRQENDLHHALDAAIIAVSRPFRYQVSAYFKQREMSVYELLRKKNRRFPEPWEGFSRELEARMLQNPIHFKLALESLDSDSYDDQFINETKPIFVSRMPKRGVKGQIHEATLRRKRDENEKGYTVVVSKTKLENIPFDKKTGDFAMFGKESDLKTYNAIKERYLSYGKDSKKAFTEPLYKPSKSPESAPVIRSIKIEDKRNLYVNLNDKTIADNASIVRTDVFQHEKDEKYYLLPVYVSEVKNVKNLNKFITAKRPYTQWVEKTDEFMFCFSMYPNDLIRVKLPAPKESRDSSNEIITWQDGFFYYKGTDTQNASITILSQEGSLLDRIGVQRLLTFEKYQVDPIGNIQIVTKETRHGV

SEQ ID NO: 6397 - protein, 1084 aa, synthetic construct
  REGION 1..1084: note = Synthetic
MKYSIGLDIGISSVGWSVINLDKKRIEKMGARLYDAAENPKNGSSLAAPRRDARSARRRLRRRRYRVGKVRQFILEKGLLTRGQMEQLYDWKAGDLDIWLVRVNALERLLTDREFARVLVHLAKNRGYRSNRKSESKKDDNGQVLSAIKANKELMKEKGYQTVAEMLVSEPEKFAGRKRNRDGEYTHVLARGELEQEIQLIFEKQHEYGQRFATPDNKKIYIEIWSAQRPVATKEDILKKIGDCTFEKGEKRAPKASYAFQYFRALDKLSRLRILSSSQPSRELAEEERNAIIPYLFDKEKVTYFELRKKLSLAEDQRFNDLFYDPAEDLKKNENKVFLSLKEQYEIRKIIKNVEGKDALVQYRPVDLDEIAYALTIFKDDKDTVDYLSNNYVNEKGKRINNRANRKYNKELIDNLLSLSFSKFGHLSLKALNKLIPLMEKGIPYFRACDELGYRLDEQVGESKQHLLPVIPADEIRNPVVIRSLSQTRKIINGIIKRYGSPLYMYIELAREMGRPYKERRDLDKQYNKNRAVNDDAKAYIQELYPHKNPQGHDILKFKLWQQQDCKCAYSQETIHLNDLFESGFTEVDHIIPYSRSFDDSNTNKVLVLSKMNQEKKNRTPSEWFGADEHRWKKFESYVKTLKVAKKKKDLLLKRNMDDEQEQTFKARHLNDTRYITRFIKSFVEDNLEFREVKDAKQHVFAVNGAYTSLMRKRWGFNKNREANDLHHAVDAVIIAVSQPFRYEVSTYFKHREVSLKQLLKRTWDRFPEPWEEFVKELRARILQEPERLKLALDSLALDSYDQEFISEVKPIFISRMPKRSVKGQIHEETLRRVRGTRKDGYARIVTRTKLENIPFDKKTGDFPMFGKESDMKTYQAIKQRYLESGKDKNKAFIEPLYKPAKDMNKASIIRSVKIEDKANQVVSLKDEAVAANASIVRTEVYQHKKTGKFYLVPVYVADVVAGREPKKFIKPLQPYEKWVDITDDYKFLFNLFSNDVVYVKMKKSKTTKSNLGETIMWQEGYFYYKKTDSATAQIGIMDHMNSYVDRIGSQNLQIFEKYQIDPLGHLTKVHGEKKYGIPALSHS

SEQ ID NO: 6398 - protein, 1085 aa, synthetic construct
  REGION 1..1085: note = Synthetic
MKYSIGLDIGISSVGWAVVNTDMERIEKMGVRMFDAAENPKNGSSLAAPRREARSARRRLRRRRYRVSRVRDFILKKGLLTQIEMDQLYEWKAEDLDIWLVRVNGIERKLTDREFARVLIHFAKNRGFKSNRKSEEAETETGVVLSAVKENTDLMKEKGYRTVAEMLLFEEEKFNGCKRNKGGEYTHVISRAELENEIRLIFAIQRELGHTFATTENEAEYIKIWSSQRPFAAKDSIINKIGTCTFEKNEKRAPKFSYTFERFRVLDKLNRLRILSVSEPQRSLTDEEREKALQSLLNKKEVKYKDLRKLFKLTESEKFNELFYDPSLTVEKNENITFLSLEGQWKIRKAVEAAEGKVLANSYRPIDIDTFAYALTVFKDDQDIRDYLNNTYINERGKKLINLADRQYDGSLIDSLLNLSFSKFGHLSLKALNRILPYLEEGDLYHIACEKAGYDFNQKTNLQKHTLLPVVPANEIANPVVIRSLSQTRKVINAIIKRYGSPTAIYIELAREMGRPYNERRDMEKQYNKNRQINSDAKNHILELHPEFGNPRGHDILKYKLWQEQNGRCAYSVKPISIERLFEPGFAEVDHIIPYSRSFDDSNANKVLVLARENQNKQNRTPFEWFGHNEAKWQEFTSFVTTLKVSKKKKDLLLKKNFDDEQAETFKSRHLNDTRYITRFLKGFIEDHLQFRVEEGMKQHVHTVNGAYTSLMRKRWGFNKNRTENDLHHALDAVIVAVSHPFRHRVSTYFKRRETTAANLLSRIGERFPEPWEGFVREVQARMVQELELFKRAIESLELPSYDQEFIAEVEPIFVSRMPKRSVKGQIHEETLRRKRGFDEKGYIRVVTKTKLENIKFDPTTGDFNMYNKESDLKTYNAIKQRYLQSGQDKKKAFSTPLYKHAKDPSKASIIRSVKIEDTTNRVVELNDKTVVANASIVRTEVFRNKETGRYYLAPVYVSDVMMRKIPEKFITPGKSYENWVDINEEYEFLFNLYPNDIIKIKMPKEKSTKNRLGEKVSWQEGIFYFKGVHSRQAQINIIDHMNSFEDAVGSQRLLLFEKYQVDPLGNITKVQGEKRYGIPAYSHS

SEQ ID NO: 6399 - protein, 1083 aa, synthetic construct
  REGION 1..1083: note = Synthetic
MGAGELRYAIGLDIGITSVGWAIINQDKERIEDLGVRIFDRAENPKNGSSLATPRREARSARRRLRRKRYRISRIRKFIVERGLLTKTQASQLYDWRDGDLDVWLLRVNGLERKLSDREFARILIHYGKNRGFKSNRKSEASEPEGGELLQAVRKNAKIMEENNYRTVAEMIVLDERFEGRKRNKDGSYSHVLSRSEIEKEIRTVFEKQREYGHSFATHENEERFIEIWSAQRPFSTQDDIEKRIGVCTFEENEKRAPKASFTFEKFRALDKLNRLRIISDYEPSRPLTDKEREQVIDLLFNKKEVKYKDLRKVLSIPDYARFNELYYDRNESNEKNENKTFLSLQAYYKMKKAIKQIEGKTLAESYRPIDYDTFAYALTVYKDDQDAKDYLMNNYVNENGKRIRNIANKSYNEVLIEELLHLSFSKFGHLSLKALNNIMPYIEAGDQYHEACRKAGYTFNQKVGEEKKKLLPVIPTEDIVNHVVIRALSQTRKVLNAIIKRYGSPTEIYIELAREMGRNYTERKELEKQFNKNRVVNENAKKRIQELVPGIHEPRGHDILKYKLWEEQHQRCAYSMKPISIRDLFNAGYAEVDHIIPYSRSFDDSNANKVLVLSQENQNKRNKTPYEWFGHDTKKWEEFVSFVNSLKVSKKKKDLLLKQNFDDAQAEEFKSRHLNDTRYITRYLKKFIEDNLLFREEKDNKQTVFTVNGAYTALMRKRWGFNKNRQENDLHHALDAAIVAVSRPFRHRVSAYFKRKEEKTSQYIKREGERFPEPWDGFAKELEARLIQDQEKLKFALKSLSLDSYDEDFINRIKPIFVSRMPKRSVKGQIHEETLRRIRGYNEKGYLRLVTKTRLQDIPFDKKTGDFPMYGKDSDPKTYRAIKERFLEYGGNVKKAFAEPLYKPSKNPKSAPIIRSVKIETFKNQAVSLKDKAVAENASIVRTEVFRHKKSGKFYLAPVYTSDVMAKRIPERFITANTPFAKWDYITEEYEFLFNLYPNDVIQIKLPRKKKAKDNLGNTLEWSEGIFYFKTIDRGTGSLNIINHMNSFEDRIGSRNLKIFEKYQVDPLGNLKRVKKEKRHGI

SEQ ID NO: 6400 - protein, 1077 aa, synthetic construct
  REGION 1..1077: note = Synthetic
MRYSIGLDIGISSVGWAVINLDKDRIEAMNSRMFDAAENPKTGSSLATPRRDARSTRRRLRRRRYRVGRVRQFIINQGLLSEVESDRLYDWQDGDLDIWLVRVNGVERKLTDREFARILIHYAKNRGFKSNRKSETKVGEGGVLLKAVQENAELMKEKNYRTVAEMLLRDDKFEGRKRNKGGDYSHVLARSEIEDEIRIVFEKQREYGHSFATKENEEAYIKIWSSQRPFSTQEDIVKRIGNCTFETKEKRAPKFSYTFEKFRALDKINRLRIISSDSPQRPLSQEERELLLDYCFKRKEVKYKDVRKLLELTDNQRFNELYYDPSMTNDKNENRKFVSLDGYYQLKKIVREIEDKTIAEAYRPIDYDTLAYALTVYKDDNDTRDYLRNNYVGPEGKKIRNLANRVYSDQLIDELLNLSFSKFAHLSLKALTNIIPFLEEGYQYHEACEKAGYNFNQRVGKEKKKLLPVIPTDQIANPVVIRSLSQTRKIINAIIKRYGSPSQIYIEMARDMGRHYSERKDLEKQYNKNRSINDRARNRIKELHPEISDPRGHDILKYKLWEEQNGKCAYSLKPIKQELLFNPGYAEIDHIIPYSRSFDDSNANKVLVLARENQNKKNRTPYEWFGSDTVRWEQFKSYVYTLKVRKKKKDLLLKENFDHDQAETFKSRHLNDTRYITRFLKGFIEDNLQFREEEGRKQYVYTVNGAYTSLMRKRWGFNKNREENDLHHAVDAVIAAVSLPFRHRVSNYFKHSELHASQLLKRKGERFPEPWEGFSRELEARLIQEPERLKLALESLALSSYDEEFINHVKPIFVSRMPKRSVKGQIHEETLRRHRGYTERGLNLMVKKYALTEIPFDKNGDFPMYGKDTDPKTYNAIKERYLEYDKDKKKAFIEPLFKPSKNPENAPLIRSVKIETTANQVFHLDEKTVAENASIARTEVFRHKENGKFYLAPVYVSDVVAKRVPKRFITAHKPYRDWDFITDEYEFLFNLFPNDVIKVRMPREKISKTNLGEKVTWKEGLFYFKGVDAATAQLTIMEHKGSYSDRIGSKNLKVFEKYQVDPLGNLTKVNKEKRYGV

SEQ ID NO: 6401 - protein, 1174 aa, synthetic construct
  REGION 1..1174: note = Synthetic
METQYLIGKEAPVTKLPQTFPKIIDENLMLGLDIGIGSCGQALISSDRIYSTPLGQLPLFFNTEAPSYIRYIGVRAFDVPEEMSNTGKITLKNPERRAKKLLRRVTKRRAKRMYLTRHLLKREGILPPDYHVDKIEWRKKHETSTPWQWRLEGLTRKLSDWEWAASLLHFAKHRGFKSNKKSDFDSKGKDGGTLQSSRANHAALQKYQSIAEMMLQDPRFKDRLRNREENYQAMVLRLDLENEIKLLFEKQRSLGNTHTSPQLETEFLKIFNQQKPLQDPYALLGKCPFERTEKRGSCFSYSFELSRALQKLNTLTLVLANQDKILLKDYINAPNGGYRNFIEKFGSKKSITWKDLREWFSIDDTIHFLDLPISAKGQKQSRVDDKSSAMDALRKDTEKGDCITRSTKKVCAQGSYTLRNVLGDELWNALLNKGDLASLDNAAFCLTFFESTQTIIDILDGKNLEPHLHPNNQEQPPDLTIDPQVAQAIKKDLNSDSPSLLKFKGTVSLSSKASRKLLPFLEQGLVYSDACAKAGYQHTNSDYALKNIINPVVVSVVREVMKQVVHVINLAGVIPGSICVELGRDLGKSIDERNNTARGIHERTEERNANREALAKELEKSEADIDDDMLLRYELWHEQSGLCPYCGETLPTTKQYVRGNNVQIDHILPRSRSHDNSFNNKVLVHTGCNQNKKNQTPAEWLDATHNSDKWKLFAATVQQMPHMKPFKKKRYLLNETFNNSDESGKFIARNLTDTRYISKIVLEYLKDIYRLAGEDPNAKGAQRRIFAQPGALTHLVRKAWGLEHLKKDLQGNRIDDTHHAVDALVCACLSEGQRQWITRSEQIKRATPFSQTVESLQNAYKDMEEKHQDRGTPLRVSPPWKSLRDDIVHALRQLNVSRRECRKGKGPLHNDTFYRMESDEKGNPCYYNRKSLLEKDKGKIVPLLHKTEDLKNVKGIDEPKNNWLKKALTEWIEKGSPIDETQLPRTSAGTVIRKITKIEGYKSGRQIHHGYVIGGSIVCIDIFSKTKTSRKKSKTTDAKSPEEKNYFLVPIYSYHLEDEHPPMRAICADTPEDQWDLIDESYTFEFTLWPNSLFEVQKKGSAKKGEGEYLRGYYRGVNRSTGRIEARSLNDAEEKLDCSVKQGCQFFRKLNIDRLGRITCVKGEKRVWHGKVCT

SEQ ID NO: 6402 - protein, 1515 aa, synthetic construct
  REGION 1..1515: note = Synthetic
MIIYKKLTMMKTQLDLNEDRLYKHVLGLDLGVTSIGFAHVVEYENRNESEIKQIGVRVIQLDNFDKVDKSGKISESKNPAGDFAAGKGLTPNGSRTKKRGARRNLDRYQDRRDNLLEVLTKSGFINSETKRTEDGKHTTHQTWEIRAKAVSEKVEKEEFARILLAINKKRGYKSSRKAKNEDEGQAVDGMAVAKRLYEENLTPGQYAYEVLSGGKKSIPDFYRSDLQAEFDKIWNFQKQFYPNILTDEFYEVLKGKGQRATSAAFWKIHQFNTADIKDLEDELKNERTIKLSKRDQKKLQAYKWRSEAVVKQLGKEEVAFVLTEINNNLNNSSGYLGAISDRSKELYFNKQTVGQYLYKQLKENPHTRLKNQVFYRQDYLDEFETIWEKQAQFHPELTQELKEEIRDIIIFYQRKLKSQKGLISFCELESKEVVINDTKKTIGLRVAPKSSPLFQEFKIWQNLNNILVRKKGSRKRVVKAQNQHSLFEEPKEIFSLDLTSKEKLFEELNLKGNLSAKNCLDILGLNSNEWELNYTHLEGNRTNKSLYEAFLKILDIEGYDVKDLLKVKSSKDEVELDDLKVPASEIKNMVREIFSTNNIATEILDFDAELDGKAFEKQASYQLWHLLYSYEGDDSQSGNEKLYELLAEKFGFMREHAQILANVSLVDDYGNLSSKAMRKIYPHIRENNYSTACELVGYRHSKHSLTKDELKDRVLEDRLELLRKNSLRQPVVEKILNQMINVVNALIEKNSERDENGNITKYFKFDEIRIELARELKKNAAERAEMTTNINAAKLAHEKIFKILQNEFGIKNPTRNDIIRYRLYEELKGNGYKDLYSNTYIPREILFSNQIDIDHILPQSRLFDDSFSNKVVVFRKDNLKKGNQTAFDYIGSEVGEEGLKNFIERVESLYELGKKNKEEGISKAKYQKLLKSASEIGDGFIERDLRESQYIAKKAKELLFKVTRSVVSTSGSITDRLREDWGLINVMKELNLPKYKSLGLTEVQERRNGHQVEVIKDWTKRNDHRHHAMDALAVAFTKRSFIQYLNNLNARRKDKYEDGVSNTNNRKSIGASDLKISTRDVLGIEEKELYRDEEGKWRFNLPIPNFRQVAKEHLENVLISHKAKNKVVTKNKNKISGKEKSQITLTPRGQLHKETVYGKYRFYQSKDEKVSAKFDLETIEKVANPSYKAALLQRLNENENDPQKAFSGKNALSKNPIYISMENDIKVPDTVKLVWLEEDYSIRKDVTPENFKDEKSIEKILDEGVKRILKNRLKEFGGDPKKAFSDLDKNPIWLKEEKGISIKRVRISGVKNAEPLHYKKDHFGNDILDENGNKIPADFVSTGNNHHVAIYKEPEFDKKGQPVLDELGNQKYNLKEKVVSFFEAVERVNQGLPIIDTTYNHHLGWQFFFTMKQNEMFVFPNEKIGFNPIEIDLLDSKNKKLISPNLFRVQTLSIVQYGNNTVRDFKFRHHLETVLDDMRELQGVTFQQLKSLPPLKNIIKVRVNHLGDIVSVGEY

SEQ ID NO: 6403 - protein, 1484 aa, synthetic construct
  REGION 1..1484: note = Synthetic
MAKKILGLDLGTNSIGWAYVTEGETQNESEIKQIGVRVNPLTVDEQTNFEKGKSITTNADRTLKRGARRNLDRYQLRRENLLEVLTKANIINATAKLCEDGKQTTFQTWELRAKAASEKIELNEFARVLLAINKKRGYKSSRKAKNSEEGQAIDGMGVAKKLYEENLTPGQLVYQNYEKGIKTIPDFYRSDLQSEFDKVWNFQKQFHPEILTDEFYKELQGKGQKATSALFWTKYQFNTADIKDFEDSFKNQFAAKFDTRTLKKIQAYQWRSEAVSTQLEKEQMAYVLTEINNNLNNSSGYLGAISDRSKELFFNQETVGQNQFNQLLKNRHTALKNQVFYRQDYLDEFEKIWTTQAKYHAQLTDKLKEEIRDIVIFYQRKLKSQKGLISFCEFESKEIEKDGKKKTVGMRVAPKSSPLFQEFKIWQILHNVLVKKAGSKKRSVKKENQPSLFEEEKEIFELDLAAKNQVFEELNIKGGLKANQIIEILGYKPKDWEMNYAQLEGNRTNQALYNAYLKILEREGYNEDLLKLSDKDEINVNELKTPASEIKAMVKAIFEVLEINTEILEFNAELDGKDFENQASYQFWHLLYSAEDDTKKYSQEDVLLYGNDNIGLKKQLCSKFGFKPDHAKILANVVFQDDYGSLSTKAMRKIYPYIKENKYSEACAYVSTDYSKLSQREDDIYDKLAKNYRHSKWVDKTENETRALKSKLDLLPKNSLRNPVVEKILNQMANVVNTLIDKENDQLKSEGKEPNFQFDEIRIELARELKKNAAERAEMTTNINTAKTAHEKIVKLLQAEFGLKNPTRNDIVRYKLYEELKNNGYKDLYTDTYIPREILFSKQVDIEHIIPQSRLFDDSFSNKTVVYRKDNLDKGNQTAIEYIENKFGETGLISFQERIEALHKMWNKNNPENGITKAKYQKLLKRSSEIGEGFIERDLRDSQYIAKKAKEMLFGITRSVVSTSGQITDRLREDWDLVNIMKELNLPKYRALGLTEMEERKYGQKVEVIKDWTKRNDHRHHAMDALTIAFTKRSFIQYLNNLNARRNEKSDDTISNSKGRTSMDTSNLKLSTRDVLGIEEKETIIRTDDQGNKKRVFKEPITNFRQVAKEHLENVIVSHKAKNKVVTKNKNKVRGSNKVQEALTPRGQLHKETVYGKYQYYVQKEEKVGAKFDKETIDKVGNPLYKKLLLQRLEEYGNDSKKAFTGKNTLEKNPIYLNVEKTEVLPEKVKLVWLEEDYSIRKDVTPDLKIDKVIDKGVRTVLENRLKEFGGDAKKAFSDLDKNPIWLNKEKGIAIKRVTISGVSNAEALHYKKDHFGKPILDANGNKIAVDYVQTGNNHHVAVYRDEKGNLQERVVSLFEAVARVNLGLPIIDKTYKQSEGWQFLFTMKQNELFVFPNEKTGFNPADIDLLDPKNKKLISPNLFRVQKIANKNYFFRHHLETTVDTNPALKDVTYKPQLGLNAIEGIIKVRTNHLGDIIGVGEY

SEQ ID NO: 6404 - protein, 1482 aa, synthetic construct
  REGION 1..1482: note = Synthetic
MKRILGLDLGITSIGFAYVTEGKTPEESSIVQIGVRVNPLTVDEQTNFEKGKPITTNAERTQKRGARRNLDRYQLRRSNLIETLTDAKIISTETPLTEIGKDSTFDTWRLRSKAATDKIEKEEFARVLLAINKKRGYKSSRKAKNKDEDEGQIIDGMEVAKRLYDENITPGQLVFQMLQKGKKYIPDFYRSDLQAEFNNIWKFQKQFHPDILTDEFYEELQGKGQRATSALFWSKYQFNTADIKDIEDSLKTVDTIKLNNREKKRLQAYKWRNDAISTQLGKEELAYVITEINNNLKNSSGYLGAISDRSKELYFNKETVGQNQYKQLLKNRHTSLKNQVFYRQDYLDEFEAIWTEQAKHHPELTQELKAEIRDIIIFYQRKLKSQKGLISFCEFEVKEIEVNGKKKTIGLRVVPKSSPLFQEFKIWQNLHNVVVRKKGTKKRLTKDPNQALLFGDEKEIFILDQDAKQYLFNELNIKGNLSASSTIELLGYKPADWEINYSELEGNRTNKALYEAFLKIIESEGYDVKELLKVKSNRDEIELNDIKVSADEIKSMVKEIFKSLNINTKILDFNAELDGKEFEKQASYQLWHLLYSYEGDDSASGNEKLYQLLEAKFGFKREHAQILANIALQEDYGNLSTKAMRAIYPYIIENQYSTACEFAGYRHSKHSLTKEEIEKRELKSKLELLPKNSLRNPVVEKILNQLVNVVNTIVDKENDKLESEGKPRDFHFDEIRIELARELKKNAQERAEMTTNINAAKIIHEKIAKLLQSEFNIQNPTRNDIIRYRLYEELKNNGYKDLYTDTYIPRERLFSKDIDVEHIIPQAKVFDNSYSNKTLVYRDINLKKSNQTAYDFIATEFGEEGLKRFEQRISNLFEFGKKNKDEGISKAKYHKLLKTESQIGDGFIERDLRDSQYIAKKAKELLFQITPSVLTTTGSITDRLREDWDLINIMKELNLPKYRALGLTEMEERKYGQQVEVIKDWTKRNDHRHHAMDALTIAFTKRSYIQYLNNLNARSKDSSWQNISNKDDSYSIETSDLKISTRDVMGIEANELHRDKDGKLRFNLPIPNFRQEAKEHLENIIISHKAKNKVITKNKNKINTKNGKLTKIELTPRGQLHKETVYGQYQFYQTKEEKIGTKFDEATIMKVSKSEYRNALLKRLYENENDPKKAFGGKNSLSKKPIYLDEAETVKVPEKVQLVWLEKDYSIRKDVNPDNFKDEKSINKVVDVGIRNILLHRLREYGNDANKAFSDLDKNPIWLNKEKGISIKRVTISGVNNAVPLHHKKDHLGDIILDTDEKPIPVDFVSTGNNHHVAIYQDEKGNLQEKVVSFYEAVIRANLGLPIIFNNPMEIIDLVLERNITDEIILNALPEKEWKFLFTMKQNELFVFPNEQTEFNPKEIDLMDPKNKKLISPNLFRVQKLGSLLSGFWFRHHLETTVDSNQTLKGITYIVIQSANNLKEIVKVRTNHLGDIVSVGEY

SEQ ID NO: 6405 - protein, 1471 aa, synthetic construct
  REGION 1..1471: note = Synthetic
MKKILGLDLGTNSIGWAVVNEAEHVDEQSSIVKIGVRVNPLTADELSKFEEGKSITTNAYRTLKRGMRRNLQRYKLRREHLLALLKEKGFISEETILSESGNRTTFETYRLRAKAATEEISLEEFARVLLMINKKRGYKSNRKAKNTEEGQLINGMEIAKRLYQENLTPGQLCWQLLQDGKKSLPDFYGSDLQSEFDKVFEFQRQYYSFLTDELKKELSGKNDKAVWAICAPSKEKESSDEKFVWKWVETVTEWDEETSANQTVEKVKTLEGLKREGNTAERKRENYEWRSRALEEQLSPEQLIVVFQEINKQINNASGYLGNISDRSKELYFTKQTVGQWKMKKLDEDPNHSLKNKVFYRQDYLDEFEKIWETQAKYHSELTPELKKEVRDIVIFYQRPLKSQKGLISICELEGKQMEFEKEGKNKLVTIGPKVCPKSSPLFQEFKIWQRLNDVQVVNAEGERRFLNQNEKNVLFEELNYREKLSKTETLKLLFDKKHKEYDLNFEGLDGNRTQSELFKTYQKIIEMTGHGEYDFSKMSAKAKVELVTEIFEGLGFNTEILTFDSSIKDKKEFEQQPFYQLWHLLYSFEGDKSVLGNEKLIEKISEMYGFDKESATVLAGVIFQPDYGSISAKAIRKILPDMMRGDNYSTACEKAGYNHSKRSLTKEELEKKVWKDKLDLLPRNSLRNPVVEKILNQMINVVNAVVDAYGKPDEIRIELARELKKSAKERDELTKAINNTKKQHDVYTKKLQEEFGLTHVSRNDIIRYKLYEELRSNGYRTLYSNTYIPREELFSKKFDIEHIIPQAKLFDDSFSNKTIEARDVNIKKSNMTAWDYVVLTNNEGYANNEYKNRVEKLFADKIISKSKRDKLLMREVDIPSDFINRDLRDSQYIAKKAREILEGMVKFVVPTTGSITDRLREDWQLVDVMRELNWDKYDRLGMTYYEQDRDGRQIPKIKDWTKRNDHRHHAMDALTIAFTKRSFIQYLNNLNARVQKGVDEWIDLDTVELSKLDKEQRTSVVYAIEKKELYRDSHGKLRFNPPNLTNNRDIEQQLSQFRREARRQLENVLVSIKAKNKVVTRNVNKAKNKSGEYKMQLTPRGKLHLETVFGSQNRYVTKEEKVNASFDAEKIKTVAVKRYREALVARLAQYGGDAKKAFTGKNTLDKNPVWVNAQQSEKVPEKVKTVEFEKIYTIREEVTPDLKIDKVVDAHIKKILQNRLAEYGGDAKKAFSNLEENPIWLNKERGISIKRVTIERMGNYIALHDKRDKNGNLTLDENGKKLPVDFVSTGNNHHVAIYRKPVLDKNGLPVLNENNEVEYELDEKIVSFYEAASRAMLGLPVVDKEYRKSEGWQFLFTMKQNEYFVFPRYESYIDSEGKEAQRMIFNPTEYDEAWYKNPENYALISPNLFRVQKFSYKNYVFRHHLETTIDLSEYNLRGTTWVDFRSSKWLDKILKVRVNHIGQIVSVGEY

SEQ ID NO: 6406 - protein, 1470 aa, synthetic construct
  REGION 1..1470: note = Synthetic
MKKILGLDLGTNSIGWALVNEAENENEKSSIIMLGVRVNPLTVDEQKNFEKGKSITTNADRTMKRGKRRNLQRYKLRRENLIEILKENGFITDEPILSENGNYTTFETYRLRAKAVTEEITLEQFARVLLMINKKRGYKSNRKAKGAEEEGVLIDGMEVAKLLYEKDLTPGQYCLQLMEQGKKQLPEFYRSDLQEEFNRIWAKQQEFYSEILTDKLKENLREKSEKATWTICKEPFNIVGIPRTTKGEELKKENFAWRTKALSEKLDLESLAVVLQKINGQINNSSGYLGAISDRSKELYFNKQTVGQYQMAVLAQNPNASLKNMVFYRQDYLDEFNIIWEKQAEFHKKELTEELKKEIRDVIIFYQRRLKSQKGLIGFCEFESRQIEVEIDGKKKIKTVGSRVIPRSSPLFQEFKIWQTLNNLEVSGKGRKSKKKKEHSLSLFTNQEDPLLIYGKRELYQEEKELLATELSIKEKLTKSDILKLLFDNPQELDLNFKEVQGNLTQAKLFAAYRDIIEQTGHILDLKKSASEILENVEQIFSGLGYNTDIIRFNSDTDNLDNDPMYKLWHLLYSFEGDNSKTGNENLINKITNLYGFEKEYAAILANITFQDDYGSLSAKAIRKIFPYLKEGNKYDISCEYAGYRHSASSLTKEELENKIYKDRLEILPKNSLRNPVVEKILNQMVHVVNAIIADPQLGKPDEIRIELARELKKNAKERQELTKSIEESTRMHKQYREILSKPPFNLTYISRNDIIRYKLYEELKDNGYHTLYSNTYISPTTLFSGDFDVEHIIPQSRLFDDSFSNKTLELRSINIEKGNATACDFVKEKYGETNNENSMENYLNRIEKLYKTGVLSRAKYNKLKMQEKDIPSGFIERDIRNTQYIAKYAKTMLSDLVKVVVSTTGAITDRLREDWQLIDVMKELNWEKYKNLGLTTEFTNEEGYRIRQINDWTKRNDHRHHAMDALTVAFTKRQFIQYLNNLNARRTDENQSISNTEEEEYDNFAITTEDVLLNTRDVLGIEKNYLYRDHRNKLRFYPPIPLNDFRAEAKHHLENTLISIKAKNKVTTQNINFTKRKGGVNKKTQQTPRGQLHLETVYGSQKQYVVKEESVNAKFDAEKIATVSKPAYREALLRRLQEFDNDPKKAFTGKNSLTKNPIWLNKLQTAQVPEKVKTISFETAYTIRKEISPDLKLDKVIDLGIRRILENRLKEFRNDAKKAFSNLDENPIRPNKEKGIAIKRVTISGISNAEALHDKRDKEGNLILDKNGKPQPVDFVNTGNNHHVAVYRKPVLDKNWNHAEDENGNKKYELEENVVSFYEAVSRKNLGLPVIDKTYKASEGWQFLFSMKQNEYFVFPRTEKVEKIDEETGEITEEEIVVFDPNDIDLLNPDNYKLISPNLFRVQKFSKLIYGNSVVREYVFRHHLETSIKNTSSVLKGITWIDFRSSKGLDKIVKVRVNHIGKIVSVGEY

SEQ ID NO: 6407 - protein, 1460 aa, synthetic construct
  REGION 1..1460: note = Synthetic
MLKNILGLDLGTTSIGFAHVIENEKDISQSEIRQIGVRIIQYDNFVKIDKSGKVSESKNPEQDFASGKGLSPNAGRTLKRGARRTLDRYQDRRSNLINTLFNANIITHETKLAEDGKNTTHSTFALRAKAVVSKIEKDELARVFLAINKKRGYKSSRKAKNEDEGQAIDGMAIAKRLYEDGLTAGQLVLNLLREGKKTIPDFYRSDLLAEFDKVWSYQNQFYPEILTNEFKKELEGKGQRATAGLFWICYQFNTAENKAKSREEKKLQAYQLRSDAVSRQLEKEEVAYVIAEINNNLNNSSGYLGAISDRSKELYFKQETVGQYLYRQLQKNPHTKLKNQVFYRQDYLDEFEAIWKEQAKHHPELTAELKTEVRDITIFYQRKLKSQKGLISFCEFESKEIAIDRNGQQIKQTVGLKVIPKSSHLFQEFKILQRLNDVLIRKKGSKKRVAKNTDAQGELFQSEEEIFVLDHDTKQDLFIELNLKGNLPSSKIIELLGYKPADWEMNFSQLEGNKTNQSLYNAYLKIIENEGYDLKELLKIKINRDEIELNDLDTPATEIKKMVSDIFDSLGIDTSILEFDAELEGKLFEQQPSYKLWHLLYAYEGDNSSSGNEKLYKLLEKKFGFNREQSKVLASVTFLDDYGSLSTKAIRKIYPFIKENNYSTACELAGYRHSASSLTKEEIAKRPLKDRLELLKKNSLRNPVVEKILNQVVNVINALIVKNSERDENGTVIKAFHFDEIRIELARDLKRNAEERREMTANINSAKISHDKIFKLLQNEFGIKNPTRSDIIRFKLFDELKNNGYKDLYTNTYIPREILFSKQIDIDHIIPQAKLFDDSFSNKTVIYRRDNLDKGNKTAFDYILSKYGELASIEYQQRIANLFEQRNKSKDDASSGINKAKYQKLLKREIEIGDGFIERDLRNSQYIAKKTRNMLFEISRVVTPTTGSITDRLREDWDLINIMQELNFDKFKKLGLTEMVEKKDGTFKERIVDWTKRNDHRHHAMDALTVAFTKHNHIQYLNYLNARKDETHKLHNNIIGIETLETDWKYDDQGNKKRVFKSPLINFREQAKDHLENVLVSHKPKNKVTSKNKNQIAGKDNPQIVLTPRGQLHKETVYGKYKYYVSKEERIGGNFDLATIEKVSNPAYKKLLFQRLAENGNDPKKAFTGKNAIGKNPIYLDATQLEQVPEKIKLVWLEEDYSVRKDVTPENFKDEKAISKILDQGIKEILLDRLRTNKGDSKKAFSDLDKNPVWLNEKEGIAIKRVKISGVKNAEPLHHKKDHLGNSMLDKEGKEIPVDFVSTGNNHHVAIYRDDKGNLQDNVVSFFEAVQLVSTGEPVIDKSYNRGLGWQFLFTMKQNEFFVFPNDKTGFNPKEIDLLNPKNAKVISPHLFRTQKLSKVTYGNSAVRDYVFRHHLETSVEEKNELNGIAYKQLKSLAYLEGAVKVRLNHLGEVVKVGEY

SEQ ID NO: 6408 - protein, 1454 aa, synthetic construct
  REGION 1..1454: note = Synthetic
MKKILGLDLGTNSIGWAVVNEAEMPTEKSSIVKLGVRVINYDNFVSTETGKDSMDPVKDFSGGKGISCNAKRTMKRSARRNLQRYKLRREILIDVLKVNGFIGDDTLLSENGNKTTFETYRLRAKAATEEISLQEFARVLLMINKKRGYKSSRKAKSTEEGQLIDGMEIAKRLYEENLTPGQLSLQLLMNGKRHLPDFYRSDLKAEFDKIWQKQNEYYSDLLTEQLRSDLQGKNKAQTWAICAKPFQIVGMKRAKKGQELKTENYQWRSDALAKQLELEELAIVFQEINAQINNASGYLGDISDRSKALYFNNMTVGQYQMAQLEKNPNYSLKNQVFYRQDYLNEFEKIWETQAKFHKELTQELKKEVRDIIIFYQRPLKSQKGLISFCEFESRQIEVEIDGKKKTRTIGLRVCPKSSPLFQEFKIWQVLNIIVVSGKVVPNQQTDLFGFEGSYKQGKRFLYQEEKEKLYAELNYKEKLSKSDALKLLFGNQKDLDLNFKELDGNRTQSELFKAYQTIIEMSGHGDYDFSKMPSEKALEIVAEVFDGLGFDTDILCFDSSLEGHAMEQQPMFKLWHLLYSFEGDKSELGNFNLIEKLHDRFGFDIEYATVLAGVVFPSDYSSLSSKAIRKILPHLKDGLEYSVACEYAGYRHSKKSLTKEEINNKVLKDRLELLPRNSLRNPVVEKILNQMVNVVNAVIDEYGKPDEIRIELARELKKSAKEREEMTKSINETTRLHEGFVKLLQGEPFFLKHVSRNDIIRYKLYEELKFNGYKTLYSNTYIPREKLFSKEFDIEHIIPQAKLFDDSFSNKTLEVRQVNLDKGNATAFDFVSERYGEQGTSEYEKRIESLYNKVISKTKRDKLLMKETEIPSGFINRDLRDSQYIAKKAREILEEIVRFVVPTTGSITDRLREDWQLVDVMQELNWDKYDQLGLTEVIEGRDGQRIRRIKDWTKRNDHRHHAMDALTIAFTKRSFIQYLNNLNARVQKGMDDYIDLDMVELSDLSKEERTAAIYGIERKELHRDSHGKLRFNSPMPLEEFRAEAKRQLESTLVSIKAKNKVVTQNTNVSKTKSGKNKKVQLTPRGQLHLETVYGSSKRYVTKEEKVNAAFDAQKIATVANMRYRNALMDRLQQFGDDPKKAFTGKNSLEKNPVWIDELHEEKVPEKVKTVGFETIYTIRKEITPDLKLEKVVDVHIRQILQLRLDEFGGDAKKAFSNLDDNPIWLNKEKGIAIKRVTITGISNAEALHSKRDKDGGLILDANGNEQPVDFVNTGNNHHVAIYRKPKLDKNGLPVMDENDEIQYELDERIVSFYEATSRAMQGFPIVDKDYKKEEGWQFLFTMKQNEYFVFPRYDEQGNLIFNPLDYDETWYKNPANYAVISPNLSRVQKLSKVKAGNSYVREYVYRHHLETTVTKNESELRGFTWQKIQSSEKLGTLVKVRVNHIGKIVSIGEY

SEQ ID NO: 6409 - protein, 1452 aa, synthetic construct
  REGION 1..1452: note = Synthetic
MGKKILGLDLGTTSIGWALVNEAENDNEKSSIIKIGVRLNPLTVDEQQNFKKGKSITTNANRTLKRSIRRNLQRYKLRRENLIEILKEHKFILKETNLSENGNFSTFETHRLRAKAASEKISLEQFARVLLMINKKRGYKSSRKAKGTEEGVLIDGMEIAKKLYNENLTPGQFCLQLLNNGEKYLPDFYRSDLQKEFDKIWYKQKEFYPDILTDELKEKLHNKNEKTTWAILQEPLKLIGVKRTTKGDAQKKENFEWRVKALSEKMDLESLSIIFQKLNSQINSSSGYLGEISDRSKELYFNKQTVGQYQMSVLDKNPNASLRNMVFYRQDYLDEFNTIWDEQAKYHEELTQELKKEIRDVIIFFQRRLKSKNGLISFCEFENRKIEIEKNGKKITKIVGSHVIPRSSPLFQEFRIWQKLNDIEIFPISEKNKKTKPNARTLELKEKNILFSELSVKEKLSKAEILALLDLQDFEINFNNIEGNKTQAELFKAYQKIIELSGYELNLKESAEKILIEVSKIFKTLNYNEDILHPNTETLYKFWHLLYSFEGDKSITGNEKLINKLKNDYGFEKKAAVILAGVVFESDYGNLSAKAIKKILPHLKTGEKYDVACALAGYKHSANSLTKEEIENKIYKNRLDILPKNHLRNPVVEKILNQMINVVNTIIDTYGKPDEIRIELARELKKSAKEREEMTKEIDDTTKKNDEIKTKLQKEFGLTNVTQNDIIRYKLYEELKNNGYRTLYSDTYIPQEKLFSKEFDIEHIIPQSRLFDDSFSNKTLEVRSINIEKGNQTAFDYVKGKGYDNLNIFLNRIISVYGKKNEKDFDYYKTEYEKSLMKKEAREKWNKLTEAEKQIQVINKYYSGKLKKLIITGEDIPEDFINRDLSDTRYIAKYAKTMLESLVKNVVSTSGSITKRLREDWQLVDVLKELNWDKYKAVQLVEEFTNRDGKIVKQIKDWTKRNDHRHHALDALTVAFTKRQYVQYLNNLNARSDKNSVIYGIEQKELYRDDKGKLLFKPPIEIKEFRAEAKKHLENTLVSIKAKNKVTTKNINITKKKNSINKKVQLTPRGQLHLETVYGSQKKYTVKLEKIGTTFDEEKIKTVCKPVYKNALLKHLQENKNDPKKAFGSKNTPKKHPIYIDEAKTLTVPEKVKTKNFETVYTIRKEICPELFKDAKKKDIFEKALGEATNLSEREIDKSYDKAIEFIFDKGIRKILIERYKKTKLEIEDYNKRVEKKEQKKVLETAFSNLIENPIINKNGKSIKRVTISGINNVQALHTKKDHNGKLILDENCKTHPVDFVNTGSNHHVAIFLDKEGNLQENVISFYEAVTRRNLGLPIIDKEFNKKEGWQFLFSMKQNEYFVFPNEKNGFSPKEIDLLNPDNYALISPNLFRVQKISTKNYMFRHHLETSVSENKLLRKVTWELIQTPNKLKGIIKVRLNHIGQIVYVGEY

SEQ ID NO: 6410 - protein, 1452 aa, synthetic construct
  REGION 1..1452: note = Synthetic
MKNILGLDLGTNSIGWAYVKQAQNDSEKSEIVELGVRVNPLTVDEKTNFEKGKPISTNADRTLKRGARRNLQRYKLRRQELIELLKEYQVISDKTILAEDGKGTTFETLRLRAKSAKEQVSLEELARILLMINKKRGYKSSRKAKNEDEGQLIDGMEIVRRLYDENLTTGQLSLQLLKEGKKSLPDYYRSDLQHELDKVWNFQKQFHPDILTDEFYTSIQGKGQKATRESFSSKYGIDTAENKGSREEKRLQAYQWRADATHKKLTKEELAFVITEINNNINNSSGYLGAISDRSKELIFANETVGEYLWKQIQNDPHTSLKNQVFYRQDYFDEFERIWEIQSEFYPQILTESLKNELRDILIFYQRKLKSQKALVSICEFESKEIPLKDKQGNPISKNGIPVTKLVGPKVAPKSSPLFQEFKIWQNLNNVLVRPKGSRKRKVTTDQQSTLLEGQEPVFELNLEQKELLFEELNIKGNLKTDYCLEIIGYSAKEWEMNYPTLEGNKTNKALYEAYLEIIDSEGYDAKKLLKVKTDKDDINLGDIKVSTSEIKTMISDIFNELGINIKILDFDAELERKQFEAQASYRLWHLLYSYEGDDSKSGNELLYRLLEDKFGFKREHSKILANISLLSDYGNLSTKAMQKIISHLKKGYSFAGRRYKPNEKSACELAGYRHSKLSITKEENENRTLKDTLDVLKKNSLRQPVVEKILNQMINLINELIEKHSEKDEKGNIVKYFKFDEIHIELARELKKNAEERRELDSKVRESKARNEKIITILKSEFGLPYPTKNDIIRYRLYEELKYNEYKDLYTNTDIPKEKLFSKEIDIEHIIPKSRLFNDSFSNKTICYRQDNLNKGERTAYDYIEGLGKTQLDEYLNRVENLYVNKIITKAKYRNLLKKESEIGDGFIERDLRETQYIAKKAKEMLLQITRHVVSTTGSITDRLRDDWELVNVMRELNLPKYKALGLTEIQERKNGQTVEVITDWTKRNDHRHHAMDALTVAFTKHSHIQYLNFLNARKDEKHKEYSNIMGIQQLETEKTTDKDGKDRRVFKAPIPNFRQVAKEHLESILISHKTKNKVVTRATNKIAGSKKQQETLSPRGQLHKETVYGKYLRYVQKEEKIGSKFDLQTIERVASPLYKRLLTKRLEENGGDPKKAFTGKNALAKTPIYLDEAQTQQLPEKVKLVWLETDFSIRKDITPDNFKDEKSIDKVLDEGIKRSLKDRLKSFDGDAKRAFTDLEQNPIWLNKEKGIAIKRVTISGVSNAEPLHTKKDHLGNEIFDDTGKPIPVDYVSTGNNHHIAIYRDENGDLHDEVVSFFEAVTRANQGLPIVDKTYNRHLGWQFLFTMKQNEMFVFPNKETGFDPQEVDLLDPKNKKLISPNLFRVQTISVVKYGNNVVRDFKFRHHLETTVEDKKELQQITYQQIKSLSPLNNIVKVRINHLGDIVHIGEY

SEQ ID NO: 6411 - protein, 1451 aa, synthetic construct
  REGION 1..1451: note = Synthetic
MKRILGLDLGTTSIGWAYIKEAESEKEKSSIEKIGVRVNTLSSDEKTNFEKGKPITTNANRTLKRSARRNLDRYQLRRNNLIEVLIRERIITNESILAESGKNTTFETWKLRSTAVSERINKNQLARVLLAINKKRGYKSSRKAKNEEEGHSIDGMVIAKKLYDENLHPGQLVFRLLNEGIKNLPEFYRSDLQAEFDCIWDTQKKYHPEVFTDNFYREIMGKGQKATSAAFWRNFGFNTADIKDIHEKLKSPKTISFGLREKKKYQGYYWRNIGIHSKLEKEEAAYVITDINNELKKSSGYLGAISDRSKELYFNKVTIGQYLYNTLKQDKNSKLKNTVFYRQDYFDEFELIWETQAKYHPELTRKLKEEIRDIIIFYQRKLKSQKGLISLCEFENREISVKKGGKISTRTIGSKVIPRSSPLFQEFKILQLLHNIKIRKKGSKKRSVAKEKILTEESDIFILDSLAREHLYSELNIKGTLKATEIIKHLGYKTTEWEVANYTQIEGNNTNKLFYEAYLKIIESEGYDIIEIFGGKADSDEVKLSDFTISASDLKDKILTIFESLKINSQILEFNAELEGKAFEKQASYQLWHLLYSAEDDSNNHSADDIHTFGKDNIDLKKLLCNKYGFQPHHAKILTNLPLDREYGSLSSKAIRKIYPFIKEHQYSEACEYAGYRHSKSSLTKSEVQNRSLKNKLDLLKKNSLRNPVVEKILNQMINVVNSLIDQENVLLVKQGLPPEFHFDEIRIELARELKKNAKEREEMTTNIAHAKNLHDSIFSTLQDEFGIKNPTRNDILRYKLYEELKSTGFKDLYTNVYIPRDKIFTKEIDIEHIIPQSKVFDDSFSNKTLTFRKINNDKGNLTAYDYILGEFGQIALDSYLERIKVLFDLGQKNNKEGISKAKYQKLLKTNSQIGEGFIERDLRDSQYIAKQAKSILFEITRSVVATSGNITDRLRRDWNLINVMQELNFSKYNHIGLTEVIENKDGTFKERIVGWNKRNDHRHHALDALTIAFTKHSHIQYLNHLNARKDETHIKHILINQIENKETHKVLSKNGRKKTQFNVPIPNFRQAAKAHLESVLVSRKAKNKVVTRNKNLIKTVKEVLIKTELTPRGQLHNESIYKKYKYPITKEVKIGGRFDEELISMVNNPHYKKLLLLRLYEFGNDPKKAFTGKNALAKNPIFINPDKTEKLPEKISITQFLEGYSIRNKIDHLLNIDKVIDEGVKQILMERLERFNNDRKKAFSNLEKDPIWLNKAKGISIKNVRIRGKKNAESLHSKKDHLGNKILDQNGFEIPVDFVNTGSNHHVAIYIDKEGNLQENIVSFFEAVARANQKLEIIDKNYNKDLGWTFLFSLKQNEHFVFPDLGNGFNPSDFDLFSKDNKSVISPHLFRVQKLATKDYFFRHHLDTSVEENAKLKGITWKRTGLTGLKGIVKVRINHLGDVVSIGETR

SEQ ID NO: 6412 - protein, 1449 aa, synthetic construct
  REGION 1..1449: note = Synthetic
MFSQRNNPYCELLFKIIDTNIKEKFFEWFTENLIFNKFFLLIFIYFKKLILMIKNILGLDLGVSSIGWAYVQEDSENLENSKIIKLGVRVNPLTVDEQLNFEKGKPITTNAGRTLARSARRNLQRFKLRRANLIDVLKKNNILKESDLLAEVGKNSTFQTQELRAKAAREKIELSEFARVLLLINKKRGYKSSRKAKNDEDGQIVDGMAVAKKLYEENVTPGEYSYQLLQQGKKQLPDFYRSDLQAEFDKVWNFQKQYYSEILTDDLYKELQGKNKNATWAVLKEPFSLVGIKQTGTMQEKKVEKYFWRSEAVKRQLDFESLAVVFQEINSNLNNSSGYLGAISDRSKELYFHNQTVGEYLFQQLKVNSHTKLKNQVFYRQDYLDEFEKIWETQSKHYKELTKELKEEIRDIIIFYQRKLKSQKGLISICEFENREIEITENGKTKKKTVGLKVAPKSSPLFQEFKIWQVLNNLQFQNVDTKEIFPVDLDFKQSIFDEVNIKGKLSAKDVLDIVGYSGKEWKTNFKDIEGNYTNENLYTAFLKIIANEGIEFPKEFKLTIDEEIKVSKINTSAEIIKLFVREKFSGLGIDTSILDFNPELEGTDFEKQASYQLWHLLYSYEGDDSPSGNEKLYELLERKFGFKKEHSKILAEIGFSQDYGSLSSKAMRKIYPYIKEHKYSVACNYAGYNHSKNSLTKEQLENRILKEQLDILPKNSLRNPVVEKILNQMINLVNEVSKEYGKPDEIRIELARELKLNAEERATMTSEINKATIQHQKYAEVLQREFGIKSPSRNDIIRYKLYLELANNGFKDLYTDVKIERENLFTDKYDIDHIIPQSRFFDDSFSNKVLVPRSANLKKGNFTAFDYLENEGKEKLEKFLNVITDLYDKGIITKAKYEKLQKKVSEIGEGFIERDLRTTQYIAKKAKEILFGITNSVVSTSGRITDKLREDWNLVNTMKELNIEKYRKLGLTELIANSKGEEKERIIDWTKRNDHRHHAMDALTVAFTTHSHIQYLNYLNARKNEAHKEHKIITNIENSITEIVEKKNGSKERRFKLPIKNFRTEAKKQLEEVLISHKAKNKVVTKNINKIKKKGSIIAKTELTPRGQLHKETIYGSSKFLKTKEEKISGKFDLETIQKVQNEKYRNALLKRLHEFGGDSKKAFTGKNVISKNPIFLNAEKKEQLPETVTLAWYETGYTIRKVVNPDNFKDFKNIEKVIDKGVRDILTERLKEFNGNSKEAFSNLEKNPIWINKSKGISIKTVTITGINNAEALHYKKDHLGKEILDENGQKIAVDFVSTGNNHHVAIYEDENGNLQEKVVSFYEAVERVNQNLPIIDKEYNSELGWKFLFTMKQNEMFLFPSDDFDPKEVDLFDDKNLSLISKNLFRVQKFGSLLSGFWFRHHLETSVDVNSVLRGTSYKVIQSSNNLRSIVKVRLNHLGKIVQIGEY

SEQ ID NO: 6413 - protein, 1448 aa, synthetic construct
  REGION 1..1448: note = Synthetic
MKRILGLDLGTTSIGFAYIKEGENEKELSSIEKIGVRVNPLTTDEQTNFEKGKPLTTNADRTLKRGARRNLDRYKQRRENLIEVLKKSNLISDDIILTENGKNTTFETWHLRTKAVNEKIEKHELTRVLLAINKKRGYKSSRKTKNEEDGQAVDGMGIAKRLYEENITPGQLAFQFLQKGKTMLPDFYRSDLQAEFDTVWNFQKQFYSEIFTDEFYKELQGKGQRATSALFWITCKFNVAEIKDLEDSLKTEKTIKFNKRQQKKLQAYKWRSDAISKQLPKEEVAFVLTEINNDLNKSSGYLGAISDRSKELYFNKETVGQYLYKQLQQNSHTRLKNQVFYRQDYLDEFEAIWETQARFHSELTEELKEEIRDIVIFYQRKLKSQKGLISFCEFESEEKLIDGKKKTIGRRVAPKSSPLFQEFKIWQNLNNVLVRKKGSRKRIVKNNSQTTLFEGEEEIFEFDLETKELLFEELNLKGKLKANDIIKLLGHKPTEWEINYSQLEGNHTNKALYEAYFKILEIEGYDVKDLLKAKSTKDEVELDDLNVPASEIKEMVKQIFETLEINIEILDFDADLDGKAFEKQAAYQLWHLLYSVEDDSKKFNEDDILIYGNDNIGLKKQLCTKFGFKPEHSKVLVNVAFQDDYGNLSTKAIRKIYPFIKEHKYSDASELAGYRHSKHSLSKDELKYRDLKPHLALLKKNSLRNPVVEKILNQMVNVVNTLIDTERTKDPNFKFDEIRIELARELKKNAKERAEMTTNINTAKTRHEKIVKLLQNEYGVANPTRNDIIRYKLYEELKNNGYKDLYTNKYIPRGKLFTKEIDIEHIIPQSKAFDDSFSNKTICYREENLKKGNRTAIDYIESEYGSEKLEEYLNRITVLNKSWGKDKQEEGISKAKFQKLQKRESEIGEGFAERDLRDSQYIAKKAKSMLFEITPSVVSTSGSITDRLREDWDLINVMKELNLPKYRMLGLTEIQERKFGKQVEVITDWTKRNDHRHHAMDALTVAFTKHNHIQYLNYLNARKDENHKLHGNIIAIEKKETELVENSNGSKKRLFKKPLPNFRQIAKEHLENVFVSHKAKNKVVTKNKNKTKWGKGEKVKVELTPRGQLHKETVYGKYHYYTSKEEKVGTKFDKEIIQKVANPLYKKLLLQRLEENNNDPKKAFGGKNILTKNPIYLNESKTEVLPEKVKLVWLEEDFSIRKDVTPENFKDLKTIEKILDEGVKRILKKRLKDFGNDPKKAFSDLDKNPIWLNEENGISIKRVTISGVKNAEPLHYKKDHLGNFIFDNERHKIPVDYVSTGNNHHVAIYRDEKGNLQENVVSFYEAVERINQELPIIDKTFNKHLGWEFLFSMKQNEYFIFPNEEVGFDIKDIDLLDPKNKKQISPNLFRVQKFTIKDYFFRHHLETDVENNSNTKNVAWKREGLSGINGILKVRLNHLGDIVSVGEY

SEQ ID NO: 6414 - protein, 1447 aa, synthetic construct
  REGION 1..1447: note = Synthetic
MKHILGLDLGTNSIGWAVVKEAQNDNEQSEILDVGVRVNPLTTDEKTNFEKGKPISTNADRTLKRSARRNLQRYKLRRKELIELLKDHQLISENTILTENGKGTTFQTLELRAKSAKEKISLEELARVFLTINKKRGYKSSRKAKNEDEGQLIDGMEVAKRLYEENLTTGQLSLQLLKEGKKSLPDYYRSDLQIEMDKVWDFQKQFHSDILTDEFYAQLKGKGQRATSALFLAKYQIYTAENKGSREDKKLQAYQWRVDALSKELTREELAFVITEINNNLNNSSGYLGAISDRSKELYFNNETVGEYLWKQIAANPHTSLKNQVFYRQDYLDEFEQIWNTQAQFYPQILTDELKKELRDVVIFYQRKLKSQKSLVSFCEFENKEIEIKKEDGTSTKKVIGLKVAPKSSPLFQEFKIWQNLNNVLIRKKGSKTKKVAKNQQAVLFEEEKTIFELDLEAKQVLFNELNLKGNLKADYCLEILGYSPKEWEMNYPELEGSRTNKALYEAYLKITDLEGYDAKNHLKVKLNKDEVELDDLKVPASEIKDMVQAIFKEAGINTDILHFNAELDGKDFENQASYQLWHLLYSYEGDDSKSGNELLYKLLETKFGFKKEYAQILANVSLSDDYGNLSTKAMRKIYPYIKENKFSTACELAGYRHSKHSLTKEENDNRVLKDSLEVLKKNSLRQPVVEKILNQMINLVNALLKKYRTENPNFKFDEIRIELARELKKNAEERANMTANINKAKTEHEKIIKILKNEFGLPNPTRNDIIRYRLYEELKDNGYKDLYKGDYIPREKLFSKEIDIEHIIPKARVFDDSFSNKTIIYRKTNLEKGERTAYDYIESLGEKQLEEFLSRIENLYEIGKPSRLHNRRNPLKKVEEKGISDSKYKKLLKKESEIGDGFVERDLRETQYIAKKAKEILLQITRNVLSTSGGITDRLREDWDLVNVMKELNLPKYRALGLTEMEDRKYGQQVEVIIDWTKRNDHRHHAMDALTVAFTKYNHIQYLNYLNARKNEKHKEHSNIMGIQQLETIKVTDKNGNEKRVFKAPMPNFRQVTKAFLENVLISHKAKNKVVTKNKNKVAGSNKVQEVLTPRGQLHKETVYGKYQYYVQKEEKIGGKFDLETIKKVANPLYQSLLKKRLEENGGDPKKAFTGKNSLAKNPIYLDDTQTEQLPEKVKLVWLENSFSIRKDITPENFKDEKLIDKILDEGVKRILKERLQSFGNDAKKAFSDLDKNPIWLNKEKGIAIKRVTISGVANAEPLHTKKDHLGKEILDKEGKPIPVDFISTGNNHHVAVYSDDKGNLQEKVVSVFEAVVRANQGLPIIDKTYNQHLGWEFLFTMKQNEMFVFPNESTGFNPNDIDLLDPKNKKIISPNLFRVQTISVVKYGNAIVRDFKFRHHLETTVEDKKELQGKTYQQIKSLSPLNDIIKVRINHLGDIVSVGEY

SEQ ID NO: 6415 - protein, 1447 aa, synthetic construct
  REGION 1..1447: note = Synthetic
MGIKKWSIMKRNILGLDLGTNSIGWAYVKEGESPEQSSIEQIGVRVNPLTVDEQTNFEKGKPLTTNADRTLKRGARRNLDRFKLRREQLLEILKASKIINAETKLTEVGANTTHSTWKLRANAAIEKIELDEFARVLFAINSKRGYKSSRKAKNEDEGQAIDGMAIAKRLYEENLTPGQLTYQLLQKGKMTIPDFYRSDLQTEFDKVWAIQKQTHSDILTDEFYKELQGKGQRATAALFWTKHKFNTADIKDLEDSLKNEKTIKLSNREKKRLQAYRWRSDAVSIPLEKEQMAYVLTEINNNLNNSSGYLGAISDRSKELYFNKETIGQYLYHQLKKNPHSSLKNQVFYRQDYLDEFEKIWETQAQYHPQLTKELKEEIRDVIIFYQRKLKSQKGLISFCELESKEIELNKNGQIVKKTIGFRVVPKSSPLFQEFKIWQMLHNVIIRRKGASKKRSSKNSSQQVLFADENEFVFDQEAKQILFDELNLKGNLTASAVIELLGYKANEWEMNYTTLEGNRTQQSLYEAYLKIIEISGHDLRDFLKIKSNKDEIELKDIDVSAAGIKKVVKDIFSTIGINTAILDFDAMLEGKAFEQQASYQLWHLLYAYEGDNSTSGNETLYKLLQEKFGFSKEYASVLANINLQNDYGNLSAKAMRQIFPQIKEKKFSEACELAGYRHSKHSLTKEELENRKLNDTLDLLPKNSLRNPVVEKILNQMINVVNTLILKNSEKDADGNITKYFHFDEIRIELARELKKNAKERAEMTSNINAAKIEREKIVKLLQKEFGVANPTRNDIIRYRLYEELKNTGYKDLYTDTYIPKELLFSKQIDIEHIIPQSRLFDDSFSNKTVVYRKDNLDKGNQTAFDYIDRKFGAAGLTAYQTRVEELFKTKVITKAKYKKLLMPESEIGDGFIERDLRDSQYIAKKAKEILFTITKAVVSTSGQITDRLREDWGLMNVMKELNLPKYRALGLTEMEERKYGQKVEVIKDWTKRNDHRHHAMDALTVAFTKHSYIQYLNYLNARKNEKHKLHGNIIGIETKETELQIDDNGDKKRVFKQPFPNFRQVAKEHLEHVIISHKAKNKVVSKGKNKIVGKQTVQQTLTPRGQLHKETVYGRYQYYEQKEVKITASFDKEMAQKVSNPLFRKLLLDRLEANNNDPKKAFVGKNALSKQPIYLDESKTSTLPETVKMVWLEEDFSIRKDITPENFKDEKTIDKVLDQGVKRLLKARLNAYGGDAKKAFSDLEKNPIWLNKEKGISIKRVTISGVNNAEALHFKKNHFGEFILDSNGKKIPVDFVSTGNNHHIAIYMDQNGVLQEQAVSFYEAVARVNQGLPVIDKEYNHDLGWHFLFSMKQNELFVFPNEKTGFNPAEMDLLDPKNRKLISPNLFRVQKIATRDYVFRHHLETTVENVNELKETTWKRVGVNGISQIVKVRTNHLGDIIWVGEY

SEQ ID NO: 6416 - protein, 1446 aa, synthetic construct
  REGION 1..1446: note = Synthetic
MKKILGLDLGTNSIGWAVVNEAEKEGEQSSIVKLGVRVNPLTVDEQQNFEKGKSITTNANRTLKRSMRRNLQRYKLRRENLISILKENGFISDDTILSENGNRTTFETYRLRAKAASEEISLQDFARVLLMINKKRGYKSSRKAKSTEEGQLIDGMEVAKRLYDECLTPGQLSYEIIKGGKKHLPDFYSSDLQDEFDKIWNVQKTFYHELLTDNLRENLKGKNKTQTWAICAKPFGIEGIKRTTKGVEQKLENYKWRVTALNEKLDLEELAVVLQEINGQISNSSGYLGGISDRSKELYFNKQTVGQYLMENLDADSNYSLKNQVFYRQDYLNEFEKIWETQAQYHKELLTPKLKKEIRDVVIFYQRSLKSQKGLISVCELEGKQVESEKNGKKYIKTIGPKVCPKSSPLFQEFKIWQMLNNVQISCKSVPDKQKNIWNDNQGKRFLSQEEKEKLFVELSYKESLSKADALKLLFNNSKDYDLNYKILEGNRTQSDLFKAYQTIIEMSGYDEYDLSIMNSEKAVHKLKEIFDGLGYNSDILMFDSSLEGHKLEQQSMFRLWHLIYSFEGDNSVIGNEKLIEKIQDTFGFEREYATVIANVVFKDAGEYSSLSAKAIRKILPHLKDGNDYSVACEYAGYNHSKSSLTKEEIENKVLKDKLDLLPRNSLRNPVVEKILNQMINVVNSIVDTYGKPDEIRIELARELKKSAKEREELTKSINSTTKLHEEYVTILKNEFGLSRVSRNDIIRYKLYKELECNGYKTLYTNTYIPKEKLFSKEFDIEHIIPQAKLFDDSFSNKTLESRQANLDKSNTTAYDFVAAKYGDDYANGEYKSRIEKLYKDGIITKTKRDKLLMKEADIPSGFINRDLRDSQYIAKKAREILEDLVHFVVPTTGSVTDRLREDWQLVNVMQELNWNKFNQLGMTYYEQDRDGRQIPKIKDWTKRNDHRHHAMDALTIAFTKRSFIQYLNNLNARVEKGVEDWIDLDMVDVSKLDKEKRTSVVYSIEKKELYRDKKGKLRFCPPMPLHEFRAEVKRQLESILVSNKAKNKVVTNNVNKAKNNVESFIQTKDGEVRKIKGQVVKTPRGQLHNETVYGCSKRYEAKEEKVNASFDAEKIKTVACKRYREALMEQLNKFGGDAKKAFTGKNAIDKAPIWLDALHTEKVPEKVKTVGFVYIYTIRKEVGPDLKVDKVVDTRIKKILESRLNEFGGDAKKAFSNLDENPIWLNKEKGISIKRVTITGVSNAEALHDKRDKDGNLIFGDDGQKQPVDFVSTSNNHHVAIYRKPKLDKNNQPMLDEKGNILYELDEKIVSFYEATSRAVQHLPIIDKTYKKDEDWQFLFTMKQNEYFVFPRYDENGNMIFNPLDYDESWYRNPDNYAEISPNLFRVQKIATKNYFFRHHLETTVETPKALAGITYKPQLGLNGIVGIVKVRVNHIGQIVAVGEY

SEQ ID NO: 6417 - protein, 1445 aa, synthetic construct
  REGION 1..1445: note = Synthetic
MKKILGLDLGTTSIGWAYVIEDDNYEKSEIKQIGVRVNPLTVDEQTNFEKGRPFSVNAERTLKRGARRNLDRYKDRRENLNKILKKHNILNESTILTEDGKNTTHSTWAIRSKATTERIELDEFARVLLAINKKRGYKSNRKAKDDDEGQAIDGMAIAKKLYEENLTPGQYVFQLLKEGKKAVPDFYRSDLQAEFDRVWQKQKQYYPDVFTDTFYEEVKGKGQRATAAIFWNRYGFNTADIKDLEDSLKTEKTIKLNLTERKRLQAYKWRNDAINLQLAKEEAAYVIAEINKNLSSSSGYLGSISDRSKELYFNKQTVGQYLYKQLQENRHTRLKNQVFYRQDYLDEFEKIWETQAKYHTVLTPELKSEIRDTIIFYQRRLKSQKELISFCEFESKVIEVEKDGKKTTKTIGARVAPRSSPLFQEFKIWQILNNMVVKKKGSKKRKPVGDVKQTTLFEQEKEIFSLNLEEKQLLFDELNIKGTLKDDAILEMLGCNTKEWEMNYKSIDGNRTNRALYDAYLKIIELSGHDVRDYLRVKTSKDEIELDDLKVPASQIKEMVVAVFETLGIDTSILDFNAELEGKAFEQQPFYQLWHLLYSYEGDNSKSGNERLYKLLEEKFGFSEEYGRILANVPLLDDYGNLSTKAIRRILPYIKEHQYDEACSLAGYRHSKHSFTKDELENRILKRRLELLKKNSLRQPVVEKVLNQMVNVVNTLIDIENKKLKAKGKPEDFHFDEIRIELARELKNSAEKRKQITEGINKAKGQHEQIAKLLQNEFGIKNPTRNDIIRYKLYEELKDNGYKDLYTNTYIPREKLYSKEIDIEHIIPQSRLFDDSFSNKTVVYRDENLKKGNRTAYDYILEDYGEGKLDEFVVRIEKLFQLGQKSKEGGLSKAKYRKLLKSESEIEDGLIERDLRETQYIAKKAKEMLFTITRRVVTTTGQVTDKLREDWGLINVMKELNLPKYRALGLTEMEERKYGQQVEVIKDWTKRNDHRHHAMDALTVAFTKHSHIQYLNYLNARNNPTHKLHGNIIAIEKKELEEHVNKNGTKTRLFKEPMPNFRLEAKKHLENVIISHKSKNKVVTKNKNRISGKSQPQITLTPRGQLHKETVYGLYHYYETKMEKVGTKFDLETIAKVANPVYRNALLQRLAEYNNDPKKAFGGANSPSKKPIYTDETQTKKVPEQVKLSCSATDYSVRKDVTPENFKEDKDIDKVLDKGIVKLLRERLQEFGGDAKKAFSDLDLNPIWQNKEKGIAIKRVTISGVKNAEPLHYKKDHHGKLILDKHGNPIPVDFVSTGNNHHVAIYRDEQGALQEKVVSFFEAVTRVNQGLPIIDKGYNSYLGWKFLFTMKQNELFVFPNKKTGFDPSEIDLLDPANKALISPNLFRVQKIATKDYFFRHHLETSVDNLSGTKNFFWKREGLKGIDGIVKVRTNHLGDIVGVGEY

SEQ ID NO: 6418 - protein, 1445 aa, synthetic construct
  REGION 1..1445: note = Synthetic
MKKILGLDLGTNSIGWAVVNEAENADERSSIVKLGVRVNPLTVDELTNFEKGKSITTNADRTLKRSMRRNLQRYKLRREHLIDILKAKVFISNDTILSENGNRTTFETYRLRAKAATEEISLTDFARVLLMINKKRGYKSSRKAKNTEEGQLIDGMEIAQRLYDENLTPGQLSLELLKNGKKYLPDFYRSDLQSEFDKVWKAQKQFYPDLLTNDLKENLQGKNKTQTWSICQKPFEIVGIKRKTKGNEQKVENYSWRVKALSEKMDLEELAIVLQEINGQINNASGYLGNISDRSKELYFNHQTVGQYQMAQLDKNPNYSLKNQVFYRQDYLNEFETIWETQAKYHKELTSELKKEIRDVVIFYQRPLKSQKGLISFCEFESRQIEVEVDGKKKLKTIGCRVCPKSSPLFQEFKIWQRLNDVEVSGLIVPNMQHDLFGFAKDYTYGKRRLQQEEKEMLFAELNYKEKLSKNEVLKLLFPKQKEVDMNFKELDGNRTQAELFKAYQTIAEQSGHDVGDLSKKTAKEIVGCISEIFATIGINPEILSFNSGLEGKEFEQQPMFRLWHLLYSFEGDNSAIGNEKLIEKLRDTFGFEKEYAAVLANVVFKEAGDYSSLSTKAIRKILPHLKDGNDYSVACEYAGYRHSKQSLTTEEIQNKVLKDKLELLPRNSLRNPVVEKILNQMINVVNSVVDTYGKPDEIRIELARELKKSAKEREELSKSINETTRLHEGLVQKLQKEFGLSHVSRNDIIRYKLYNELESNGYKTLYTNTYIPREKLFSKEFDIEHIIPQAKLFDDSFSNKTLEARQANLDKSNTTAFDFVATKYGDEFANGEYKTRIDKLLADKVISKTKHDKLLMKEADIPSGFINRDLRDSQYIAKKAREILEELVRFVVPTTGSITDRLRDDWQLVDVMQELNWNKYDQLGMTEIIEGRDGQRIRRIKDWTKRNDHRHHAMDALTIAFTKRSFIQYLNNLNARVQKGVDDWIDLDMVEFADLSKEDKTKAVYAIEKKELYRDNHGKLRFNPPMPLNEFRAEAKRQLENTLISIKAKNKVVTRNINVSKKKSGANKKVQLTPRGQLHLETIYGCSKQYETKEEKVNASFDAEKIKTVASKRYREALLSRLNQFDGDAKKAFTGKNALDKNPIWLNAQHTDKVPEKVKTVSFETIYTIRKEVSSDLKLDKVVDVRIRKILEDRLAEYGGDAKKAFSNLAENPIWLNKEKGIAIKRVTITGISNGEPLHDKRDKDGNLILDEKGNKQPVDYVNTGNNHHVAIYRKPKLDKNGQPVLDENGDIVYELDEKIVSFYEATSRAMQHLPVIDKTYKQSEGWQFLFTMKQNEYFVFPRYDADGNMTFNPLEHDEAWFKNPENYALISPNLFRVQKMSKVASGNSFVRDYVFRHHLETTVTDNKVLRDITYCQCKSLAFANNIVKVRVNHIGQIVSVGEY

SEQ ID NO: 6419 - protein, 1445 aa, synthetic construct
  REGION 1..1445: note = Synthetic
MKNILGLDLGTTSIGWAHVIEGEMPELSEIKQIGVRVNPLTVDEQTNFEKGKPLTTNADRTLKRSARRNLDRFKIRRKNLIEILINSKIIHSTSTLNEDGKDTTFETWGLRSKAADERIELNELARVLLAINKKRGYKSSRKAKNEEDGKAVDGMGIAKKLYEENLTPGQFVFERLKNGKKVIPDFYRSDLQNEFDRVWKFQKQFYPEILTDEFYKELQGKGQRATSAMFWTKYQFNTADIKDIDDDLKNEKTIKLHVRDQKKLQAYKWRSSSVSKQLEKEQVAYVLTEINNNLNNSSGYLGAISDRSKELYFKKQTVGQYLYHQLLENRHTSLKNQVFYRQDYLDEFEKIWDTQAKFHSELTDTLKAEVRDVVIFYQRKLKSQKGLISFCEFEQKEILADGKKKTVGMRVAPKSSPLFQEFKIWQNLNNVLIKKAGSKKRTVKKDNQQTLTEGEQEIFDLSLNAKQILFDELNIKGNLKSSAIIELLGYKPKDWEVNYSNLEGNRTNQALYNAYLNILEIEGYNQELLKLSDKDEINVAELKTPAHEIKEMVKSIFAVLDINTSILEFNAELGGKGFENQLSYQLWHLLYSAEDDTKKYSEEDKLIYGNENIGLKKQLCQKFGFKPEHAKILAGISFQDDYGNLSTKAMRKIYPYIKESKYSNACDLAGYRHSKHSLTKEELEKRVLKNKLEPLQKNSLRNPVVEKILNQMVNVVNTLIDKENDKLEAEEKERNFRFDEIRIELARELKKNTSERKELTERINKAKSENDNIKAIIKRDFPNVPNPTKNDIVRYKLYQELAFNCYKDLYTHQKIDYYKLFGKDYDIDHIIPQAKLFDDSFSNKVLVPYQANRDKGKKNNATAYDYMSTKSQEEFENYLATVESLYKEGKISSAKYQKLLKKESEIGDGFIERDLRDSQYIAKKAKEMLFEITKSVVSTSGSITDRLREDWGLVNTMKEINLPKYRALGLTEMEERKHGQKVEVIKDWTKRNDHRHHAMDALTVAFTKHNHIQYLNFLNARKNENHKFHTNIIGIENIETELIEDNKGNKKRVFKEPIPNFRQLAKEHLENVIISHKAKNKVVTKNKNKISGQSKTQEVLTPRGQLHKETVYGQYHFYQQKEEKISAKFDRETIEKVSNPLYKKLLLQRLEENDNDPKKAFSGKNALSKTPIYLDDKKGKTVPESVKLIWLEKDFSIRKDITPENFKDEKSIDKILDDGIKQILKERLKEFGDPKRAFSDLEKNPIWLNKEKGISIKRVTISGVSNAEALHYKKDHFGKPLLDKKGNKIPVDFVSTGNNHHVAVYRDEKGNLQENVVSFYEAVARVNQGLPIIDKFYNQHLGWQFLFTMKQNELFVFPNEKTGFNPNETDLLDPKNRKLINPNLFRVQKIATKNYFFRHHLETTVETPKELAGVTYKPQLGLSGIVGIVKVRINHLGDIVSVGEY

SEQ ID NO: 6420 - protein, 1445 aa, synthetic construct
  REGION 1..1445: note = Synthetic
MKKILGLDLGTNSIGWAVVNEAENKDEKSSIVKLGVRVNPLTVDEQQNFEKGKSITTNAERTLKRSMRRNLQRYKLRRDALVDILKQHGFIDDDTILSENGNKTTFETYRLRAKAATEEVSLEEVARILLMINKKRGYKSSRKAKNDEDGQLIDGMEVAKQLYDNHQTPGQFVLELLRKGKKQAPDFYRSDLQAEFDRIWNFQKQFYPNILTDELQDNLKGKNEKQTWAICEKPFGIEGIKRTTKGEELKRENYEWRSKSLSEKMDLEELAVVLQKINSQINNSSGYLGEISDRSKELFFKHQTVGQYQMAELDKNPNYRLKNQVFYRQDYLDEFETIWKTQAKFHKEMTLELKKEIRDVVIFYQRPLKSQKGLISICELENKQIEIEIEGKKKLKTIGPRVCPKSSPLFQEFKIWQTLNNIKVSGKVCSNKQTESINGSRELYQEEKERLFAELNLKEKLSKTEALKLLFENWKELDLNFKDIDGNKTNAALFKAYQKILELSDNGEYDFSKMNAQEIMQHVGKIFKEHGYNTDILHFDASLEGKSFEQQPAYQLWHLLYSFEGDKTKTGNEHLIDKLMSIYGFDRDSAKILANVTFIDDYGSLSAKAMRKILPYMKDGNGYDVACVYAGYEKHSKSSLTKKEIDNKVLKDKLDVLPKNSLRNPVVEKILNQMVHVVNSVTSTYGKPDEIRIELARDLKKSAKERKELTNTINKTTREHEAYRNILQKEFGIKNPTRNDIIRYKLYLELKDNGFKTLYSNTYIPQEKLFSKEFDIEHIIPKAKLFDDSFSNKTIEAGNVNRNKSNQTAYDYVLKEYHEKGAEEYKARIEKLFGNGNISKAKRNKLLMREIDIPDGFIDRDLRDSQYIAKKAREILGNVVKVVIPTTGSVTDRLREDWQLVDVMKELNLPKYNELGLVEDEEHIDYATGEIRYVKKIKDWTKRNDHRHHAMDALTIAFTKHSFIQYLNNLNARVEKGVDDYIDLDYVEISTLSREKRGKAVDSIEKKELHRDKNGKLRFNPPMPLGEFRAEAKRQLENILVSIKAKNKVATRNMNKANNKATTEIIDKNGNKKTIKGQLTLTPRGRLHNETIYGCIKQYATKIEKVGGSFNADKIATVACKRYREALLERLSMFNGDATKAFTGKNSLEKTPIFLDELQTEQVPAKVKTVNFENVYTIRKEITKDLKVEKVIDSRIRKILEQRLTEFGGDAVKAFSNLDENPIWLNKEKGIQIKRVAISGVSNAEALHQKRDHHGQLVLDDNGRPQPVDFVSTGNNHHVAVYRKPKLDKNGRQIMDEDGNLQYELDENIVSFYEATSRAMLGLPVIDKAYKREEGWHFLFTMKQNEYFVFPRYDEDGNMTFNPLDYDENWYKNPSNYAIISPNLFRVQKIATKNYMFRHHLETVVGEPKVLRDITWKLIQTPSNLNGIVKVRINHIGQIVSVGEY

SEQ ID NO: 6421 - protein, 1444 aa, synthetic construct
  REGION 1..1444: note = Synthetic
MKKVLGLDLGSSSIGWALVYEAESDNETSSIIRLGVRVIQYDNFVSTETATELKGDAAEYFKRGKGISPNAGRTKAHAMRINLQRYKLRRKALIDKLKECGFINDETLLSEQGNRTTFETYRLRAKAVEEEISLEELVRVLLMINKKRGYKSNRKIKGSEDGALIDGREVAKKLYVENLTPGELCLQLLEAGKKNLPEFYRSDLQNEFDKIWNFQKQFSPEAFCDAAKEEVKGKNKNQTWAILAKYFVWTRNDSFWNEEEARTEVRMKEYKLVGLKRTTKGHEQKLENYRWRVQALSEPMNLEMMAIVLQEINGQITASSGHLGAISDRSKELYFNKQTVGQYLMAELDKNPHYSLRNKVFYRQDYMDEFDAIWERQRLYHTELTPELKKEIRDIIIFYQRRLKSQKGLISLCEFERRDIVVEKDGVKKTKTIGCKVIPRSHPLFQEFKIWQTLNDIKVFVTGNKGKGKKANQSSTLFSETEDALLAEGKRYLYQEEKELLAKELFVRESMSKAEVLKLLFENPKELDMNFKQIDGNHTGFALFSVYSKMIERYGYEPVSFKASADDIIERLEIIFADLGWNTGLLSIDLSKDDKELEKQPYFRLWHLLYSFEGDNTETGNGKLIEKLMQLCGVQKEYAKILANVSFQDDYGSLSAKAIKKILPNLKEGNQYDVACGYAGYRHSQSSLTKEEIKNKVLKDKLELLPKNSLRSPVVEKILNQMVNVINTIIDTYGKPDEIRVELARELKKSRKEREELSKSIAQNTREHEAIRKLLQTEFGMMNVTRNDIIRYKLYEELKDNGYHTLYSNQYIPKEMIFSKEIDIEHIIPQARLFDDSLSNKTLEYKAINIEKGNKTAYDFVKEKYGDEGLQQYLNRCEALFKDKKTKLKKLKMESRDIPEGFIERDLRETQYIAKKALSMLSEISRRVVATTGSITDRLREDWQLVDIMKELNLPKYEKLGLVEMFEDKDGRQIKKIKDWSKRNDHRHHAMDALTVAFTKDVFIQYFNNKNAFWMSGSKEHANITAIRNKYFGNGKAVAPIPLRTFRMEVKYHLENILVSIKVKNKIVTNNINRTKKKDGENRKLQQTPRGQLHLDTIYGSHRRYVVKEEKVNASFTADKISRVSKPAYRIALLKRLEAFGNDPKKAFTLKNSLDKNPVYLDEKQIEKVPEKVAIVEFETVYTIRKPIDPQLSIDKVVDAKIRTLLKKRLEEYGGDAQKAFSNIEENPIWLNKEKGISIKRVTIRGINKAQALHEKRDKDGNLIFDEGGRKIPVDFVNTGNNHHVAIYRKPVVDKIGQIMLDEQGNPKYELEEKVVSFFEAVARIKCDQPVIDKEYKHSEGWKFLFSMKQNEYFVFPNEKTGFNPEEIDLLDPENYALISPNLFRVQKIGANDYTFRHHLETSIQNSSNDLKFITWIRCGKNGVNGVVKVRVNHIGQIVSIGEY

SEQ ID NO: 6422 - protein, 1444 aa, synthetic construct
  REGION 1..1444: note = Synthetic
MRHILGLDLGITSTGFCHIIEDENMKNSTIEEIGVRIIQLDNFVSTKTGEDSKDPSKDFSAGKGISSNAGRTQKRRARINLDRYQLRRKQLIELSLQAGLITSSTILAEDGKNTTHSTWQLRAKAAVERIEKDELVRVFLAINKKRGYKSSRKVKNKDDGQIIDGMDIAKRLYDENLTPGQLVLLLLKEKKKQLPDFYHSDLQREFDLIWNFQKEFYPDILTNDLYKALQGKNKTDSSSIFYNYYHFNTAENRGTKEQMRLQAYRWRVDALSKKLSKEEVAYVLVEINSNLNNSSNYLGNISDRSKELYFNKQTIGQFLYTKLKEDRHYSLKNKVFYRQDYLDEFERIWETQAIFYKELTGDLKKQIRDTIIFYQRRLKSQKGLISLCEFENKEITIEKEGKTVTKQIGVRVIPKSSPLFQEFKIWQILNNVVCKKKGTRKKKAVTPAPLLFELFGTPSETFFSLDMECKQLLFEELNLKGNLKADKVIRLLGYIPQEWEINYNQLEGNRTQKSLYEAYLKIIEIEGYDIKTFLRIKSDKEDWDLEESPLSAKEIRENIQHIFETLGISTAILYFDATLPIKDFEKQASYQLWHLLYSYESDNSPSGNETLYKLLQDKFGFKREHAVFLSNISFQDDYGSLSAKAIRKIYPYIKENQYSTACELAGYRHSKLSLTKEELNNRPLKDLISPLKKNSLRNPIVEKGLNQMINVVNALIEKNSEKDAEGNIIKYFHFNEIRIELARELKKNAQERAEMTLNIKNATIEQEKIKRILISDFGIKNPTKNDITRYRLYQELAHNGYKDLYTNTYIPKELLFSKNIDIEHIIPKARVFDDSFSNKTLAYRDFNLKKGENTAFDFIDSSLGEEELNQYIARVENAYKTKNISATKYKNLLKKATEINDSFINRDLRETQYIAKKAKELLFQITRSVVSTSGSITDRLREDWGLIDIMKELNMPKYRDLGLTEIMDRRDGRKVEVIKDWTKRNDHRHHAMDALTVAFTKPSYIQYLNHLNARKDENNKLYADILGIERKETTKIHDENGNEKRVFIEPMPDFRQIAKKYLEEILISHKTKNKVVTKSINKIAGTNKKQETLTPRGQLHKKTIYGKYHYYSNKEEKIGTKFDKETISKVSNPIYRYALQKRLEANENNPKKAFTGKNALSKNPIYLDDAKTKILPEKVNLIYLEEDFSIRKKIVSENPTSKEFVPNSISIEKIVDEGIKRILKERLETYNNDPKKAFADLDKNPIWLNKEKGISIKRVTISGVKNTQALHSKKDHLGKSILDKEGQEIPVDFVSTGNNHHVAIYRDQKGNLQEQIVSFFEAVVRAQQGLPIIDKTYKQEEGWQFLFTMKQNEMFVFPNEITGFNPSEIDLLDPKNKKLISPNLFRVQKISIKDYFFRHHLETNVETNNILKDITWKRGGLSLLKGIIKVRINHLGNIVSIGEY

SEQ ID NO: 6423 - protein, 1443 aa, synthetic construct
  REGION 1..1443: note = Synthetic
MIKLLYLEKLKQYTMKKILGLDLGTSSIGWALVNEAENSDEVSSIIKLGVRVNPLTVDEMQNFEKGKSITTNADRTLKRSMRRNLQRYKLRRDALIELLKKVGFITDKTILSEQGNRTTFETYRLRAKAAEEEISLKELARVLLMINKKRGYKSSRKAKGEEEGALIDGMEIAKKLYDEDLTPGQLCLQLLESGKKFFPDFYRSDLQEEFNKIWDFQKQFNPFSFCDVAKEEVKGKNKSQTWAILAKYFVETKKVNVWNEHEAQTENREEVYKLVGLKRTVKGEELKKENYRWRVQALTEQLDLEKIAVVLQEINGQISASSGYLGAISDRSKVLYFNRQTVGQYQMAELNKNPNMSLRNMVFYRQDYLDEFNVIWEKQAEFHKELTPELKKEIRDIIIFYQRRLKSQKGLISFCEFENREVVVEKEGKKQTKIIGCKVIPRSHPLFQEFKIWQTLNNIEVFVGEKKGKRKKSNVSSDLFGDTEDALITEGRRFLYQEEKKILAKELSIKKGLTKAEILRLLFENPQELDINFKQIDGNQTGFALFSAYSNMIEKYGYEPLDFKKPAEDLISQLKTVFTDLGWNTDLLFIDLDKENKEWEKQPYFRLWHLLYSFEGDNTPTGNGKLIEKIMQLCGIEKEYAIELANVSLQDDYGSLSAKAIKKILLYLKEGNQYDMACEYAGYRHSKSSLTKEEIENKVLKDKLEILPKNSLRNPVVEKILNQMVNVINTVMEVYGRPDEIRVELARELKKSAKEREELTKAVAKNTREHEEIRKVLQSEFGMINVSRNDIIRYKLYEELKDNGYKTLYSNQYIPREKLFSKEIDIEHIIPQSRLFDDSLSNKTLEYKSINIEKGNKTAYDFVKEKYGEEGLQQYLNRCENLCKDKKAKLRKLKMELNEIPDGFIDRDLRNTQYIAKKALSMLTEICRRVVATTGSITDKLREDWQLVDVMKELNLPKYEALGLVEVYEDKDGRKIKRIKDWTKRNDHRHHAMDALTVAFTKDVFIQYFNNKNAAWESDSKEHTNIVGIKTRYFESGKAVPPIPLGQFRVEAKCHLENLLVSIKAKNKVVTTNVNCIKKKGGTYKNTQQTPRGQLHLETIYGSHNQYVTKIEKVNASFDAVKIATVSKQDYRNALLKRLEVFGNDPKKAFTGKNSLEKNPIYLDRAQTIQVPDKVQTVELETAYTIRKPVDPTLNVDKVVDKKIRLILEQRLKEYGGDAKKAFVNLDENPIWLNEEKGISIKRVTIRGISKAQALHDKKDKDGNFILDETGKRIPVDFVNTGNNHHVAIYRKPVLDKKGQVIFDDEGNPMYELDEDVVPFFEAVTRANLGIPIIDKDYKKSEGWQFLFSMKQNEYFVFPNEKTGFNPKEVDLLDPDNYAMISPNLFRVQKIGLNDYTFRHHLETTIQNDLKFITWIRCGKSGIKDIVKVRINHIGQIVSVGEY

SEQ ID NO: 6424 - protein, 1440 aa, synthetic construct
  REGION 1..1440: note = Synthetic
MKKILGLDLGTTSIGWALVNEAEKENEKSSIIKLGVRVNPLTVDEQQDFEKGKSITTNADRTLKRSMRRNLQRYKLRRENLIKILRDNKFISDEAILSENGNFTTFETYRLRAKAVKEEITLEQFARVLLMINKKRGYKSSRKAKGTEKGALIDGMEVAKTLYNENLTPGQYCLRLINARKKTLPDFYRSDLQMEFEKVFDKQLEYYPDFLSNELKEELREKKRDAVWAICAKTFKEKGFELVGTKRQGNTAEQKTENYVWRAKGLSEKLELEQLVIVLQQINIQLNSSSGYLGAISDRSKELFFNKQTVGEYQMEVLDKNPNASLRNMVFYRQDYLDEFNAIWEKQTLFHKELTEELKQEIRDVVIFYQRRLKSQKSLISFCEFESRKIEVEIDGKKKSKSVGSRVIPRSSPLFQEFKIWQRLNDIEVFGKANKTKKQKGVSLFSEIEDPLEYGGRRELYQEEKELLAAELSIKKELKKAEILKLLFNNPKELDLNFPSIQGNLTQATLFDAYRRIIELSGHEIDFDKLTTSEILISIEEIFRGFNYNSGILHFNSENDLDKEPMYQLWHLLYSFEGDNSKTGDENLINKITERYGFEKEYSTILSSISFQDDYGSLSAKAIRKILPYLKAGNKYDMACEYAGYRHSASSLTSEELENKVYKDRLDILPKNSLRNPVVEKILNQMINVVNAIIDAYGKPDEIRIELARELKKSAKEREELTKSIAETTKLHQQYKDILSKSPFNLSYISRNDIIRYKLYEELKDNGYKTLYSNTYISPSAVFSGDFDIEHIIPQSRLFDDSFSNKTLELRSINIEKGNMTAVDFIKSKYGETGSETSLDIFLNRMEDLHKKGVISRAKYNKLKMQEKDIPDGFIERDIRDTQYIAKYAKTMLGDLVKFVVSTSGSVTDRLREDWQLIDVMKELNWEKYRNLGLTEEFTNEEGHRIRKIKDWTKRNDHRHHAMDALTVAFTKRSIIQYLNNLNARNDKSSSIYGIEQKELYRNGKGKLLFRPPFDLDEFRGDAKKHLENTLISIKAKNKVVTQNINITKKQGGVTKKIQLTPRGQLHNETIYGSLKQYVTKEEAVNAKFDAARISAVSKPAYKEALLKRLQEFDNDPKKAFSGANALSKRPIWLNELHTAQVPEKVKTVSLETVYTIRKDISADLKIEKVIDANIRRILEERLKKHNGNAKQAFSNLDENPIWLNEEKGICIKRVTISGVSNAESLRDKRDKNGKIILDDKGQKQPVDFVNTGNNHHVAIYNVPVLDNNGQVVFDENNQPKYELQENVVSFFEATTRVNQGLPVIDKEFKKSEGWQFLFSMKQNEYFVFPKTEKQEKVNEETGEITEEEVITFNPKEIDLLNPDNYHLISPNLFRVQKISSKNYVFNHHLETMAVTNDTLKNKKQLLNVTHRFIQSTSPLISIIKVRVNHLGQIVSVGEY

SEQ ID NO: 6425 - protein, 1436 aa, synthetic construct
  REGION 1..1436: note = Synthetic
MKRILGLDLGTNSIGWALVNEAENKDERSSIVKLGVRVNPLTVDELTNFEKGKSITTNADRTLKRGMRRNLQRYKLRRETLTEVLKEHKLITEDTILSENGNRTTFETYRLRAKAVTEEISLEEFARVLLMINKKRGYKSSRKAKGVEEGTLIDGMDIARELYNNNLTPGELCLQLLDAGKKFLPDFYRSDLQNELDRIWEKQKEYYPEILTDVLKEELRGKKRDAVWAICAKYFVWKENYTEWNKEKGKTEQQEREHKLEGIYSKRKRDEAKRENLQWRVNGLKEKLSLEQLVIVFQEMNTQINNSSGYLGAISDRSKELYFNKQTVGQYQMEMLDKNPNASLRNMVFYRQDYLDEFNMLWEKQAVYHKELTEELKKEIRDIIIFYQRRLKSQKGLIGFCEFESRQIEVDIDGKKKIKTVGNRVISRSSPLFQEFKIWQILNNIEVTVVGKKRKRRKLKENYSAIFEELNDAEQLELNGSRRLCQEEKELLAQELFVRDKMTKSEVLKLLFDNPQELDLNFKTIDGNKTGYALFQAYSKMIEMSGHEPVDFKKPVEKVVEYIKAVFDLLNWNTDILGFNSNEELDNQSYYKLWHLLYSFEGDNTPTGNGRLIQKMTELYGFEKEYATILANVSFQDDYGSLSAKAIHKILPHLKEGNRYDVACVYAGYRHSESSLTREEIANKVLKDRLMLLPKNSLHNPVVEKILNQMVNVINVIIDIYGKPDEIRVELARELKKNAKEREELTKSIAQTTKAHEEYKTLLQTEFGLTNVSRTDILRYKLYKELESCGYKTLYSNTYISREKLFSKEFDIEHIIPQARLFDDSFSNKTLEARSVNIEKGNKTAYDFVKEKFGESGADNSLEHYLNNIEDLFKSGKISKTKYNKLKMAEQDIPDGFIERDLRNTQYIAKKALSMLNEISHRVVATSGSVTDKLREDWQLIDVMKELNWEKYKALGLVEYFEDRDGRQIGRIKDWTKRNDHRHHAMDALTVAFTKDVFIQYFNNKNASLDPNANEHAIKNKYFQNGRAIAPMPLREFRAEAKKHLENTLISIKAKNKVITGNINKTRKKGGVNKNMQQTPRGQLHLETIYGSGKQYLTKEEKVNASFDMRKIGTVSKSAYRDALLKRLYENDNDPKKAFAGKNSLDKQPIWLDKEQMRKVPEKVKIVTLEAIYTIRKEVSPDLKVDKVIDVGVRKILIDRLNEYGNDAKKAFSNLDKNPIWLNKEKGISIKRVTISGISNAQSLHVKKDKDGKPILDENGRNIPVDFVNTGNNHHVAVYYRPVIDKRGQLVVDEAGNPKYELEEVVVSFFEAVTRANLGLPIIDKDYKTTEGWQFLFSMKQNEYFVFPNEKIGFNPKEIDLLDVENYGLISPNLFRVQKFSLKNYVFRHHLETTIKDTSSILRGITWIDFRSSKGLDTIVKVRVNHIGQIVSVGEY

SEQ ID NO: 6426 - protein, 1436 aa, synthetic construct
  REGION 1..1436: note = Synthetic
MKKILGLDLGTNSIGWAVVNEAENADEQSSIVKLGVRVNPLTVDELTNFEKGKSITTNADRTLKRSMRRNLQRYKLRRENLIKILKSSGFISNDTILSENGNRTTFETYRLRAKAATDEISLEEFARVLLQINKKRGYKSSRKAKSTEEGQLIDGMEVAKRLYNENLMPGQLSLELLKGGKKYLPDFYRSDLQAEFDKVWNIQKHFYPDQLTDGLKDELQGKNKSQTWAICAKPFGIVGIKRTTKGFEQKIENFQWRCKALSEQLGLEELAIVLQEINGQISNASGYLGNISDRSKELYFNHQTVGQYQMAQLDKNPNYSLKNQVFYRQDYLNEFETIWETQARFHKELTAELKKEIRDVVIFYQRPLKSQKGLISFCEFESRQIEVEVDGKKRQKTIGLRVCPKSSPLFQEFKIWQRLNDVEVSGMIIPNQQQDLFGYSKDYNYGKRWLLPEEKELLFAELNYKEKLSKAEALKMLFPHQKEVDMNFKELDGNRTQAELFKAYQAIAEMSGHDVGDLQKKSAKEMQQSISEIFDTIGIDTRILTFNSDLEGKDFEQQPMFRLWHLLYSFEGDNSSIGNEKLIEKLHGTFGFEKEYATVLANVVFKEAGDYSSLSTKAIRKILPHLKDGNDYSVACEYAGYRHSKQSLTKEEIENKVLKDKLELLPRNSLRNPVVEKILNQMVNVVNGIIEEYGKPDEIRIELARELKKSAKEREELTKSINETTRLHEELVKKLQNEFGLSHVSRNDIIRYKLYEELKNNGYHTLYTDTYIPREKLFSKEFDIEHIIPQAKLFDDSFSNKTLEARQANLDKSNTTAFDFVATKYGEDFANGDYKNRIDKLLDDKVISKTKHDKLLMKEADIPSGFINRDLRDSQYIAKKAREILEELVRFVLPTTGSITDRLREDWQLVDVMQELNWDKYNQLGLTEIIEGRDGQRIRRINDWTKRNDHRHHAMDALTIAFTKRSFIQYLNNLNARVQKGVDDWIDLDMVEFADLNKEDKTKAVYAIEKKELYRDNRGKLRFNPPMPLNEFRAEAKRQLENTLISIKAKNKVVTRNVNVTKKKSGKNKKVQLTPRGQLHLETIYGSSKRYVTKEEKVNASFDAEKINMVASNRYREALMARLNQFGGDAKKAFTGKNALDKNPIWLDELHTAQVPEKVKTVGFETIYTIRKEVSPDLKLDKVVDVSIRKILEDRLKEFGGDAKKAFSNLDENPIWLNKEKGIAIKRVTITGISNAEALHDKCDKDGNLLLDENGNKQPIDFVNTGNNHHVAIYRKPKLDKNGQPALDENGNIMYELDEKIVSFYEATSRAMQHLPIIDKEYKREEGWQFLFTMKQNEYFVFPRYDADGNMTFNPLEHDEAWYKNPENYAAISPNLFRVQKMTNKDYFFRHHLETTVQDNAKLKGITWKRFGLNGIENILKVRVNHIGQIVSIGEY

SEQ ID NO: 6427 - protein, 1435 aa, synthetic construct
  REGION 1..1435: note = Synthetic
MKNILGLDLGTTSIGFAHIVEDENKEKSEIKELGVRIVSLATDEQSDFEKGKSISTNANRTLKHGARLNLDRYQQRRKFLIDLLQKANLITSASILAENGKNTTHSTWQLRAKAVTERIEKEEFARVLLAINKKRGYKNSRKTKTEDEGQAIDGMAIAKCLYDENLTPGQLSLQLLQQNKKLLPDFYRSDLQKEFDLVWNLQKQFYPDILTDSFYKELQGKGKDATSKAFSKRYHFDTAENKGSKESVRLQAYQWRAEAISKQLSKEEVAYVLTEINNNLNNSSGYLGAISDRSKELYFNRQTVGQYLYAQLQENRHNSLKNKVFYRQDYLDEFERIWETQASFHKELTDELKKQIRDVVIFYQRKLKSQKGLVSFCEFESKEIEIEKDGKAITKSIGARVVPKSSPLFQEFKIWQILNNVTCKRKGIRKKKSSAKSTELDLFNEPSQSIFSLDMECKQLLFDELNLKGDLKSDKVLKLLGYSPQEWEINYNQLEGNRTQKSLYEAYLKIIEIEGYEVKDILQIKSTKDDWSLDESPLSASEIRERVKVIFQTLGICTKILYFDPLLPVKEFEQQYSYQLWHLLYSYESDDSTSGNETLYRILEKKYAFKREHATILANVALQDDYGSLSTKAIRKIYPYIKENQYSTACELAGYKHSKLSLTTEELEARELKNIIPLLKKNALRNPVVEKILNQMINVVNALIEKNSERDAEGKITKYFHFDEIRIELARELKKNAQERYEMTQNINKAKLEHQKISEKLQKQFGIKNPTKSDIIRYRLYQELEHNGYKELYTNTYIAPDVLFSKNIDIEHIVPKARVFDDSFSNKTLAFKEFNIKKGESTAFDYITSLNCEGELNQYLTRVENAYKTKSISLTKYKNLLKKASEIGDGFINRDLRDTQYIAKKAKEILFQVTKNVLSTSGSITDRLREDWGLVDVMKELNMPKYQSLGLTEVEERKDGNKVTVIKDWTKRNDHRHHAMDALTVAFTKPSYIQYLNHLNARKDENNKNYSVILAIEKKETIKVPINNGKNKRVFIEPILNFRQVAKKHLEEIFISHKAKNKVVTKNINKPAGTDKQQITLTPRGQLHKETIYGKYQYYVNKEEKVGVKFDERTITKVSNPLYREALLKRLQANDNDPKKAFAGKNALSKNPIYLDEAKTKTLPEKVNLTYLEEDFSIRKDISPDNFKDLKSIEKVIDQGVKRILIKRLQAYDNDPKKAFVDLEKNPIWLNKEKGIAIKRVTISGVSNAQPLHIGKDHLGKTTLNKEGKEVPVDYVSTGNNHHVAIYRDKEGNLQEQIVSFFEAVVRAQQGLPIIDKNYKQAEGWQFMFTMKQNEMFVFPNEATGFNPAEIDLLDPKNKKLISPNLFRVQTISIVKYGNSVVRDFKFRHHLETTLQDDKILQGITFQQIKSLEPLRNIVKVRINHLGDIVNIGEY

SEQ ID NO: 6428 - protein, 1434 aa, synthetic construct
  REGION 1..1434: note = Synthetic
MKNILGLDLGTTSIGFAYIVEGETPEQSSIQKLGVRVNPLTTDEQTNFEKGRPVSVNADRTLKRSARRNLSRFKDRRNNLINVLQKANIIDDNALLAEDGKNTTHTTFMLRSQAATQRVEKDELARVLLAINKKRGYKSSRRAKNEEEGQLVDGMGIAKRLYDEGLTPGQLTYILLKEGKKQVPDFYRSDLQAEFDKVWEFQKQFYPEIFTDAFRKNIEGKGQRVTSAAFWGNYNFNTAENKGTREEKRLQAYKWRAEAVEKQLAKEEAAYVVTEINANLSSSSGYLGAISDRSKELYFNKQTVGQYLYKQLADNPHTRLKGQVFYRQDYLDEFEIIWQTQAQYHPELTEALKDEVRDIVIFYQRKLKSQKGLVSFCEFESKEVERIKDGKTVKQTIGLKVAPKSSPLFQEFKIWQVLQNLEFRNKETKEKYIPDEAAKQQLFDELNLKGNLSAAAAIAFLGYKPKQWEANYDMLEGNRTARSFYEAYMKILDIEGYDVRGTFKQPDADVIKPEDIPLPPAQIKEAIVPMFEILGIDTGILNFDAELDGKAFEQQPQYRLWHLLYSAEDDTKKYSEDEIFTYGNDNIGLKKQLCEKFGFKPEHAKILVNIPLSDDYGSLSTKAMRKIYPYIKDNNYSTACANAGYNHSAASLTRDEIANRPLKGKLELLKKNSLRNPVVEKILNQMVNVVNTLIDTENDKLESAGQSRDFKFDEVRIELARELKKNAKERAELSSNINSAKAEHDKIVKVLQSKFGIKNPVRNDIVRYKLYSELKNNGYKDLYTNTYIRPEMIFSSLTDVDHILPQSRLFDDSFSNKTLVFKKDNLEKGNRTAHDYIDSKYGAEGLAEYEARVKMLFDFGVKGKEKEEGISKAKYQKLLKKESEIRDGFIARDLRESQYIAKKAKNMLYDITRVVVSTSGQITDRLREDWGLINIMQELNFEKYKAQGLTEFLEKKDGSLKEVIKDWTKRNDHRHHAMDALTVAFTKQSFIQYLNHLNAKSEGHKDHAHIIGIEQKETHRVREDRDNSKRVFNLPMPKFREQAKAHLESVLISHKAKNKVVTINRNHIKTAKGELVKPELTPRGQLHNETVYGKYRYYNGKEEKIGPKFDEATIKMVSNPQYKKLLLQRLAENDNDPKKAFGGKNALSKNPLYISSEKTLGVPEKVKLIWLEEDYSIRKDITPENFKDLKSIEKILDEGIKRIMLQRLEEFGNDPKKAFTDIEKNPIWLNKEKGISIKRVKISGIKNAGALHTKKDHLGIDILDKNNNPIPVDFISTGSNHHVAIYIDESGKLQDRIVSFFEAVTRAKQKISVVDKNYNSHLGWRLLFTMKQNEYFVFPNEETGFNPSELNLLSHENKNLISPNLFRVQKLSRLIYGTAVVREYVFRHHLETSVIDTKELQGIAYKSIKGLTPFKDIVKVRINHLGDIVQVGEY

SEQ ID NO: 6429 - protein, 1433 aa, synthetic construct
  REGION 1..1433: note = Synthetic
MGKKILGLDLGTTSIGFAVVDEGEDYESSFIELAGVRVNPLTTDEQTNFEKGKPIAVNAERTLKRGMRRNLDRYQLRRSALIKLLKNNNIINDDTLLNESGNDSTFSTWRNRALAATEKISLADFAKVLLAINKKRGYKSSRKAKSADEGQVIDSMSVARQLYDLNLTPGQLSYSLLKDGRKRLPDYYRSDLNAEFDKVWEYQKQFYPEIFTDDFKKLLSGKGQKATSAIFWSHYGFNIAENKGTREEKRLKAYEWRSKAFSYQLTKEEAAYVITDINGEINKSSGYLGEISDRSKELFFNKETVGQYLYKKLQNNPHSRLKGQVFYRQDYLDEFEVIWQTQAGYYPQLTNQLKQELRDIVIFYQRKLKSQKGLISFCEFESQEKEMVQNGKTIRKKIGLRVAPRSSPLFQEFKIWQQLNHLEFRNKNSREKIAPSQEEKDLLFEELNVKGRLSAGDAFRILGYKPSDWEMNYKFLEGNKTSKELYDAFLKILEYEGYENSLIKSDKDDNIDVSVIEQPASEIKKMVETVFNSLGIDTGILKFDAESDGKAFEKQPSYVLWHLLYSVEDDVKNYTQEDIIRYGNSNVGLKKKICEKFGFKPEHAKILSEIVFLGDYASLSTKALRKIVPFIKELTYDKACAEAGYRHSAASLTKEEIENKVLKDRLPSIKKNELRSPVVEKILNQTVNVVNMLIDRENEKRRLTGNQHPFHFDEIRIELSKELKKNTAERKELSTAINSAELNHIKISKILQTEFGVPNPSRKDIIRYKLYEELKNNGYKDIYTNTYIPREILFSKQIDVDHIIPQMTLFDDSFSNKTLVFRKVNQEKGNQTAFDYLLNKNGEKGIEEYLNRIRLLHEFNLKNKEEGIGKAKFLKLQKRESEIGDGFIERDLRESQYIAKKAKEIMLDISRRVVSTSGSITARLREDWGLNNIMQELNYPRYKSVGLIESVLQKDGQIKENIVNWSKRDDHRHHAVDALVIALTKPAYIQYLNHLNARKNESHPLHGHIIGIEKKHADIVYDSLGNRKRKFKEPVKNFRAVVKEQLEQLFVSHKAKNKVVTKNKNKIRIKQFEKVTTVLTPRGQLHKETVYGKYNFYQSKEEKVSAKFDKATIERITNPHYRKVLLQRLTENDNDPKKAFTGKNSLSKNPVYLDAEKTKILPELVKLVWLEEDYSIRKELTPDNFKDDKSIEKVLDEGVKRILKERLNEFNGDAKKAFSDLEKNPVWLNKEKGITIKRVAISGVKNAEPLGFKMDHLGKSLLDVNGELIPNNYIQPGSNHHVSIYADEKGVLQDRIVSFIDAVRLVTNGETVIDKQYNQGLGWKFLYTIKVNEMFVFPNGLSGFNPLEIDLLDPKNKSMISPNLFRVQSISLLKYGNNIIRDFKFRHHQESKLNDDKNLQGVAYRQVKSLKDLAGIVKVRIDHIGNIVSIGEY

SEQ ID NO: 6430 - protein, 1433 aa, synthetic construct
  REGION 1..1433: note = Synthetic
MKKILGLDLGCNSIGWALVNEAENTEEISSIIKLGVRVNPLTVDEMQNFEKGKSITTNADRTLKRSMRRNLQRYKLRRDTLIEVLKEHGFITDSTLLSEHGNKTTFETYRLRAKAAVEEISLEKFARVLLMINKKRGYKSSRKAKGSEDGVLIDGMDVARKLYEEGLTPGELCLQILEAGKKNLPDFYRSDLQNEFDRIWNFQKQFNPELFCDAVKEEVRGKNRSQTWAILAKFFVWSEKESVWNEKEARTEERVKEYKLVGLKRDTKGNELKLENYRWRVQALSEQLNPEIVAIVLQEINGQISASSGYLGAISDRSKQLYFNRQTVGQYLMSELEKDPNVSLRNRVFYRQDYLDEFDRIWEKQAEFHEELTVELKKEIRDIIIFYQRRLKSQKGLISFCEFEKREVVVEEDGRKKNKTVGCRVIPRSHPLFQEFKIWQTLNDIEVFAWDKQSKCKKADKSSILFDNSEDALLVEGKRFLYQEEKELLAKELFVKESMKKAEVLKLLFENYQELDLNFKQIDGNHTGFALFSAYSKMIEKYGYEPVDFKKSADEIIEKLETIFTNLGWNTELLSIDLSKEDKELERQSYFRLWHLLYSFEGDNTPTGNGKLLEKIMQLCDVEKEYAVELANVSFQEDYGSLSAKAIKKILPYLKEGNQYDVACDYAGYRHSRSSLTKDEIENKILKDKLEILPKNSLRNPVVEKILNQMVNLINTLIDTYGKPDEIRVELARELKKNAKEREELTKSIARNTREHDEIRQLLRTEFGMMNVSRNDIIRYKLYEELKDNGYKTLYSNEYIPREKIFSKEIDIEHVIPQARLFDDSLSNKTLEYRAINIEKGNKTAYDFVKEKYGNDGLEKFLNRCETLFKDKRTKLRKLKMEEKDIPEGFIDRDLRNTQYISKKAFAMLNEISRRVVATTGSITDKLREDWQLVDLMKELNLPKYEKLGMVEMFEDKDGRKIKKITDWTKRNDHRHHAVDALTVAFTKDVFIQFYNNKNAAWMPASKEHANITGIKARYFENGKALAPMPLAQFRAEAKRHLENLLVSIKAKNKVITSNVNRTKNKNGENRKLQQTPRGQLHLETVYGSHRQYATKIEKVNAAFDAAKIATVSKLAYRNALLKRLEAFGNDPKKAFTGKNTLEKNPLYLDENQTEMVPEKVQTVEFETVYTIRKPIDPNLSIDKVVDVKIRSVLEKRLKEYGGDAKKAFVNLDENPIWLNEAKGISIKRVSIRGISNAQSLHEKKDKDGNLILDKEGRKIPVDFVNTGNNHHVAVYKKPVLDKVGQMVLDEEGNPKYELDEVVVSFFDAVTRVNLDQPIIDKDYRRSEGWQFLFSMKQNEYFVFPNEKTGFNPKEVDLLNPENYAMISPNLFRVQKFTYKNYVFRHHLETTIKDTSSTLKGITWTDFRSSKGLDKIVKVRVDHIGQIVSIGEY

SEQ ID NO: 6431 - protein, 1433 aa, synthetic construct
  REGION 1..1433: note = Synthetic
MRRNILGLDLGTTSIGFAKVIEDDDYQNSSVELIGVRVNPLTTDEQTNFEKGKPVSVNADRTLKRGMRRNLDRYQLRRNNLIEILKANNIITADTKLAEDGKNTTHSTYALRALATTNEAPLDAFARVLLAINKKRGYKSSRKAKNEDEGQLIDGMAIAKRLYEENLTPGQLSYQLLKGGKKYLPDFYRSDLNTELDKVWDFQKQFYPEILTDEFKKHLEGKGQRATSAAFWGQYGFNTAENKGSREEKKLKAYQWRSEAVAKQLAKDEVAYVITEINNDFNKSSGYLGAISDRSKELFFNKQTVGQYLFQQLKQNPHTRLKGQVFYRQDYLDEFETIWETQAKFHPQLTRELKEEIRDVVIFYQRKLKSQKGLVSFCEFESREIEVEKNGRITKKRIGLRVAPKSSPLFQEFKIWQVLNNLEFRNKSTKEVFVPDMDAKQQLFDELNIKGNLLASDAIKILGYKSKEWEANYHTLEGNRTNKALYDAYLKILELEGYDEDLLKLSGSDDIDVSKIEKPASEIKQMVQSVFDVLGINSAVLEFDAEMDGKEFEQQPLYQLWHLLYSAEDDNKKYLQEDIFTFGNNDISLKKKLSGKFGFKPEHTKILVNVALGDDYGSLSSKAMRKIYPFIKELTYDKACIEAGYRHSASSLTKEEIDARPLQKRLDLLKKNELRSPVVEKILNQMVNVVNTLIDDENTRRKTLGVSEDFYFDEIRIELARELKKNAKERAEMTTNINAAKQLHEKIVRILQTEFGVPNPSRNDIIRYKLYEELKNNGYKDLYTNTYIPREILFSKQIDIDHIIPQMSLFDDSFSNKTVVFRKDNQDKGNKTAYDYILGKYGEQALEEYMLRITGLFESGKKSKEEGISKAKFQKLQKRLIDIGDGFIERDLRESQYIAKKAKNILHSICRRVVSTSGEITARLREDWGLVNVMQEINLPKFRALGLTEMIEKRDGGQKERITDWTKRNDHRHHAMDALTIAFTRHSHIQYLNHLNARKDEANKWHPVVSKIEEKETELVYDDLGNRKRKFKEPIPDFREVVKEHLENVLISHKAKNKVVTKNKNKIKTAKGEKIKTELTPRGQLHKETIYGRYRYYESKEEKVGPKFDKATIQMVANPLYKKLLLDRLAENEDDPKKAFGGKNTLSRNPIFLDEVRQEVLPEKVLLRWLEDDYSIRKDVTPESLKDVKAIDKVLDEGVKKILLKRLADFDSDPKKAFSDLDKNPIWLNEVKGISIKRVTISGVKNAEALHHKKNHLGNDILDENGKQIPSSFVSTGNNHHVAIYRDAEGNLQDRVVSLFDAVQLVNAGEAVIDKAFNQGIGWQFLFTMKQNEMFVFPNDQIGFNPKEVDLLNLQNRKLISPNLFRVQTISVVKYGNNTIRDFKFRHHLEAQLIDKKELQGIAFQQYKSLLPLEHIVKVRLNHLGHVVGVGEY

SEQ ID NO: 6432 - protein, 1433 aa, synthetic construct
  REGION 1..1433: note = Synthetic
MKKILGLDLGTTSIGYAQVNESEDFKDSSIERIGVRVNPLSVDEQTNFEKGKPISINADRTLKSGARRTLDRYQDRRSNLIDALVKSVIITEDTVLAEDGKNTTHSTFALRAKSASEKVEKAEFARILLAINKKRGYKSSRKTNNNDDEGQAIDGMAIAKKLYDENLTPGQLAYQLLKEGKKYLPDFYRSDLQAEFDKIWTFQKQFYPEILTDELQKELAGKGQRATSAIFWKKYDFNTAENKGTREEKKLKAYEWRSTSVDKKLQKEEVAYVITEINNNLTNSSGYLGAISDRSKELYFNKQTVGQYLFKQIQKNPHTKLKNQVFYRQDYFDEFEIIWETQAKFHPELTEELKNKIRDIIIFYQRKLKSQKGLISFCEFERKEVEIEKGGRRMKKTIGLKVAPKSSPLFQEFKIWQVLNNVLIRKKGSKKRRVKEPDQLNLVEQEQEVMFFDMQTKQTLFDELNVKGNLKAKRIIELIGQDANDWEINYSEIEGNRTNKALYDAYLKILDLEGYDTKALLDVKTSKDEVELDDINISGPEVKDLVKRIFESLEIDTQILEFDAELDGEVFEKQSSYLLWHLLYSYEGDDSPSGNEKLYKLLKQKFGFKKEHAQILASITLSDDYGSLSAKAMRKIYPYIREQTFDKAASLAGYRHSASSLTKEEIANRPLKDKLELIKKNSLRNPVVEKILNQVVNIVNSLIEANSEKDSDGNIISYFKFDEIRIELARDLKKNAKERAEMTLNINAAKIVHEKIFKLLQAEFGVKNPTRNDIIRYKLYEELKNNGYKDLYTNIYIPREILFSKQIDIEHIIPQSKMFDDSFSNKTIVFRKDNLDKGNSTAFDYIDSRFGKDKLTDFEQRIEFLFEQGKKNKEEGISKAKYQKLLKREADIGDGFIERDLRDTQYIAKKARNLLYEICRIVTPTTGSITDRLREDWDLVNIMQELNLDKFKKLGLTEMVEKKDGSFKERIVDWSKRNDHRHHAMDALTIAFTKHSHIQYLNYLNARKNENHKQHHNIIGIERKETEFVIDDLGNKKRKFHLPLPNFREEAKKHLENVLVSFKAKNKVVTKNKNKTASSKGEKIKVELTPRGQLHKETVYGKYKFYVSKEERIGGKFDQRTIERVANSTHKRLLLQRLLENDNDAKKAFTGKNALAKNPIYLDDTKTLTLPEIVKLTWLEEDYSIRKDITPENFKDIKVIDKILDEGVKRILKERLAKHNNNPKEAFSDLEKNPIWLNEKKSISIKKVKISGINNAEALHYKKNHLGIEILDDEKKRIPVDFVSTGNNHHVAIYRDEKGNLQEDVVSFFEAVARVNQNLPIIDKTLKAYLGWTFLFTMKQNEYFIFPNKQTGFNPTEIDLLDSMNNKLISPNLFRVQKFTVKDYFFRHHLETNVEDDSKLKNTTWKREGLGGIGNIVKVRINHIGQIVKIGEY

SEQ ID NO: 6433 - protein, 1433 aa, synthetic construct
  REGION 1..1433: note = Synthetic
MNNTENYILGLDLGTNSIGWAVINDAQNPGETPEIIDLGVRINPLTTDEKNEFTQGKAISTNAGRTISRGIRRNNQRYKLRRLNLINILKNNNIINNETILGENGQNTTFELLKLRAKAAKEQVSLKDLGHILLKINKKRGYKSNRKAQDNDEGQLIDGMAIAKILHNENLTPGQLSLRLANEGRKVLPTYYRSDLQAEFDKIWEFQKQFHPDILTDELYTELIGKTKKTTIDYFQKYNINPAEYKYSNQSEKIKVPLQLRVDAISKEISLENLALVIIEINGNISSSSGLLGSISDRSKELYFSEQTIGEYLYAQLENNPHASLKNQVFYRQDYIREFETIWETQANFYPELTIELKKEIGDEIFYQRKLKSQKGLVSFCEFESKEIETDNDGKKSTKIIGARVAPKSSPLFQEFKIWQILNNILIRRKGVKKRTAEKVSQQNLFNEEVSIFELNLEQKELLFEELNLKDCLTSDNCLKILGYSNKEWEMNYSKDAKIEGNATNKAFYDAYLQILEIEGYESDFIKNNDAPKIKKRLFTIFNELGIDTRILDFDAELSGKDFEKQPAYQLWHLLYSYESDNSPSGNERLYSLLEQKFGFKREHSEILANVKLLADYGSLSTKAIRKIYPYIRENKFSEACELAGYRHSKHSITKEEIDNKALKETLTILKKNSLRQPVVEKILNQMINVVNELIYKYSEKDDEGNIVKYHKFREIHIELARELKKSAKERSEMQTQINKSTKENEKITKILQDDFSIMYPTKKDIIKYRLWLELSPIGYRDLYTNQEIKKESLFSKNNTIEIEHIIPKARLFDDSFSNKTLAFSNINKLKGDNTAIDFISNTYNSDLDNYIERVETLYKAKTISKAKYLKLLKKTSEIGDGFIERDLRETQYIAKKAKDILSQITKNIVSTSGSITDKLREDWGLINIMKELNLPKYRALGLTEMQERKHGHKVETIIDWTKRNDHRHHAMDALTVAFTKLSYIQYLNHLNARKDESDKKHASVMKTQNNEMTKVIDHNGQEKRVFKEPIPKFRKIAKEYLENILISHKAKNKVITININKAKNKVTSEIIDKNGNKKTIKGQITKTPRGQLHKETIYGTYQYYETKEVKISSRLNKETINKVANPLYKSLLLKRLEENNNDPKKAFSGKNSINKNPIFLDKNKTKTMPDSVKLAWLETGYSIRKDVNPSNFDSEKSIEKVLDKNIRNILIQRLDEYNGDPTKAFSNLDKNPIWLNKEKGISIKRVTITGVSNAEPIHYKKDHLGNFILNDKGDKIPVDYIQTGNNHHIAIYKDDKGVLQEQVISFYEAVERANQGEPIINKTYKQEEGWKFLFTMKQNEMFVFPSDDFNPNDIDLLDRKNKKEISKHLFRVQKLSFTGYKYVFRHHLETTVDTKKQLNDIAYKQFSNLDFANNIIKVRINHLGDIVSVGEY

SEQ ID NO: 6434 - protein, 1433 aa, synthetic construct
  REGION 1..1433: note = Synthetic
MKNILGLDLGTTSIGFAHVIESDDSLKSSIKQIGVRVNPLSTDEQTNFEKGKPITINADRTLKRGARRNLDRYQDRRANLIHALFKANIITRETKLAEDGKSTTHSTWRLRAQSATERIEKDDLARVLLAINKKRGYKSSRKAKNEDEGQAIDGMEVAKRLYEEKLSPGQFAYKMLQESKKHIPDFYRSDLQEELDKVWAFQRKYYPEILTDEFKKELEGKGQRATSAIFWVKYQFNTAENKGTREDKKLRAYKWRSEAVSQQLEKEEVAYVITEINNNLNNSSGYLGAISDRSKELYFKKETVGQYLFKQLLKNPHKQLKNQVFYRQDYLDEFEVIWNEQKKHHPELTDELKIEIRDIVIFYQRKLKSQKGLVSFCEFESKEIEIETGKKKTIGLKVAPKSSPLFQEFKVWQVLQNVLIKKKGSKKRKTKNEQQGSLFEEAKEIFEFDLESKKHLFDELNIKGNLSAKTVLELLGYKDQDWEINYSVLEGNRTNKALYEAYLKILDIEGYDVKDLLDVKSNKDEIELDDIQIDASEIKNMIKQIFDTLKIDTAILDFDPELDGKAFEQQLSYQLWHLLYSYEGDESASGNEKLYELLEKKFGFKRAHSQVLANVSLSDDYGNLSSKAIRKIYPFIQENDYSTACELAGYRHSASSLTKEEITNRPLKDKLEILKKNSLRNPVVEKILNQMVNVVNALIEKNSKRDENGNIVEYFKFDEIRIELARDLKKNAKERAEMTSNINAAKTNHDKIFKILQNEFGVKNPSRNDIIRYRLYEELKSNGYKDLYTDTYIPREILFSKQIDIEHIIPQSKLFDDSFSNKTVVFRKDNLDKGNKTASDYLESKFGEKGLEDFESRISSLFDLNKRNKDEGISRAKYQKLLKKETEIGDGFIERDLRDSQYIAKKAKNMLYEISRSVLSTTGSVTNKLREDWGLINIMQELNFEKFKKLGLTEMVEKKDGTFKERIKDWSKRNDHRHHAMDALTVAFTKHNHIQYLNNLNARKNESKKLHKNIIGIESKETHISIDDRGNKKRIFNLPIPNFREQAKVHLESVLVSHKAKNKVVTKNKNRTKTAKGEKVKVELTPRGQLHKETVYGKYQYYTSKVEKVGAKFDLEIIGRVSNPTHKQALLQRLSENGNDSLKAFSGKNSPSKKPIYINTEKTEILPEKVKLVWLEEDFSMRKDITPENFKDEKLIEKVIDIGTKRILLRRLREFGADAKKAFSDLDKNPIWLNKDKGISIRRVTISGVSNTEALHFKKDHFGNKILDKDGNHIPVDFVSTGNNHHVAIYKDQEGNLQERVVSFFEAVERVKQGLPIVDKAFNQNLSWQFLFTLKQNEYFVFPNNITGFDPNEIDLKDPKNRKLVNPNLFRVQKFGDLSKSGFWFRHHLETNVDVKKELKGITYFDIYSTKALEKIVKVRLDHLGEVVKVGEY

SEQ ID NO: 6435 - protein, 1432 aa, synthetic construct
  REGION 1..1432: note = Synthetic
MAKNILGLDLGTNSIGWAFVKEAQDSTEQSSIEKIGVRVNPLTTDEQTNFEKGKPITTNAGRTLSRSARRNLQRFKLRRENLIQILKTQNWISNESILAENGNKTTFETFRLRALAAEQPLELQYLARVLLMINKKRGYKSSRKVNNTEEGTLIDGMDIAKKLYHDNITPGQFVLDLLKSGKKKVPDFYRSDLQAEFDKIWNFQKSFYPELLTDTLKEELNGKKVQATWAVLKDPFNLVGIKRNLKRDELKLENYQWRNDALTKQMSLEELAIVLQEINGQLTSSSGYLGAISDRSKELYFNNQTVGQYQYVQLQNNPHARLKNQVFYRQDYMDEFEKIWEVQAKNREAVFTNILKEELRDVIIFYQRKLKSQKGLISICEFEQREIVKDGKNKTVGLRVVPKSSPLFQEFKIWQILHNVKLKNKTTKEVLALNQDDKQFLFDELNLKGNLSAAEVLKLIIDKPKDWEITNYSELEGNRTNQALYNAYLTILDNEGYDVREELKLKLNKDDITLADIDKSAAEIKEMVRAIFSHLEIKTEILDFNAEIEGKAFEEQLSFQLWHLLYAYEEDNSPTGMDTLYRLLEEKFGFNKEQAKVIGAVAFHNDYGSLSSKAIRKIYPYLKELEFSKACEYVSAEFNLPNYKHSKHSLTKEELENRELKSRLDILPKNSLRNPVVEKILNQMVNVVNTLIDSENDKLEKAGKERDFQFDEIRIELARELKKNAKEREELTKAVNQGKLEHEKIVKILQSVDGIKFPTRNDIIRYKLYQELKNNGYKDLYTNQYIERKDVFTKKYDIEHIIPQSRLFDDSFSNKTLVPRQINLDKGNKTAADYIFDTFGQDKLNEFLLRVEALFNQKEEGISKAKYKKLTMKSAEIGEGFIERDLRDSQYIAKKAKEILFQITKSVLSTSGSVTDRLREDWDLVNVMKELNLEKYRSAGLTEMQTTKDGNPKEVIKDWTKRNDHRHHAMDALTVAFTKRSFIQYLNNLNARRNDEYDSISNAKDRKSIDTNRLKISSKDALGIEEKETHKVHDKKGNYKRVFNEPIPNFREVAKQHLEGVLVSHKAKNKVVTRNINKIKGSDKVQIALTPRGQMHKETVYGKVKQYAFKEEKVSAKFDEATIAMVSNPQYRALLLQRLVENNSDPKKAFTGKNTLAKNPILLKDGTELPEKVKLMWLEDDYTIRKDVGPDLKIDKVIDEGVKRILQTRLNQFKGDAKKAFSDLEQNPIWLNEEKGIAIKRVTISGVKNAEALHTKKDHLGNDVLDENGNQIPVDFVSTGNNHHVAIYEDEKGNLQEKVVSFYEAVAQVNAGLPIVDKVYNAHLGWKFKFTMKQNEMFLFPSEDFNPNEIDLLDRKNQALISKHLFRVQKISTKNYMFTHHLETKAIDGEILKNKKSLLGVTHYFIQSTSNLKNIIKVRTNHLGEIIHIGEY

SEQ ID NO: 6436 - protein, 1432 aa, synthetic construct
  REGION 1..1432: note = Synthetic
MKRILGLDLGTSSIGWALVNEGEGAEEISSIVQLGVRVNPLTVDEMQNFEKGKSITTNADRTLKRSMRRNLQRYKLRRDVLIELLKKVGFITDKTILSEQGNRTTFETYRLRAKAAEEEVSLEELARVLLMINKKRGYKSSRKAKGEEDGSLIDGMEIAKKLYDEDLTPGQFYLQLLESGKRTFPDFYRSDLQDEFDRIWNFQKQFNPQSFCDAAKEEVKGKNKSQTWAILAKYFTWTKEVSVWNENESKTENQEKEYRLVGIKRTVKGEALKKENYRWRVQALTEQLDLEEIAVVLQEINGQISASSGYLGAISDRSKVLYFNHQTVGQYQMAELDKNPNMSLRNMVFYRQDYLDEFNVIWEKQTEYHKELTPELKKEIRDIIIFYQRRLKSQKGLVSFCEFENREVIVEKDGKKQTKIIGCRVIPRSHPLFQEFKIWQTLNNIEVFVGEKRKKRKQTNVSFGLFDNTVDALAMEGRRFLYQEEKEILAKELSCKKDLTKTEVLKLLFENPQELDMNFKQIDGNCTGFALFSAYSKMIEKYGYEPLDFKKPADEIIAQLKAVFVDLGWNTDLLSIDLDKEGKDLEMQPYFRLWHLLYSFEGDNTPTGNGKLIEKIMQLCRVEKEYAIELANISFQDDYGSLSAKAIKKILPYLKEGSQYDIACEYAGYRHSKSSLTKEEIENKVLKDKLDILPKNSLRNPVVEKILNQMVNVINAVIDAYGRPDEIRVELARELKKSAKEREELTKVIAKNTREHDEIRKLLQSEFGMIHVSRNDIIRYKLYEELKENGYKTLYSNQYIPKEKLFSKEIDIEHIIPQARLFDDSLSNKTLEYRAINIEKGNKTAYDFVKDKYGEEGLQEYLNRCENVCKDRKAKLRKLKIEQSDIPDGFIDRDLRNTQYIAKKALAMLNDICRRVVATTGSITDKLREDWQLVDVMKELNLPKYEALGLVESFEDKDGRIIKRIKDWTKRNDHRHHAMDALTVAFTKDVFIQYFNNKNAAWKSDCKEHTNIVGIKTRYFESGKAVPPMPLGQFRTEAKWHLENLLVSIKAKNKVVTTNVNCIKKKGGIFKKHQQTPRGQLHLETIYGSHKQYLTKMEKVNASFDAAKIATVSRQNYRNALLKRLEAFRNDPKKAFTGKNSLEKNPIYLDRAQTMQMPDRVQIVELETVYTIRKPIDPGLNVDKVVDTKIRTILEQRLKEYGGDAKKAFVNLDENPIWLNREKGISIKRVSIRGINNAQSLHVKKDKNGNPILDENGKQIPVDFVNTGNNHHVAIYRKPVLDKKGQEMFDEDGNLMYELDEVVVSFFEAVTRANLGLPVIDKDYRRSEGWQFLFSMKQNEYFVFPNEKTGFNPMEIDLLDPNNYAVISPNLFRVQKFSSKYYVFRLHLETTIEDKKELQEITWKRITSLTKIDRMVKVRINHIGQIVSVGEY

SEQ ID NO: 6437 - protein, 1432 aa, synthetic construct
  REGION 1..1432: note = Synthetic
MKKILGLDLGTTSIGWALVNEAENPQEESNIIKAGVRVNPLSSDEIQDFEKGKSITTNAARTQKRSARHNLQRYKYRRDILIQILKEHGFITDSDILSESGNKSTFETYHLRAKAVSEEISLKDLARVLLMINKKRGYKSSRKIKKTEEDGSLIDSMDIAKKLYEDNLTPGELCLEYLRQGRKILPDFYRSDLQNELNRLWDFQKTFYPDVLTDILKEGLRGKNKTQTWTKLAENFVWQETVEVWNEEKAETQYVIKDLHLSGLKRTTKGQEQKIETYSWRVQAQREKLPPEMLAIVIQEINGQISSSSGYLGAISDRSKELYFNRETVGQYLLRIIQENPNRGLRNIVFYRQDYMDEFDKIWETQAKFHGELTESLKNEIRDVVIFYQRKLKSQKGLVSVCELEREKRILPDGREKIIGAKVISRSHPLFQEFKIWQCLNDIEVFVVDKNTKRKKTKKPQTLFEDYEDALLTNGRRPLYLEEKEILAKELMIKSSLKKSDVLKLLFDESDLNLDLNFKSIEGNRTGFALFSAFSRAIETYGYEPVDFKKSSQEIMDMLFQIFTDLGWNTNLLVMDLGESNKEMERKDFFRLWHLLYSFEGDNSRTGNESLIQKLMSLCGMERDYAQSIANVTFEGDYASLSAKAIRKILPYMKEGNQYSVACDYAGYRHSRSSLTKEEIANKVLKDKLQLIPKNGLRNPVVEKILNQMINVVNQIINEYGRPDEIRIELARELKKSSKEREELIKSIASNTKENEKIREILLKEFNLSTVSRTDIIRYKLYEELKENNYHTLYSNKYIPRELLFSKEIDIEHIIPKARIFDDSLSNKTLEYRSVNIEKGLMTAYDFVQSKYGEEELEAYVNRCENIFRGKPTKLRKLKMSALEIPDGFVDRDLRNTQYIAKKALEMLNEICRRVIATSGSITEQLRQDWQLVDVMKELNLSKYEALGEVETYQDRDGRTVKRIVNWTKRNDHRHHAMDALTVAFTKEAYVQFFNYRNAAYDSEHKEHSNIMAIKNKYFKDGRINPPMPLNKFRAETKRLMESLLVSVKAKNKVVTNNVNRGKFKNGERSKIQLTPRGQLHLETIYGVSKRRIFSEECVNASFTQEKIMRVSNEKYRNALLKRLGEFDGNPKKAFTGSNSLEKVPLYIDERQREQVPEKVRLSDWEILYTVRKPISKDLNLEKVVDPSIRRVLEKRLAEFGGNKDKAFSNLEENPIWLNKEKGICIKCVKVEGPSTVVALHHKKDKDGQALLDENGDMIGCDFVSTGNNHHVAVYKKPKQDKNGQIKLDKEGNIEYEITEKVVPFFEVVERVNQGLPAVDRNYKTDEGWQFLFTMKQNEYFVFPNAKTGFDPANIDLLNPDNYSLISPNLFRVQKISYRKYVFRHHLETTIDNSSTKMKGITWTDFRSSKGLDKIVKVRVNHIGKIVSVGEY

SEQ ID NO: 6438 - protein, 1432 aa, synthetic construct
  REGION 1..1432: note = Synthetic
MKKILGLDLGSNSIGWALVNEAENSDEASSIIKLGVRVNPLTVDEMQNFEKGKSITTNADRTLKRSMRRNLQRYKLRRDALIKLLKKVGFITDGTILSEQGNRTTFETYRLRAKAPDEEISLQELARVLLMINKKRGYKSSRKIKEKETGTLIDGMEVAKKLYDEDLTPGQLCLQLLESGKKSLPDFYSSDLQEEFDRIWNFQKQFNPKAFCDTAKEEIKGKNKSQTWAILAKYFIWTDEMVVWNEKESKTERVEKECKLVGLKRTVKKEEQRKENYRWRVQALTEQLDLEKVAVVLQEINGQISTSSGYLGAISDRSKVLYFNRQTVGQYQMAELEKNPNTSLRNMVFYRQDYLDEFDKIWEKQAEFHKELTVELKKEIRDIIIFYQRRLKSQKGLIGFCEFENREIMVEKNGKMQAKVVGCKAIPRSHPLFQEFKIWQTLNNVEVFAGEKKCKRKRTDAFPGLFDGTEDTLMVEGWRYLYQEEKEILAKELSVKKSLKKECILKLLFDNPQDLDMNFEQIEGNDTGNVLFSAYSKMIEKYGYEPLDFGKPTDEIIERLQDIFTDLGWNTDLLFVDLNKEGKDLEKQPYFKLWHLLYSFEGDNTPTGNGKLVEKLMELCHVGKECALELVNISFQNDYGSLSAKAIKKILPYLKEGNRYDVACGYAGYRHSKSSLIKEEIENKVLKDKLDILPKNSLRNPVVEKILNQMVNVINAIIDTYGKPDEIRVELARELKKSAKEREELTKAIAKSTREHEEIRKVLQEEFGMINVSRNDIIRYKLYEELKDNEYKTLYSNQYIPKEKVFSKEIDIEHIIPQARLFDDSLSNKTLEYKAINIEKGNKTAYDFVKEKYGEKGLQQYLNRCESLFKGHRTKLRKLKMEQENIPEGFIDRDLRNTQYIAKKALAMLNEICRRVVATTGSITDRLREDWQLVDVLKELNLPKYETLGLVEVYEDKDGRKIKRIKDWTKRNDHRHHAMDALTVAFTKDAFIQYFNNKNAAWQVDCKEHSDIIGIKTRYFENGRALPPMPLVRFRAEAKSHLETLLVSIKAKNKVVTNNVNCTKRKGGENKKLQQTPRGQLHLETIYGSHRQYVTKEEKVNASFDSSKIATVCKQAYRNALLERLAAFGNDPKKAFTGKNSLEKNPVYLDREQTARVPERVRTVELETVYTIRKPVDPNLSVDKVVDAKVRSILEQRLREYDGEAKRAFVNLDENPIWLNEEKGIAIKRVTIRGINKVQSLHGKKDKNGNLILDETGKKIPVDFVNTGNNHHVAIYRKPVLDKTGQEMLDAEGNPVYELDEVVVSFFEAVTRVNLGLPVIDKNYNKSEGWQFMFTMKQNEYFVFPNEKTGFDPKEVDLLNPENYAVISPNLFRVQKISTKNYMFRHHLETTVIDNKPLRKITWELIQTPNKLDGIVKVRVNHIGQIVSVGEY

SEQ ID NO: 6439 - protein, 1431 aa, synthetic construct
  REGION 1..1431: note = Synthetic
MKTNNILGLDLGVTSIGFAHVTESDNSNESEIKQIGVRINSLTVDEQTNFEKGRPFSINADRTLKRGARRNLDRYQDRRKNLIEVLTNSGLINSENKLTENGKNTTHSTWCLRSKAVTERIEKEEFARVLLAINKKRGYKSSRKAKNEEEGQAIDGMAIAKRLYEENLTPGQLAYELLKEGKKSIPDFYRSDLQAEFDKVWDFQKQFYPEILTDEFYKELQGKGQRATSAIFYTKYGFNTAENKGNRDEKKIQAYKWRSEAVSQKLEKEEVAYVITEINNNLNNSSGYLGAISDRSKELYFNKQTVGQYLYEQLKNNRHTRLKNQVFYRQDYLDEFETIWNTQAQFHSELTNELKEEIRDIIIFYQRKLKSQKGLISFCELESKEVEINGKKKTIGFRVAPKSSPLFQEFKIWQFLHNLELQNKNENTKRELEEEEKELLFEELNLKGNLSSKKALELLLKKTQGYNFKFFENLEGNRTNKVLYEAYLKIIDIEGYNVKEILKVKSNKDEVELDDLKVSAIEIKNMVRDIFETLEINTEILDFNAELEGKKFEKQPSYQLWHLLYSYEGDESQSGNEKLYELLEKKFGFKREHSQILANITLSDDYGNLSTKAMRKIYPHIRENNYSTACEIVGYRHSKHSLNKEELENRKLDDTLELLKKNSLRQPVVEKILNQMINVVNTLIEKNSKKDENGNIIEYFKFDEIRIELARELKKNAEERRELDSQVREGKLRNEKVYKILQTEFGLKNPTRNDIIRYRLYEELKSNGYKDLYTNEYIPREILFSKQVDIEHIIPQSKLFDDSFSNKTVVFRKDNLEKGNQTAFDYIKNKYGEAKLNEFITRVESLYESGKKKKEEGISKAKYQKLLKQESEIGDGFIERDLRESQYIAKKAKELLFKITKSVVSTSGSITDRLREDWDLVNVMKELNLPKYRSLGLTEIQERKFGKKVEVIKDWTKRNDHRHHAMDALTVAFTKHNHIQYLNYLNARKNENHKLHSNIIAIENLETESKVDDKGNKKRVFKEPIPNFRQVAKEHLENVLISHKAKNKVVTKNKNKTKNKKGEKIKVELTPRGQLHKETIYGKYRFYQSKEEKVSAKFDLETIEKVANPAYKNALLQRLSENGNDPKKAFAGKNALNKTAIYIDLENDIKVPETVKLVWLEEDYSIRKDVTPENFKDEKSIDKILDEGVKRILKSRLKEFGGDAKKAFSDLDKNPIWLNKEKGISVKRVRISGVKNAEPLHYKKDHFGNDILDEKGKKIPIDFVSTGNNHHVAIYSEPAFDRKNQPILDEYGNQKYNLQEKVVSFFEAVERVNQGLPIIDKTCNQHLGWQFLFTMKQNEMFVFPNEVTGFSPSEVDLLDPKNKKMISPNLFRVQKIATKNYFFRHHLETTVEEKKELKDIAYKPQLGLNAINGIIKVRINHLGDIVGIGEY

SEQ ID NO: 6440 - protein, 1431 aa, synthetic construct
  REGION 1..1431: note = Synthetic
MKRILGLDLGSSSIGWALVNEAESKNERSSIVKLGVRVNPLTVDESINFEKGKSITTNADRTLKRSMRRNLHRYKLRREALIEVLKECKFITEDTILSENGNRTTFETYRLRVKALTEEISLEEFARVLIMINKKRGYKSSRKAGGAEEDTLIDGMDIARKLYDANLTPGELCLQLLSAGKKVLPDFYRSDLQNELDRIWEKQKEYYPGILTAALKEELRGKKRDAVWAICANAFVWKETYTEWNNEESKNEQIEKEHKLEGIYSKRKRDEAKKENLQWRVSGLKEKLSLEQLVIILQEINTQINNSSGYLGTISDRSKELYFNKQTVGQYLMDILDNNPNASLRNIVFYRQDYLDEFNVLWEKQAEFHKELTGELKKEIRDIIIFYQRRLKSQKGLISFCEFESRQIEVKIDGKRKIRTVGNRVIPRSSPLFQEFKIWQILNNIEVTAVGNKNKQRMQNGSNEPDDTEQLELNGRRYLYQEEKELLAKELFVRDKMTKLDVLRLLFDNPEELDLNFKTIDGNKTGYLFFQAYSKMIEMSGHEPVDFKKPIEKIVEQVKSVFVLLNWNTDILSFDSNKELDKQSYYKLWHLLYSFEGDNTPTGNGCLVQKIMDSYGLGKEFAKILANITFQEDYGSLSAKAIHKILPHLKEGNQYDVACEYAGYRHSKSSLTKEEIANKVLKDKLEVLPRNSLRNPVVEKILNQMVNVINAIIEAYGRPDEIRVELARELKKNAKEREKLTKSIAETTKTHEAHKKLLQEEFGLKNVGRSDILRYKLYKELESRGYKTLYSNTYIPREKLFSKEFDIEHIIPQARLFDDSFSNKTLEARNVNIEKGNRTAYDFVKEKFGESGTDNSLDCYLNNIEVLFVSGKISKTKYTKLKMTEQDIPGGFIERDLRNTQYIAKKALSMLNEISRCVVATSGSITDKLREDWQLVDVMKELNWEKYKALGLVEYFEDKDGKQIGRIKDWSKRNDHRHHAMDALTVAFTKEVFIQYFNNKNASLNPNTNEYAIKNKYFQNGRAIAPIPLNEFRAEAKKHLENTLISIKAKNKVITNNINKTKKRGGVNTKKQQTPRGQLHLETIYGCCRQYLTKEEKVNASFDVSKIATVSSSVYRDALLKRLQEHHNDPKKAFAGRNSLDKKPVWLDKEQIRKVPKKVKTVTFETIYTIRKEISPDLRVDKIIDSGVRKMLTGRLKEYGNDAKKAFSNLDEKPIWLNKEKGIPIKRVTISGISNAQSLHVKKDKDGKPVLDGNGRNIPVDFVNTGNNHHVAVYRRPVIDKNGQMVIDENGNLKYELEEVVVTFFDAVTRVNLGQPIIDKDYKASEGWQFLFSMKQNEYFVFPNKKTGFNPKEIDLLDADNYGLISPNLFRVQKFTHKNYVFRHHLETTIKDTSSILRGITWIDFRSSKGLDSIVKVRVNHIGQIVSVGEY

SEQ ID NO: 6441 - protein, 1431 aa, synthetic construct
  REGION 1..1431: note = Synthetic
MKKILGIDLGTTSIGYAQVNESADFGKSSIERIGVRVNPLTTDEQTNFEKGKPISINADRTLKRGARRMLDRYQDRRSNLIDALAKAKIITENTILAEDGKNTTHSTLALRAKSVNEKIEKEEFARILLTINKKRGYKSSRKANNDVEGMAIDGMAIAKKLYDENLTPGQLAYQLLKEGKKYLPDFYRSDLQAEFDKVWSFQEQFYPEILTGELKKELAGKGQRATSAIFWKTCNFNTAENKGTREEKKLNSYQWRSNAVSNRLEKEEVAYVITEINSNLNNSSGYLGAISDRSKELYFNKQTVGQYLYKQIQNKPNTKLKNQVFYRQDYFDEFETIWETQAKFHAELTDELKKEIRDIIIFYQRKLKSQKGLVNFCEFERKEVEIERGGLRIKKIIGLKVAPKSSPLFQEFKIWQVLSNILIRKKGSKKGTVKVEDDGVLSEGTEIFVFDLQAKQVLFDELNIKGNLKSNKIIELLGYDAKDWEMNYSEIEGNRTNKALYNAYLKIIDLEGYDTKELLNVSSNKDELDLDDINIPVVNIKDMVKRIFESLEISIEILEFNAEQDGKAFEQQASYQLWHLLQSYEGDDSPSGNEKLYELLKQKFGFKKEHSQILAGVALSDDYGSLSAKAMRKIYPHIKEQTFDKAAAVAGYRHSAASLTKEEIANRPLKDKLELVKKNSLRNPVVEKILNQLVNVINALIETNSEKDAHGNIVNYFRFDEIRIELARDLKKNADERAEMTTNINAARIAHEKIFKLLQAEFGVKNPTRNDIIRYKLYEELKNNGYKDLYTNTYISREILFSKQVDIEHIIPQSKMFDDSFSNKTIVFRKDNLDKGNRTAIDYIDSRFGKEKLADFEERIEFLFEQGKKNKEEGISKAKYQKLLKRENDIGDGFIERDLRDTQYIAKKARNMLYEICRIVTPTTGSVTGRLREDWNLVNIMQELNIDKFKKLGLTEMVEKKDGGFKERIVGWSKRNDHRHHAMDALTIAFTKHNHIQYLNYLNARKNENHKQHDNIIAIEEKETKVVIDDLGNKKRKFNLPIPNFREEAKKHLENVLISFKAKNKVVTKNKNKTKSAKGEKTKIELTPRGQLHKETVYGKYQFYVCKEEKIGPKFDEKIIQKVANPTYKRLLLERLVENDRDAKKAFTGKNALVKNPIYLDNTKMLVLPEMVKLTWLENDYSIRKDITPENFKDIKIIDKIVDEGVKQILKERLAKYNNNAKEAFSDLEKNPIWLNEEKGIAIKKVKISGVNNAEPLHYKKDHLGNEILDHHQKLVPTDFVSTGNNHHVAIYRDEKGNLQENVVSFYEAVARVNQGLPIIDKTLKAYLGWTFLFTMKQNEYFIFPNEQTNFNPSEIDLLDPKNNKLISSNLFRVQKFTIKDYFFRHHLETNVEDNSQLKNTTWKREGLGGISNIVKVRINHIGQIVKIGDY

SEQ ID NO: 6442 - protein, 1429 aa, synthetic construct
  REGION 1..1429: note = Synthetic
MKRILGLDLGTNSIGWALVNEAETDEEVSSIIRLGVRVNPLTVDETQNFEKGKSITTNAERTLKRSMRRNLQRYKLRRDALVEFLKELGFITDETILSEQGNRTTFETCRLRAKAAEEEISLEELSRVLLMINKKRGYKSSRKVKKEEDGVLIDGMEIAKKLYEEDLTPGQLCSQLLESGKKVLPDFYHSDLQEELDRIWSVQKQFHPDVFCDAAKEEIKGKNRSQTWAILANYFVWKEEVVGWNDREAKNETIEKECKLVGLKRTTKGYELKKENYRWRAQALTEQLGLEEIAVVLQEINGQINASSGYLGAISDRSKVLYFNHQTVGQYQMAELDKNPHASLRNMVFYRQDYLDEFDRIWEKQAEFHKELTAELKKEIRDMIIFYQRRLKSQKGLISFCEFERLEIVVEKDGKKQTKVIGCKVIPRSHPLFQEFKVWQTLNDIKVLGREKKRNALSASESRALYPEEKEILARELAIKENMKKADVLKLLFENPQELDLNFKQIDGNRTGFSLFSAYSKMIEKYGYEPLDFKKPADEIIGQLRTIFTDLGWNTNLFTIDLTKEGKELEMQPYFRLWHLLYSFEGDNTSTGNGKLIEKIMQLCGVEKEYAVELASLSFQDDYGSLSAKAIKRILPYLKEGNLYDVACEYAGYRHSKSSLTKEEIENKVLKGKLEVLPKNSLRNPVVEKILSQMVNVINTIIDTYGKPDEIRVELARELKKSAKEREELTKAIAKSTREHEEIRKLLQDEFGMMNVSRNDIIRYKLYEELKDTENLFFRYKTLYSNQYIPKEKIFSKEIDIEHIIPQSRLFDDSLSNKTLEYKAINIEKGNKTAYDFVKEKYGEEGLQQYINRCESLFNDKKAKLRKLKMEQKDIPDGFIDRDLRNTQYIAKKALAMLNEICRRVVATTGSITDQLREDWQLVDVMKELNLPKYEALGFVETYEDKDGRKIKRIKDWTKRNDHRHHAMDALTVAFTKDAFIQYFNNKNAAQDSGNRNHTNIIGIKTRYFDKGRALPPIPLEQFRIEAKQHLEKLLVSIKAKNKVVTVNVNRTKKRKGENTKIQQTPRGQLHLETVYGSHKQYVTKIEKVNASFDAAKIATVSKRAYRNALLKRLETFGNDPKKAFTGKNALEKNPLYADKYQTIRVPEKVQTVEFETIYTIRKPVDPALNVDKVVDVKVRAILERRLKEYGGDPKKAFVNFWENPIWLNKEKGISIKRVSIRGINNAQSIHVKKDKNGNPIWDENGKQIPVDFVNTGNNHHVAIYRKPVLDKKGQVTFDEDGNLMYELDEVVVPFFEAVTRANLGLPIIDKDYRKSEGWQFLFSMKQNEYFVFPNEKTGFNPKEVDLLNPDNYAMISPNLFRVQTMSKVMYGNNVVRDYKFRHHLETTVKDMKELKDIAYKQYKTLSFGNSVVKIRINHIGQIVSVGEY

SEQ ID NO: 6443 - protein, 1428 aa, synthetic construct
  REGION 1..1428: note = Synthetic
MTKHILGLDLGTNSIGWAYIKEAQDKTEQSSIEKIGVRVNPLTVDEQTNFEKGKPITTNAGRTLARSARRNLQRYKLRRENLIKLLKAHHWIDDETILAENGNHSTFQTYTLRSKAAASPITLQEFARVLLMINKKRGYKSSRKVNTTEEGQLVDGMDIAKKLYDENLTPGQYVYQVLKAGKKKLPDFYRSDLQNEFDKIWRFQQAFYPEILTETFKETLKNKNQKVTSQIFYTVYQFNTAENKGTRDEKKLQAYKWRNEALSKQLTKEEVAYVLAEINGQIYNSSGYLGAISDRSKELYFNKQTVGEYLYEQLQKNPHTRLKNQVFYRQDYLDEFEKIWETQALFHKELTKELKGEIRDVVIFYQRKLKSQKSMVSFCEFEQKEIIVGEKKKTTGLRVASKSSPLFQEFKIWQQLHNIRLRNKETREITNLSQEAKEVLFEELNLKGKFTTVKVLKLIENGKKYEVNYNEIEGNNTNAMLYTKYLDILDMEGYDIKSELKLKLNKEDIALTDLDVPASEIKEMVTRIFEELKIDTGILNFNPELEGKEFEHQKAYQLWHLLYSYEEDNSVSGMELLYKQLQEKFGFKTEHAKILGSVVFTDDYGSLSTKAMRKILIHLKEGFAYGGYKEKPEMPSACEMAGYNHSKNSLTKEELANRELKPRLDVLPKNSLRNPVVEKILNQMVNVVNTLIDTENDKLEKAGKERNFRFDEIRVELARELKKNAKEREDLTKEINAAKSKHEVIVKILQKEDGIKNPTRNDVIRYKLYQELKNNGFKNLYTNEYIERKDIFTKKYDIDHIIPQSRLFDDSFSNKTLCPRDVNLDKGNKTAYDYILDKFGQTKAEEFESRVKGLETLGKAEGITKAKYQKLLKQGKDIGDGFIERDLRDSQYIAKKAKTMLFDITRTVTTTSGSVTDRLREDWGLVNVMKELNLLKYRAAGLTEEIETKEGTKKEMITDWTKRNDHRHHAMDALTVAFTKKSFIQYLNNLNARRAEESDGISNTNNRKSIDTNDLRISTKDVLGIEAKETSKVKDELGNWKRVFNEPIPNFRHIAKEHLEQILVSHKAKNKVATKNKNKIAGQKVLQEVLTPRGQLHKETVYGKIRQYASKEEKVSARFDEATIAMVSNPKFRTLLLKRLEENGNDPKKAFTGKNALTKNPIYLDDIKQETLPEKVKLIWLEDNYTIRKEITPELKLDKVIDEGVKRILRKRLEDFNGDAKKAFSDLDLNPIWLNKEKGIAIKRVTISGVSNIEALHIKRNHLGEEIVDENGHSIPVDFVSTGNNHHVAIYEDEKGNLQEKVVSFYEAVARVNQGLPIVDKSLNKHLGWVFKFTLKQNEMFLFPSEDFNPNEIDLFDRKNYKLMSRNLFRVQKIATKDYFFRHHLETTVEDNSKLKEIIWKRLGVSGMKGILKVRTNHLGEIIHVGEQ

SEQ ID NO: 6444 - protein, 1428 aa, synthetic construct
  REGION 1..1428: note = Synthetic
VNCFIFCIANILFFYHPSKLLLRLFTTFVNIQSITAIEMKNIFGLDLGTTSIGWAVVNEAENANEQSALIALGERVNPLSTDERTNFEKGKSITTNSDRNLKHGARLNLFRYKMRRNNLISLLRDNGIIDDSSILAENGEHTTFETHKLRAKAATERIELTEFARVLLSINKKRGYKSSRKADSAEEGKAIDGMSIAKELYENDLTPGQYVYARLLQNKKYVPDFYRSDLNAEFNRIYARQSTYYPDVLTPELAEQLNGRNEKATWAIIAGAFNIKGAKRATKGFDKKVEDYKWRVDALVDKLDPEQIAGVLSKINRDISGSSGYLGAIGDRSKSLYFSGLTVGQYQYECLVKNPHHSLKNEVFYRQDYLDEFERIWTVQASHHDKLNDKLKSEVRDIVIFYQRRLRSQKGNVAICELVQYSVDVTVDGKTKRKIVGPKVCPKSSPVFQEAKILQILNNVKVTNRNDDTERPLSGDEKSALLRELNWCDKMSATEALKLISLNPRIYSINYKQLEGNTTNASLLKSFMSVVDVTGHDSEAIEDLPASKKAEIVEGIFKSQGFNTDIFHFDSSVECQAIEHQPAYMLWHLIYSYEGDDSISGNEALIKKLCEKFNFDSESAAIIAGVVFKSDYGNLSTRALRKILPYLKQGMVYSDACDKVDYRHSKRSLTREEIDNRDYKSRLDLLPRNSLRNPVVEKILNQMINVVNSLIETYGRPDEIRIELARELKKSAKERADLISSINKATADNEKIRQLLINEFGIQRPGRNDIIRYRLYDELSAVGYQTLYSDTYIPREELFSKRFDIEHIIPQSRLFDDSFANKTIEARDINIEKGNATALDFVEAKYGSEYVKEYRNRVDILLKEGKIGRGKYNKLLTKENDIPEDFINRDLRNTQYISRKALEILSEVAPKVTATSGSITERLREDWQLIDVLQELNWDKYDRQGLTETFVNRDGNTVRRIKDWTKRNDHRHHAVDAVAIAFTRAEYVHYLNNLNAQSDKGKEFYAIRERYLERDKHNNLRFRSPIPVKEFRAVVKDQLEKSFVSHKSKNKVVTKNVNATKCSGGVNRKVQLTPRGQLHNETVYGRIMQPVVREEKIGVAFDYDKIATVASAVERKALTRRLDMFNGDPKKAFTGKNSPAKNPVYIDDERKVELGTKVKTVTMECVYTIRKEISESLKLDKVIDKGVKRILQQRLDEYGGDPKKAFTNLDANPIYLNKEKGITIKRVTITGPTEVEPLHSKRDHLGNEMRDADGRTIPTDFINTGNNHHIAIYRDASGNLQERVMSFFEATARACALPPLPVIDKDYRKCDGWEFLFTMKRNEYFVFPRYESVVDSSTGQEKLIKTFDPKAVDLLDRDNYAKISPNLFRVQKLTNRDYYFRHHLETNVEEVKELRDITWKRINTIKLMDDAVKVRIDNLGWIVAVGES

SEQ ID NO: 6445 - protein, 1428 aa, synthetic construct
  REGION 1..1428: note = Synthetic
MKKILGLDLGTTSIGFAQVNESEDFQSSTIERIGVRVNPLTTDEQTNFEKGKPITVNADRTLKRGARRTLDRYQLRRSNLIDALAKANVITKDTVLAEDGKNTTHSTFALRAKSATEKVEKNEFARILLAINKKRGYKSSRKANNEDEGQAIDGMATAKRLYDENLTPGQLAYQLLKNGKKHLPDFYRSDLQAEFEKVWDFQKQFYPEILTEGFKKELNGKGQRVTSSLFWLKHQFNTAENKEKTREAKKLKAYEWRADAINKQLEKEEVGYVITEINSNLNNSSGYLGAISDRSKELYFNKQTVGEYLYSQILKNSHTRLKNQVFYRQDYLDEFEKIWETQAKFHTELTEELKKEIRDIIIFYQRKLKSQKGLVSFCEFESREIEIDRNSQKVKKTIGLKSAPKSSPLFQEFKIWQVLSNVLIRKKGSKKRIVNQTDREEELFLLDLETKQILFNELNIKGNLTSKKIIELLGYDVKDWEINYSALEGNRTNKVLYNSYLKILDLEGYDTKDLLKVKSNKDEVELDDIEISAIEIKDMVKSIFETLEIRTEILDFDAELDGKAFEQQLSYQLWHLLLSYEGDNSASGNEKLYELLNQKFGFKKEHSQILANIALQDDYGSLSAKAMRKIYPHIKELHFDKACDLAGYKHSASSLTKEEIANRPLKDKLDLLKKNSLRNPVVEKILNQVVNVVNTLIESNSKKDADGNIIEYFKFDEVRIELARDLKKNAKERAELTTNINASKIVHEKIFKFLQTEFGIKNPTRNDIIRYKLYEELKNNGYKDLYTNTYIAREILFSKQVDIEHIIPQSKVFDDSFSNKTIVFRKDNLDKGNKTAYDYIDSKFGKEKLTDFEQRIEFLFELGKKNKEEGISKAKYQKLLKKEADIGDGFIERDLRDTQYIAKKARNMLYEIFRVVTPTTGSITDRLREDWGLINIMQELNFDKFKQLGLTEMVEKKDGSFKERIVDWSKRNDHRHHAMDALTIAFTKHSHIQYLNFLNARKNESHKEHNAIIGIEEKETIIVIDDLGNKKRRFKLPLPNFREEAKKQLENVLVSHKAKNKVVTKNKNKTKSAKGEKTKIELTPRGQLHKETVYGKYQFYVGKEEKVSAKFDEQTIKKVANPQYKKLLFQRLADNGNDVKKAFTGKNVLSKNPIYLDEAKTETLPEAVKLIWLEDDFSIRKDINPENFKDIKVIDKILDEGVKRILKERLAKHNNNPKEAFSDLGKNPIWLNEEKGISIKKVKISGINNAEPLHYKKDHLGIKILDENDKPIPVDFVSTGNNHHVAIYKDEKGNLQERVVSLFEAIERVNQGLPIIDKSYNSYLGWGFLFTMKQNEYFVFPNEKTGFNPKEIDLLDPKNNKIISPNLFRTQKIATKNYMFRHHLETTVEEKKQLFGVTYKPIWTTNPLKDIVKVRINHIGQVVKIGEY

SEQ ID NO: 6446 - protein, 1428 aa, synthetic construct
  REGION 1..1428: note = Synthetic
MTKKILGLDLGTTSIGWAYVIESDNPDESEIKQIGVRVNPLTTDEQTNFEKGKPFSINKERTLKRGARRNLDRYKDRRNNLIEVLKKANILSQDSILTEEGQHTTHQTWQLRAKAAVDKIEKEELARVLLAINKKRGYKSSRKAKNEDEGQAIDGMAVAKRLYDEQITCGQLVYQLLREGKKSIPDFYRSDLQAEFDKVWNFQKQFYPKILTDEFYKELKGKGQRATSALFYKTYNFNTAENKGSREEKKIQAYKWRSEAISQQLEKEEVAFVLTEINNNLNNSSGYLGAISDRSKELYFNKQTVGQYLYQQLQENRHARLKNQVFYRQDYLDEFEAIWKEQAKHHTELTEELKAEIRDIIIFYQRKLKSQKGLISFCEFESREIQIDGKKKTIGLRVAPKSSPLFQEFKIWQNLNNVLVRKKGSRKRNVKQEIQGSLFEEEKEIFVFDLETKEKLFEELNLKGNLSANKVIELLGHKPTEWEINYSALEGNRTNQALYNAYLKILDIEGYDEDLLKLSDKDDINVADLKTPASEIKNMVRDIFQVLGISTDILEFDAELDGKDFEQQASYQLWHLLYSYEGDDSQSGNEKLYELLEKKFGFKKEHSQVLANVTLSDDYGNLSSKAMRKIYPFIKENNYSTACELAGYRHSKHSLTKEEIENRPLDDKLELLKKNSLRQPVVEKILNQMVNVVNSLLEKNRKENPDFRFDEIRIELARELKKNAKERAEMTTNINSAKTENEKIFKLLQAEFGLKNPTRNDIIRYRLYEELKNNGYKDLYTNKYIPREILFSKQVDIEHIIPQSRLFDDSFSNKTIVYRETNLDKGNQTAFDYIDSKYGNEKVEEYILRIEALHDAWKKNKEEGISKAKYQKLLKKETEIGDGFIERDLRESQYIAKKAKEMLFKITRSVVSTSGSITDKLREDWGLINIMKELNLPKYRSLGLTEMQERKFGQKVEVINDWTKRNDHRHHAMDALTVAFTKHNHIQYLNYLNARKNENHKLHNNIIAIENLETETMIDNNGSKRRVFKAPMPNFRQVAKEHLENVLISHKAKNKVVTKNKNKIAGKVAAQETLTPRGQLHKETVYGKYQYYVNKEEKIGTKFDEETINKVSNPQYRKLLLERLSANGNDPKKAFSGKNALSKNPIYLNETKTETVPEVVKLTWLEEDYSIRKDITPDNFKDEKSIDKILDEGVKRILKKRLRKNDNDPKKAFSDLDKNPIWLNEEKGISIKRVTISGVNNAEPLHYKKDHFGNDILDEKGDKIPVDFVSTGNNHHVAVYRDEKGNLQENIVSFFEAVIRVNQGLPIIDKAYNQHLGWQFLFTMKQNEMFVFPNEKSGFNPQEIDLLDPSNKKKISPNLFRVQKMSKVIYGNSPVREYVFRHHLETNVDEKKELKDITFKNIKSLGYFEDIVKVRINHLGDIVSVGEY

SEQ ID NO: 6447 - protein, 1428 aa, synthetic construct
  REGION 1..1428: note = Synthetic
MVKNILGLDLGVTSIGFAHILEGKNPEQSSIKKIGVRVNPLTTDEQTNFEKGKPVSVNADRTLKRGARRNLDRYQDRRKNLIDALLKANIITNETILAENGKDTTHSTYLIRAKSAVEKIEKEELARVFLAINKKRGYKSSRKAKNEDEGQIIDGMEIAKKLYEENLTPGQLAYRLLKEEKKYLPDFYRSDLQSEFDRIWNFQKQFYPEILTDEFYKELKGKGQRATSAMFWTKYGFNTADNKAKTREEKKLQAYLWRSEALNKQLGKEEVAFVVTEINNNLNNSSGYLGEISDRSKELYFNNQTVGQYLYEKLKTNPHTRLKNQVFYRQDYLDEFERIWEIQAKFHPELTEKWKTEIRDIIIFYQRKLKSQKGLVSFCEFESQKKIINGHKKTIGLKVAPKSSPLFQEFKIWQVLNNVLVRKKGSRKRVAKADAPTLFDEEKEIFIFDLETKQKLFDELNSKGNLKSAKILELLGYKSTDWEMNYSELEGNRTNKILFDAYLRILELEGYDEDLLKLQGKDDIDISELKASVWEIKDMVKRVFEILNINTEILEFDAELDGKDFEKQASYQLWHLLYSYQEDNSKTGNDTLFRLLEEKFGFKKEHSQILANVAFSDDYGNLSTKAMRKIYPHIKELTYDKACLQAGYKHSALSLTKEEIANRPLKNQLELLKKNSLRNPVVEKILNQLVNVINTIIETNSKKDEEGNITEYFKFDEIRVELSRDLKKNAKERAELTTNINASKIAHEKIFKLLQNEFHIKNPTRNDIIRYRLYEELKNNGYKDLYSNTYISREILFSKQIDIDHLIPQSKMFDDSFSNKTVVFRKDNLDKGNRTAFDYISEKFGENGIEDFKSRIEMLFEQGKKNKEEGISKAKYQKLLKQEAEIGDGFIDRDLRDSQYIAKKARNLLYEICRVVTPTTGSVTARLREDWDLVNIMQELNFEKFKALGLIEKVEKKDGSFKERIVDWSKRNDHRHHAMDALTVAFTKHNHIHYLNFLNARKSENHKEHNAIIGIEDKETTWKYDDEGNKKRVFNLPIPNFRKQAKEHLENVLVSHKAKNKVVTRNKNKIKSKNGERTKVEFTPRGQLHKETVYGKYQYYVNKEEKISAKFDEVTINKVANPTYKKLLLQRLSENENDPKKAFSGKNVMSKNPIYLNEEKTELFPETVKLTWLEEDYSIRKEITPENFKDIKIIEKILDEGIKRILFNRLKEFGNDPKKAFSDLDKNPIWLNEAKGISVKRVTISGVKNAEFLHYKKDHLGNEILDDNGKKIPVDFVSTGNNHHVAIYRDEKGNLQERVVSLFDAVQLVNAGESVIDKNYNHGLGWQFLFTMKQNEYFIFPNEKTGFNPNELDLLDPKNKNVISPNLFRVQKLATKNYMFRHHLETAVEEMQQLKDVAYISIRSTNPLGNIVKVRLNNLGDIVKIGEY

SEQ ID NO: 6448 - protein, 1427 aa, synthetic construct
  REGION 1..1427: note = Synthetic
MKKILGLDLGTSSIGWALVNEAETSEEKSSIIKLGVRVNPLTVDELQNFEKGKSITTNADRTAGRSMRRNLQRYKLRRENLIEVLKEYNFITDEMILSENGNRTTFETYRLRAKAAVEEISLEQFARVLLMINKKRGYKSSRKAKGAENGTLIDGMEVAKKMYDEGITPGELCLQLLTAGKRYFPDFYRSDLQAEFDRIWNFQKQFYPDSLIDKVKDEVRGKNKSQTWAILAKYFVWKEVENSWNEEEAQTRRVEKEYRLVGIKRGVKREELKLENFQWRVKALSERMNPEELAIVLQEINEQISNSSGYLGAISDRSKELYFNRQTVGQYQMAVLDNNPNIGLRNMVFYRQDYLDEFNTIWEKQAEFHKELTEDLKKEIRDIVIFYQRRLKSQKGLINICEFERRQIEVEIDGKKKIKTIGSRVIPRSSPLFQEFKIWQTLNDIEVSVLGVKNKRKKQDDNSTTLLDSAENIDSLKLNVSRPLDADEKSLLAKELFIRDKLTKSDVLKLLFNNPQNLNLNFKNIDGNRTGSALYQAFSKILEISGHESINFKKSADEIVEQVKTIFSALGWNTEVLCFDSEKELDKQPYFKLWHLLYSFEGDSTPTGDGNLIQKIADLCGFEKDYASILANITFQEDYGSLSTKAIRKILPHLKDGNQYDVACEYAGYKHSKSSLKKEEIKNKVLKDKLELLPKNSLRNPVVEKILNQMVNVINAIITTYGKPDEIRIELARELKKNAKEREELTKSIVDTTKTHEGIRAILQNDFGMSHVSRNAIIRYKLYEELKDNGYKTLYSNTYIPKEKLFSKDFDIEHIIPQARLFDDSFSNKTLEVKSINIEKGSKTAYDFVEEKYGEQGLQEYLNRCEVLFRDKKTKLRKLKMQESEIPEGFIDRDLRNTQYIAKKALSMLNEICRRVVATTGAITDELREDWQLVDVMKELNWEKYKVLGLVEYFEDNDGRLIGRIKDWTKRNDHRHHAMDALTVAFTKDVFIQYFNNKNASLKPDTNEAAIRNKYFQNGKAIPPMSLDEFRAEAKKHLNDTLISIKTKNKVVTINLNRTKKKNGINKKQQQTPRGQLHLETVYGSHKQYVVKEEKVNASFDAAKIATVNKPAYRDALLRRLQENGNDSKKAFTGKNSLDKQPVWLDAKQNECVPEKVKTVMLETVYTVRKPIDEKLNVDKVVDARIRKLLQDRIKEYGNAKSAFANLDENPIWLNKEKGITIKRVSVSGISKAQSLHEKKDKDGNFILDKDSRRIPVDFVNTGNNHHVAIYRKPVLDKKGQAVFDENGELKFELEEVVVSFFDAVTRVNLSQPIIDKDYKRSEGWKFLFSMKQNEYFVFPNEKTGFDPKEIDLLNPENYALISPNLFRVQKIASKDYVFRHHLETVVADRKELQEITWKRISSLSILNRIIKVRVNHIGQIVMIGEY

SEQ ID NO: 6449 - protein, 1427 aa, synthetic construct
  REGION 1..1427: note = Synthetic
MAKNILGLDLGTNSIGWAFVKEATNSNEESSIEKIGVRVNPLTTDEQTNFEKGKPITTNAGRTLARSARRNLHRFKLRRENLLQILKTHKWIDNETILAENGNKTTFETFRLRALAAEKQLELHELVRVLFQINKKRGYKSSRKVNNAEEGSLIDGMEIAKKLCHENLTPGQYVLDLLKTGKKKVPDFYRSDLQTEFDRIWNFQKQFYNELFTDNLKEELKGKGKVATWTILKVPFNLVGLKRNLKRDELKLENYQWRNDTLSNQLNLEQIAIVLQEINGQLANSSGYLGAISDRSKELYFNNQTVGQYQYAQLQNNPHARLKNQVFYRQDYMDEFEKIWEIQAKNRENIFTNTLKEEIRDVVIFYQRKLKSQKGLISFCEFEQREIIKDEKKKTVGLRVIPKSVPLFQEFKIWQILHNIKLKNKITNEVVLLNENDKSFLFEELDLKGNLTASEVLKLLVDKPKDWEINYASLEGNRTNQALYNAYLTILDNEGYDVREELKLKLNKDDITLADIDKSASGIKEMVRAIFNHLGIKPEILDFNAELEGKAFEEQLSFQLWHLLYAYEEDNSPTGMDTLYRLLEQKFGFNKEQAKVMGTVAFQDDYGSLSSKAIRKIYPFIKENEYSVACDLAGYRHSKNSLTKEELENRELKSRLDILPKNSLRNPVVEKILNQMVNLVNTIIDIENDKLEKAGMKRNFQFDEIRIELARELKKNAKEREEMTKAMNAGKIKHEKIINILQVEDGIKFPTRNDIIRYKLYQELKNNGYKDLYTNQYIERKDIFTKKYDIEHIIPQSRLFDDSFSNKTLVPRQINLDKGNKTAYDYIFDVFGQDKLNEFLIRSKALFDLNDEGISKAKYKKLTMKGSEIGEGFIQRDLRDSQYIAKKAKEILFQITKSVLSTSGSVTDRLRDDWDLVNVMKELNLEKYRLAGLTEMQITKDGNPKEAIKDWTKRNDHRHHAMDALTVAFTKFSFIQYLNNLNARRNDKYDSISNAKDKKAIDTNSLRISSKDALGIEEKETHKINNGKGNYKRVFNEPIPNFRQLAKEHLEAVLVSHKAKNKVVTRNINKTKGSDKIQIALTPRGQMHDQTVYGWNRWSRVDLSKKLSKIEIEAIIDLKKRQFIKDFISEKGSISKAFTDENLAKLIFNNKSLKEIEISIPCYTQKIDLNKVLTDTQKTISAKKKVIKNILDLKVREKITERLVDYNGDFKKAFSDLDQNPIWLNEEKGIAIKRVTISGVKNAEALHTKKDHLGNDIFDEDGNKIPVDFVSTGNNHHVAIYEDEKGNLQDRVISFYEAVARINQGLPIVDKAYNHHLGWTFKFTMKQNEMFVFSSEDFNPNEIDLFDRKNQTLISKHLFRVQKFSKVEYGNSAVRDYVFRHHLESVISDVKELRDKTYKVFKSLGEFKGLIKVRTNHLGEIIHIGEY

SEQ ID NO: 6450 - protein, 1427 aa, synthetic construct
  REGION 1..1427: note = Synthetic
MSNNILGLDLGTTSIGFAHIIEGDTPEQSSIKKIGVRVNPLTTDEQTNFEKGKPVSVNADRTLKRGARRNLDRYQDRRKNLIDTLLKANIITNETILAENGKNTTHSTYFFRAKSAVEKIEKDELARVFLAINKKRGYKSSRKAKNEDEGQIIDGMAVAKRLYEENLTPGQLAYQLLKEGKKYLPDFYRSDLQAEFDKVWDFQKQFYPEILTDEFYKELKGKGQRATSAMFWSKYGFNTAENKAKSREEKKLQAYAWRSEATSKQLEIEEVAYVITEINNNLNNSSGYLGAISDRSKELYFKNQTVGQYLYEQIKANPHSRLKNQVFYRQDYLDEFEKIWETQAEFHLELTEKLKTEIRDIVIFYQRKLKSQKGLVSFCEFESKEIEIDKSGQKTKRTIGLKVAPKSSPLFQEFKIWQVLNNVLVRKKGSRKRTVKKEIEPTLFDEEKEIFVFDLETKQKLFDELNIKGNLKSAKIIELLGYKSSDWEMNYSELEGNRTNKVLYDAYLKILELEGYDEDLLKLQGKDDIDVSELKASAFEIKEMVKRIFEVLNINIEILEFDAELDGKDFEKQASYQLWHLLYSYQEDDSKSGNDTLFRLLEEKFGFKKEHSQILANVAFSDDYGNLSAKAMRKIYPFIKELHYDKACLQAGYKHSASSLTKEEIATRPLKNQLELLKKNSLRNPVVEKILNQLVNVVNTIIETNSKKDEHGNITEYFKFDEIRIELARELKKNAKERAEMTTNINASKIENEKIRNTIIKDFPHIKNPSKNDIVRYKLYQELAFNAFKDLYTDEKIDYEKLYSKNYDIDHIIAQSKVFDDSFSNKVLVSRQANLDKGNRTANDYMANKSPESYEKYKSIVETLFKEKKITKAKYQKLLKQESEIGDGFIDRDLRDSQYIAKKARNLLYEICRVVTPTTGSVTDKLRQDWDLINIMQELNFEKFKTLGLTEMVQKKDGSFKERIVDWSKRNDHRHHAMDALTVAFTKQSHIQFLNFLNARKDENHKLHNAIVGIENKETTWIYDEDGNKKRVFKSPILNFREQAKEHLENVLVSHKAKNKVVTKNKNKTKTKNGEKTKVELTPRGQLHKETVYGKYQYYVNKEEKISAKFNEETIQKVSNPIYKKLLLKRLSENGNDPKKAFAGKNVLSKNPIYLNEEKAETLPEIVKLTWLEEDYSIRKDITPENFKDLKTIEKVLDEGVKRILKNRLEKFENNPKKAFSDLDKNPIWLNEAKGISIKRVTISGVKNAEFLHYKKDHLGNEILDKDGKKIPVDFVSTGNNHHVAIYRDEKGNLQEKVVSLFDAVQLVNAGESIIDKNYNQGLGWQFLFTMKQNEYFVFPNEKTGFNPKEIDLLDPKNKKKISPNLFRVQKLATKNYMFRHHLETTVDDKKELKNIAFIHIQSCNLLKDIIKVRLNHLGDIVKIGEY

SEQ ID NO: 6451 - protein, 1426 aa, synthetic construct
  REGION 1..1426: note = Synthetic
MPAKNILGLDLGTTSIGFAKVVEDDHYQNSAVELIGVRVNPLTTDEQTNFEKGKPVSVNADRTLKRGMRRNLDRYQLRRNHLIKVLQEHHIIAADTKLAEDGKNTTHATYASRALAATAEIPLDIFARVLLTINKKRGYKSSRKAKNEEEGQLIDGMAVARRLYEECLTPGQLSYQLLKEGKKYLPDFYRSDLNAELDKVWNFQRQFYPDILTEEFKKHLEGKGQRATSAAFWGQYGFNTAENKGGREEKKLKAYQWRSEAVQKQLVKEEVAYMITEINNDLNKSSGYLGAISDRSKELFFNKQTVGQYLYGQLKENPHTRLKGQVFYRQDYLDEFETIWETQARFHPELTPELKEKIRDVIIFYQRKLKSQKGLISFCEFESKETEVEKNGRKIKQRIGLRVAPKSSPLFQEFKIWQVLNNLEFRNKNTKEVFVPDITAKQQLFDELNIKGNLLASEAIKMLGYKTKDWEANYHTLEGNRTNKSLYDAYLKILELEGYDENLLKLSSSDDIDVSKIEKPALEIKQMVHAVFEVLGIDSTVLDFDAEADGKAFEQQPAYQLWHLLYSAEDDNKKHVQEDIFTYGRDNIGLKKKLCEKLGFKPEHTKILVNVAFSDDYGGLSSKAIRRIYPFIKELTYDKACAEAGYRHSASALTKEEIATRPLQKRLNLLKKNELRSPVVEKILNQMINVVNTLIDDENTKRKAQGVSEDFHFDEIRIELARELKKNARERAEMTTNINAAKQLHEKIIKILQTKFGVPNPSRNDIIRYKLYEELKNNGYKDLYTNTYISPDILFSKQIDVDHIIPQMSLFDDSFSNKTVVFRKDNQDKGNKTAYDYLLGKYGERALEEYISRISSLFELGKKNKEEGISKAKFQKLQKRLIDIGDGFIERDLRESQYIAKKAKHMLYAICRSVVSTSGEITARLREDWDLVNVMQEINLSKFRTLGLTEMIEKKDGGQKERITDWTKRNDHRHHAMDALTIAFTRHSHIQYLNHLNARKDEVDKWHPVVSKIEEKETDLVYDDLGNRKRKFKAPMLNFREVVKEHLENVLISHKAKNKVFTKNKNKIKTARGEKIKTELTPRGQLHKETVYGRYRYYESKEEKIGTKFNEGIIRMVVNPQYRKLLLERLVANENDPQKAFGGKNALSKNPIYIDEVQGGFLPEKVLLQWQEYDYSIRKDITPENLKDVKAIEKVLDEGVKKILLKRLADFGDDPKKAFSDLDKKPIWQNEAKGIAIRRVTISGVKNAAPLHHKQDHLGKDILDENGKQIPSSFVSTGNNHHVAIYRDVEGNLQERVVSLFDAVQLVNAGEAVIDKEYNKGIGWQFLFTMKQNEMFVFPDEKTGFNPKEIDLLDLKNRKRISPNLFRVQKLATKNYMFRHHFETTVEENKKLFGYTYKHFRSTGSLEDIVKVRINHIGEIVSVGEY

SEQ ID NO: 6452 - protein, 1426 aa, synthetic construct
  REGION 1..1426: note = Synthetic
MPRKNILGLDLGTTSIGFAKIIEDDDYQCSSVELIGVRVNPLTTDEQTNFEKGKPVSVNADRTLKRGMRRNLDRYQLRRDYLIEILRTHHIITADTKLAEDGKNTTHTTYALRALAATAEIPLEAFVRVLLAINKKRGYKSSRKAKNEDEGQLIDGMAIARRLYEESLTPGQFSYQLLKEGKKYLPDFYRSDLNTELNKVWNFQKQFYPEILTDEFKRHLEGKGQRATAVAFWGQHGFSMAENKGSREEKKLHAYKWRSEAAHKQLTKEEVAFVITEINNDLNKSSGYLGAISDRSKELFFNKQTVGQYLHQQLKENPHTRLKGQVFYRQDYLDEFETIWEMQAKFYSALTLELKEEVRDVVIFYQRKLKSQMGLISLCEFESKEIEIEKNGEKAKKRIGLRVAPKSSPLFQEFKIWQVLNNLEFRNKKTKEVFVPEMAAKQQLFDELNIKGNLLASEAIKILGYKTKDWEANYHTLEGNRTNKSLYDAWLKILELEGYDENLLKLSGSDDIDVSKIEKPALEIRQMVLAVFEVLGISGAILDFDAEADGKAFEQQPAYQLWHLLYSAEDDGKKYSQEDIFTYGHDNIGLKKKLCEKFGFRPEHTKILVNVVFSDDYGNLSSKAMRRIYPFIKELTYDKACAEAGYRHSAASLTKEEIAARPLQNRLDLLKKNELRSPVVEKILNQMVNVVNTLVDDENQNRKARGLSEDFHFDEIRIELARELKKNAKERAEMTTNINTAKQSHEKIIRILQTEFGVPNPSRNDIVRYKLYEELKNNGYKDLYTNTYISRDILFSKQIDVDHIIPQMSLFDDSFSNKTVVFRKDNQDKGNKTAYDYILGKYGEQALEEYISRITSLFELGKKNKEEGIGKAKFQKLQKRLVDIGDGFIERDLRESQYIAKKANNMLYAICRSVVSTSGEITARLREDWDLVNVMQEINLPKFRALGLTEMVEKKDGAQKERITDWTKRNDHRHHAMDALAIAFTRHSHIQYLNHLNARKDEANKWHPVVSKIEEKETVLIYDDLGNRKRKFKAPMPNFREVVKEHLENVLISHKAKNKVVTKNKNKIKTVRGEKVKTELTPRGQLHKETIYGRYRYYESKEEKIGPKFDAEMIGMVTNPQYKKLLLERLAANGNDPKKAFWGKNALNKNPLYVDEARQELLPEKILLRWLNDDYSIRKDVTPENLKDIKTIEKILDKGVKKILLKRLADFGNDPKKAFSDLDKNPIWQNEAKRIAIKRVTISGIKNAAPLHHKKDHLGNDILDEKGKQIPSSFVSTGNNHHVAIYRDAEGNLQERVVSLFDAVQLVNGGEPVIDKEYNKGIGWQFLFTMKQNEMFVFPDEKTGFNPREVDLLSSGNRKLISPNLFRVQKLASKNYFFRHHLETSVEEKKELKNIAYKPQLGLNALSNIVKVRINHIGEIVSVGEY

SEQ ID NO: 6453 - protein, 1425 aa, synthetic construct
  REGION 1..1425: note = Synthetic
MPQKHILGLDLGTTSIGFAHIIEGDTPEKSEIIQIGVRVNPLTTDEQTNFEKGKPVSVNADRTLKRGARRTLDRYQLRRENLIDTLLKANIISKDSILAEDGKQTTFETWQLRAKSVTEKIEKEELARVFLAINKKRGYKSSRKAKNEDEGQAVDGMVVAKRLYDENLTPGQLAYQLLKEGKKTVPDFYRSDLQAEFDKVWSMQKQYYPEIFTNEFYKELQGKGQKATSASFWGKYKFNTAENKAKTREEKKLQAYKWRSEAIVKQLNKEEVAYVLTEINNNLKNSSGYLGEISDRSKELYFNKATVGQYLYKQLQHNPHTRLKNQVFYRQDYLDEFETIWNEQKKHHSELTDELKTEIRDITIFYQRKLKSQKGLVSFCEFENKEAIINGHKKTIGLKVAPKSSPLFQEFKIWQVLNNVLVRKKGSRKRVAKNINSITVLDEGKEIFAFDLDAKNLLFNELNLKGNLKSDKVIQLLGYPASDWELNYTELEGNRTNRELYNAYLKILDIEGYDVKDLLKVKSNKDDVELDDLEVPASEIKKMVQQIFNALGINTQVLEFNAELDGKAFETQLSYQLWHLLYSYEGDDSPSGNEKLYDLLEKKFGFKKEHAQVLANISFSDDYGNLSSKAIRKVFPYIKENVYSTACELGGYRHSASSLTKEEIASRPLKNQLDLLKKNSLRNPVVEKILNQMVNVINALIAKNRNINPDFRFEEIRIELSRELKKNAKERAEMTTNINASKIIHDKIFKLLQTEFGVKNPTRNDIIRYKLYEELKNNGYKDLYTNTYIPRDILFSKQIDIDHIIPQAKLFDDSFSNKTVVFRKDNLDKGNKTAFDYIDSKYGAEKVEEFKNRIELLYKSGQKNKEDGISKAKYLKLLKQENEIGDGFIERDLRDSQYIAKKAKNMLYDITRSVVSTSGSITDRLREDWGLVNIMQELNFEKFKSLGMTEMVEKKDGSFKERIVDWSKRNDHRHHAMDALTVAFTKHSHIQYLNFLNARKNETHKLHGNITGIETKETELKIDDDGNKKRVFKLPISNFRQVAKEHLENVLVSHKAKNKVVTKNKNKTKSKSGEKTNTELTPRGQLHKETVYGKYQYYVNKEEKVSGKFDTDTIAKVSNPLFKTLLFQRLQENGNEPKKAFTGKNALSKNPIYLNETKTEVLPELVKLTWLEEDYSVRKDVTPENFKDEKAIEKILDKKVKEILLARLKQYGDPKKAFSDLDKNPIWLNEAKGIAVKRVTISGVKNAESLHYKKDHIGNFILDKRGKQIPVDFVSTGNNHHVAIYRDAQGNLQERVVSLFDAVQLVNVGEPVIDKAFNQGLGWQFLFTMKQNEYFIFPNEKSGFNPNEIDLFDPRNKKIVSPNLFRVQKIASKNYFFRHHLETTVEEKKELNGIAFRPQLGLNAIANIVKVRINHLGDIVWRGEY

SEQ ID NO: 6454 - protein, 1425 aa, synthetic construct
  REGION 1..1425: note = Synthetic
MARKILGLDLGTASIGWALVNEAENENERSSIIKIGSRIIHYGDNLVKVDKTGKISASLTPEEDFFSGKGLSPNAGRTKQRSARRNLQRYKLRRENLIEILKEHSIIPNDFIFSEEGNGTTFKTYKNRALAAVEAIPLEEFVRVLLMINKKRGYKSSRKAKGEEDGQLIDGMTVAKLLYDNKQTPGQFVFDLLNNGKKYIPDFYRSDLQAEFDNVWNYQKNFHPVLTDFAYEKLRGQKKNATKDYFAKILKIETPELKGKWNEKRLQRYEFRSKAINQQISIGEIAEALIEINGDLNNSSGYLGAISDRSKELFFEKITVGQYLYRQLEKNPHTSLKKQIFYRLDYIDEFNCLWDTQAKFHKQLTSELKSEIRDVIIFYQRRLKSQKGLISFCEFESQQIEIIEDGKKKIKTRGSRVIPKSSPLFQEFKIWQILNNIEVTNTITKEVRELFPEEKEILSVELEIKTKISKGDAIKLLFGKEKNVDLNYKDIEGNRTNAAMYDAYQRIIELTGNGEHDFTKMKSSDTRAFVKEIFGNLGYNINILDFDAAIEGNAIEKQAHFQLWHLLYSFEGDDTKTGNEKLIEAIKIKFGFEKEYAQIIANVSFADDYGSLSAKAIRKILPHLKDGFSYGGRSSKPTEPSACEYAGYKKHSKSSLTIKEKETKGYKDKLDILPKNSLRNPIVEKILNQMVNVVNAAIDEYGKPDEIRIELARELKKGAEERKEMSENISKTTADHEKYRRILQTEFGLKHVSRNDLIRYKLYLELKRTGYKTLYSNTYVAPNELFTKKFDIEHILPKAKLYDDSFSNKVLELRSINIEKADRTAYDFIGDKYGPDELVNYEQRVQDLYFSKKATETAIQENNQTESKNNDPRISKTKRDKLLITESKIPNGFIDRDLRNTQYIAKKAKAMIEEVCKDVTTTTGSVTDRLREDWQLVDIMQELNWNKYNALGLTEEFTNRDGNIIKRIKDWTKRNDHRHHAMDALTVAFTKYSHVNYLNNLNARSDKNGNIYAIEQKELYRDKNNKLRFKPPIPIDDFRAEAKKQLENTLISFKASNKVVTKNKNKFKIKGGEKTKIELTPRGQLHMETVYGSIKQYRTEEVKINGSLDIETINKVARKNVREALLKRLSEFDNDPKKAFTGKNAIEKNPIFIDHQQSHKIADKVKIVWQETVYTIRKDIGPDLKIDKVIDPKIKIILQNRLKEYNSDPKLAFSNLAENPIWINKEQEFAIKRVTITGISNAISLRDKKDHNGNLILNVEGSSISSDYVNTGNNHHIAIYKDALENLHENVITFYEAVERVNQGLPIINKVFNQEIGWQFLFSMKRNECFVFANNKTGFNPEEINLLDSKEYHLINPNLFRVQSISSKYYIFNHHTETKAANGDTFKNKKSLSEITYRFIQNTQSLKSLIKVRINHLGKIIKIGE

SEQ ID NO: 6455 - protein, 1425 aa, synthetic construct
  REGION 1..1425: note = Synthetic
MNKKILGLDLGTTSIGFAKVIEDENHQNSSVELIGARVNPLTTDEQNNFEKGKPVSVNADRTLKRGMRRSLDRYQLRRNNLIEVLKVNKIINDDTKLAEDGKGTTHSTYALRSLAATDQIGLEAFARVLLAINKKRGYKSSRKAKNDDEGQVVDSMGAAKRLYEDNLTPGQLAFQLLKDGKKYLPDFYRSDLTAELDKVWNFQQQFYPEILTEEFKKHLEGKGQRATSAAFWGQYKFNTAEIKGTREEKKLKVYEWRSKAPNMQLAKEEVAYVITEINNDLNKSSGYLGAISDRSKELFFNKQTVGQYLFEQLQQNRHTRTKGQVFYRQDYLDEFEQIWETQAKFYPQLTAALKEEIRDIIIFYQRKLKSQKGLISFCEFESKEIETENNGQKIKKRIGLRVAPKSSPLFQEFKIWQVLNNLQFRNKETKELFFPDLDAKQQLFNELNIRGNISVSDAIKILGYKSKDWEANYNILEGNRTNKFLYDAYFKIVEQEGYDEDLLKLTGSDEIDVSKIDKPAAEIQKMVKDIFELLGIDTNILDFDAELDGKEFEKQASYQLWHLLYSAEDDNKKYSSEDIFTYGNDNISLKKKLCSKFGFKPEHAKILVNITFSDDYGNLSSKAMRKVYPFMKELTYDKACFEAGYRHSASSLTKEEIASRPLKPRLDLLKKNVLRSPVVEKILNQMINVVNALIDEENKKRKANGLLEDFHFDEIRIELARELKKNAKERAEMTSNINAAKLLHEKIIKILQAEFGVPNPTRNDIIRYKLYEELKNNGYKDLYTNTYIPREILFSKQIDVDHIIPQMTLFDDSFSNKTVIFRKDNQDKGNKTAYDYILEKYGDKAVEDYVNRLTSLFELGKKNKEEGISKAKFQKLQKRQTEIGDGFIERDLRESQYIAKKAKNMLLEICRSVVSTTGEITARLREDWGLVNVMQEINMPKFRALGLTEMIDKKDGGQKERITDWSKRNDHRHHAMDALTIAFTKHNHIQYLNHLNARKDEISKWHPVVNRIEEKETELVYDDLGNRKRKFKAPMPNFREVVKEHLENVLISHKAKNKVVTKNKNKTKSKTGEKVKTELTPRGQLHKETVYGKYHYYESKEVKIGTGFDQATTAMVANPIYKKLLLKRLSENNNDPKKAFGGKNALNKNPIYLDEAKKEVLPEKVKLVWLESDYSIRKDVTPENFKDAKTIEKILDAGIKRIMLKRLEDYGNDPKKAFSDLEKIPIWLNEAKGIAIKRVTISGVKNAEPLHYKKDHLGNFILDEQGKQMPVDFVSTGNNHHVAIYHDAEGNLQERVVSLFDAIRLVNAGEPVIDKTYNEGIGWQFLFTMKQNEMFVFPNEKTGFNPKEINLLDPKNRKAISPNLFRVQKLATKNYMFRHHLETNVDEKKELVNSAYINIRSTSPLNRIIKVRINHIGQIISIGEY

SEQ ID NO: 6456 - protein, 1425 aa, synthetic construct
  REGION 1..1425: note = Synthetic
MRRNILGLDLGTTSIGFAKVIEDEDYQNSAVELIGVRVNPLTTDEQTNFEKGRPVSVNADRTLKRGMRRNLDRYQLRRHHLIEVLKANHIITVDTKLAEDGKNTTHATYAVRALAATAEIPLEAFARVLLAINKKRGYKSSRKAKNEDEGQLIDGMAVAKRLYEENLTPGQLSYLLLKEGKKYLPDFYRSDLNAELDKVWSFQKQFYPEILTEEFKKHLEGKGQRATSAAFWGQYGFNTAENKGSREEKKLKAYQWRSEAVDQQLTKEEVAYVITEINNDLNKSSGYLGAISDRSKELFFNKQTVGQYLYQQLKQNPHTRLKGQVFYRQDYLDEFETIWETQAKFHPELTAALKEEIRDVIIFYQRKLKSQKGLISFCEFESKEIEVEKNGLKIKKRIGLRVAPKSSPLFQEFKIWQVLNNLEFRNKSSKEVFVPDMTAKQQLFDELNIKGNLLASEAIKILGYKTKDWEANYHTLEGNRTNKSLYDAYLKILELEGYDEDLLKLSGSDDIDVSKIEKSASEIKQMVHAVFEVLGINSTILDFDAEADGKAFEQQTAYRLWHLLYSAEDDNKKYLQEDIFIYGHDNIGLKKKLCERFGFRPEHTKILVNVAFSGDYGSLSSKAMRKIYPFIKELTYDKACREAGYRHSASSLSKEEIATRPLQKRLGLLKKNELRSPVVEKILNQMVNVVNALIDDENKRRKARGLSDDFHFDEIRIELARELKKNAKERAEMTTNINAAKQLHEKIIKILQTQFGVSNPSRNDIIRYKLYEELKNNGYKDLYTNTYISPDILFSKQIDIDHIIPQMSLFDDSFSNKTVVFRKDNQDKGNKTAYDYILGKYGELALEEYISRITSLFELGKKNKEEGINKAKFQKLQKRLIDIGDGFIEKDLRESQYIAKKAKNMLYAICRSVVATSGEITARLREDWDLVNVMQEINLPKFRALGLTEMVEKKDGGQKERIIDWTKRNDHRHHAMDALTIAFTRHSHIQYLNHLNARKDEASKWHPVVSKIEEKETDLVYDDLGNRKRRFKAPMPNFREVVKEHLENVLISHKAKNKVVTKNKNKIKTAKGEKIKTELTPRGQLHKETIYGRYRYYESKEEKVGPKFDAETIGMVVNPQYRKLLLERLTTNGNDPKKAFGGKNTLSKNPLYIDEAKQELLPEKILLRWLNDDYSIRKDVTPENLKDVKTIEKVLDEGIKKILLKRLVDFGNDPKKAFSDLDKNPIWLNEAKGITIKRVTISGVKNAEALHYKKDHFGNAILNENGKLIPSSFVSTGNNHHVAIYRDAEGNLQERVVSLFDAVQLVNAGEAVIDREYNKGIGWQFLFTMKQNEMFVFPNEKTGFDPKEIDLLNTDNRKLISPNLFRVQKIASKNYFFRHHLETNVEERKELKDIVYKPQLGLNAIKDVVKVRINHLGKIISVGEY

SEQ ID NO: 6457 - protein, 1424 aa, synthetic construct
  REGION 1..1424: note = Synthetic
MKKILGLDLGTTSIGFAYINESDDFTNSSIEKIGVRVNPLTTDEQTNFEKGKPITINADRTLKRGARRTLDRYQLRRSNLIDALVKAYIINNDTILAEDGKNTTHSTFALRAKSAVEKVEKDEFARILLAINKKRGYKSSRKANNEDEGQAIDGMLNAKKLYDENLTPGQLSYQLLKEGKKQLPDFYRSDLQAELDKVWEFQRQFYPEILTDQFKKELIGKGQRATSAIFWKTYNFNTSDIKGSREEKKLKAYQWRNNSISQQLDKEEVAYVITEINNNLNNSSGYLGAISDRSKELYFNKQTVGQYLYKQIQDNPHIRLKNQVFYRQDYFDEFETIWETQSKFHPELTEELKKEIRDIIIFYQRKLKSQKGLISFCEFENKEIEIDRNGQKVKKTIGLKVAPKSSPLFQEFKIWQVLNNVLIRKKGSKKRVLKDANQEEIFSLSLEDKQTLFNELNIKGNLKANKIIELLGREAKEWEINYTEIEGNRTNKALYEAYFKILETEGYNEDLLKLSDKDEINITELSTPVAEIKDMVKRIFEVLEIDQNILEFDAELDGKDFEKQASYQLWHLLYAYEGDNSASGNDKLHELLEQKYGFKKEHAQILANVSLSDDYGNLSAKAIRKIYPHIKELHYDKACFQAGYKHSASSLTKEEIANRPLKDRLDLLKKNSLRNPVVEKILNQVVNVVNTLIETNSEKDADGKIIKYFKFDEIRIELARDLKKNAKERAEMTTNINSAKIAHEKIFKLLQTEFGVKNPTRNDIIRYKLYEELKNNGYKDLYTNTYIAREILFSKQVDIEHIIPQSKVFDDSFSNKTVVFRKDNLDKGNKTAYDYIDSKFGKEKLTDFEQRIEFLFEQGKKNKEEGISKAKYQKLLKQEAEIGDGFIERDLRDSQYIAKKARNMLYEICRIVTPTTGSITDKLRSDWDLINIMQELNFDKFKKLGLTEQVEKKDGSFKERIIDWSKRNDHRHHAMDALTIAFTKQSHIQYLNFLNARKNENHKEHNAIIGIEGKETTWKYDDDGNKKRIFKLPLSNFREEAKKHLENILVSHKAKNKVVTKNKNKTKSAKGEKTKIELTPRGQLHKETVYGKYQYYVSKEEKIGIKFDQNTINKISNPNYKKLLLQRLAEYGNDPKKAFTGKNVLSKNPIYLNDAKTEILPETVKLIWLKDDYSIRKDITPDNFKDTKVVDKILDEGVKRILKERLAEYNNNPKEAFSDLDKNPIWLNKEKSISIKKVKISGVNNVEALHYKKDHLGNRILDENEKPILVDFVSTGNNHHVAIYKDEKGNLQERVVSLFEAIQLVNAGEPIITKDYNQGLGWQFLFTMKQNEYFIFPNEQTGFDPKSIDLLDPKNNKEISPNLFRVQKIAAKNYFFRHHLETTVEERKELKDTTYKPQLGLNAISKIIKVRINHIGQIVKIGEY

SEQ ID NO: 6458 - protein, 1421 aa, synthetic construct
  REGION 1..1421: note = Synthetic
MFSQRSQAPYCDLLKILPQIWHFSTTFPTFFQKKLLPCKQKNNNIENTRLVMKLIFGFDLGSTSIGWAVVQEKENDTEASRILRLGVRVNPLTTDEKTNFEKGKPITTNANRRLAHGMRLNLSRYKQRRKELIKSLIRFKFISPDTVLCENGSNTTFETLRLRAKAATEEITLEELSRVLLMINKKRGYKSNRKAQPNDNGAIDNIDIAKKLYQSHLTPGEYVFNNLKQGIQYIPPFYRSDLINEFNKIVDCQTQFYPHLKNIDTGSLLKAKNCDIILDGQDVQRIKQKGSPSEKKRELYCLRAQAATQQIRLEELALVLEKISSEIRNSSGYLGDISDRSKELFINNQTIGQYLMSQLDRNPNNKLKGQVFYRQDYEDEFNRIWETQARFHKELTPERLHIIRDIIIFFQRDLKSQKSNIAICEFEKQKREITVDGKKKIIEFGPKVCPKSSPIFQEFKIWQTINNLKISNIYGEELSLSSDERQILFEELSIRKKLTCAEILKLLHKDSKCSLNYKEIQGNATISAIFDAFKEIILQSGHDNNNFNKASFKDTMLIIEPIFKMLGINTDILSLDCPTDSHSLKTCPIYQLWHLLYSYAGDNSKTGDSSLIKKLQRRYGFSKEYASIMSKISFDNDYGNLSAKAIMRILPHLRNGLQYSDACNAAGYNHSKRYLTKQDILNKVLVSQIDLLPRNSLRQPVVEKILNQLINITNALISTYGNPDEIRIELARELKKSADERAKLNSANNANEKENNSIRKLLQERFGIQNPSRNDIVRYKLYKELEHTGFKTLYSQSLITDDILFSKEIEIEHIIPQARLFDDSLSNKTLEFHNINQNKSNQTAYDYILSEFGEDYAVQYKKRIDDLLKNGKISRTKHKYLLMSETEIPTDFINRDIRETQYISRKAMEILEPATRKVVASSGAITARLREDWQLVDVMKELNWEKYKALNLTETIQDKDGRRIYKIKDWTKRNDHRHHAMDALTVAFTKPSFIQFLNNLNARSDKGNAIYAIQQKELHRNKDGKLCFNPPLPLDEFRAEAKRQLNDIFVSHKAKNKVATRNSYMTKNGKGTKIVELTPRGQLFNETTYGCVKQYETKLESVNSSFDTDKIMTVADKSYRQALMKRIEEFDGNASLAFSRKNSITKNPIYVDDSHSDTVPVKVKTVVPKPVFTQRIAVDIKLDKTKIAQILDAKIRRILTDRFYEFGEDPQKAFSNIDENPIWLNKEKGIAIKKVTIKTGISGVPIRHKRNNMGRPILNSDGNKIPSDFVVPGNNHHIAIYKDADGNIKEQAVPFYIATNRVIHKQPAVDRNFNADKGWKFLFSIKKNEYFVFPNENTGFNPAEIDLLNPDNNKIISPNLFRVQKISPGDYFFRHHLETTVDANNALKGTTWIRITSLKALENVIKVRVNNIGQIVTVGEY

SEQ ID NO: 6459 - protein, 1421 aa, synthetic construct
  REGION 1..1421: note = Synthetic
MKRVLGLDLGTSSIGWALVNEAENCNEESSIVRLGVRVNPLTVDELQNFDKGKSITTNADRTLKRCMRRNLQRYKLRRENLIDILKENCFISEESILSENGNKTTFETYKLRAKSASQEISLEEFARVLLMINKKRGYKSSRKTKGNDEGQTIDGMEVALKLYNESLTPGQLCLHLIKSGKKHLPEFYRSDLQAEFERIWTKQKGFYPDILTDDLKEKLKGKNEKVTWAICRDNFKWSETVRVWNNDEAKNQDIIIEKTLTGIKREGNVQEQKIENFYWRSKAISEKLHPEEIAVVLSKVNSQINGSSNYLGAISDRSKELYFNKQTVGQYQMSVLEQNPNASLRNMIFYRLDYLNEFNTIWETQAKYHKKLNEELKQEIRDIIIFYQRNLKSQKGLISFCEFEKKQIEVEIEGKKKTKTIGSRVIPRSSPLFQEFKIWQILNNMIVSGKGKNSNKDKDDTNLHFMDNENRLSINGARELYQEEKELLASELSIKEELKKDEILNLLFNNPNGLDLNFKSVQGNLTQAKLFETYKTIIELSGHSLDLKKPATEIVKNVEEIFSGLGYQSNFLCFDSSKPLEEQPMFKLWHLLYSYEGDNSVTGNEGLINKINEICGFEKEYATILSNVVFQNDYGSLSTKAIRKILPYLKEGNKYDLACEYAGYKHSASSLTKEEIENKVLKEKLEILPKNSLRNPVVEKILNQMVNVINTITDIYGKPEEIRIELARDLKKNAKEREELTKSIAEATRAHEEYKRILTKPLSEGGQFGLTYVNRNDIIRYKLYEELRENGYKTLYSNTYISPGNVFSGDFDIEHIIPQSRLFDDSFSNKTLELKSVNLEKGNRTAIDFVKDKYGETGNDNSLENYLNRIESQFKKGVLSRGKYNKLKMQEKDIPEDFINRDLGDTRYIAKYAKTMLGDFVKRVVTTTGSITDALREDWQLVDVMKELNWDKYNALGLTYYEENREGKKLKRIVNWTKRNDHRHHAMDALTVAFTKDAFVQYFNNKNASFNPTSNEYALRTKYFFNNKAIPPMPLEVFRSQAKRHLENTLISIKAKNKVVTQNVNVTKKKEGNNKKIQLTPRGQLHLETVYGSQKQYVVKEEKIDSTFDQEKILTVAKPVYRDVLLKHLKIFDGDPKKAFSGKNSLAQNPIYIDEKQTISIPERIKTVSFETIYTIRKEITPDLKLEKVIDIRIRRILETRLKEFDNDSKKAFSNLDENPIWLNRQKQILIKRVTIKGISNAECLHEKRDKEGNLLLDAEGNKQFVDFVNTGNNHHVAVYRNENGDLQECIVSFFEAVTRRNLGLPVIDKTYRALYGWKFLFSMKQNEYFVFPNDKTGFDPNEIDLLDPENYALISPNLFRVQKFDKNGIKMFRHHLETSVKDENTLQETAWKRLSSLRGIDKIVKVRINHIGQIVLVGEY

SEQ ID NO: 6460 - protein, 1421 aa, synthetic construct
  REGION 1..1421: note = Synthetic
MKTILGLDLGTNSIGWALVREAKEKDEKSEIIKLGVRVNPLTVDEKTNFEAGKPLSTNADRTAKRSARRNLQRYKLRRKDLIDLLIKNQLIDKDTSLTEIGKNTTYQTLELRAKAARERIELEDLARVFLAINKKRGYKSSRKVNNEEEGQAVDGMAVAKKLYDESLTPGQYAYELLSKGKKYVPDFYRSDLQAEFDSIWEYQRQFYSHVLLNELYKELKGKNKSQTWAICKEPFAIEGIKLSEKGADLKLKKYQLRAEGLARKLDLELLAIVLQEINSDLNKSSGYLGAISDRSKELYFNKETVGENLWKQIQKNPHTSLKNQVFYRQDYLDEFEQIWETQAQFHPQLTLALKEQIRDVVIFYQRKLKSQKGLLSFCQFESWEIERKDENGNVILNKSTQLPKRQTVGRRVAPKSSPLFQEFKIWQNINNLEIVKISDRDSKNKKETEETLSDDERKLLFEELNLRGNLSQKEVLQILGLKDKECKTNFLEGLEGNRTNVALFNIYQQIAENEGYGFDWSKKSAQEIKEELKAVFSQIGIQANILDFNAELDGKEFENQASYQLWHLLYSAEEDDKINEEDQIIYGNSAVSLKKKLCEKFGFTPEYAKWIANVSLQDDYGNLSTKAMRKIIPYLIDGNDYSEACALAGYNHSNSLTKEENDNRELLDKLELLPKNSLRNPVVEKILNQMVNVVNQVIETYGKPDEVRIELARELKKSAEERAEMTKGINEATRRNEDIKKLITKDFGIPNPTKSDVVRYRLWEELAPLAYKDVFTGKQIKKEDLFSSKIDIEHIIPKALLFDDSFSNKTLAFRETNLKKADRTAYDFIESDYNTTLDDYIQRVETLYNNAKGTISKGKRNKLLMTQKNLPDGFIERDLRNSQYIAKKAKAMLQQVFKDVNVTSGSITDRLREDWDLINVMKELNFPKYKALGLTEIEERYDIGQEKPKKVEVITDWTKRNDHRHHAMDALTVAFTTHSHVQYLNNLNTIHSLKGDEVDLELSKLYGLKNTITEVVNKKRKFIPPMPSFREEAKKHIETILVSIKNKNKVYTKNINKTKKKSGHNTKEQLTPRGQLHKETVYGKSKRPMNKPTKINKNFSLEQAQLIINVQEKELVLCHLAQFDNNPAVAFDTKTLKKTPLLKNGELLKEVSCFEEIFTIRKEIVGSNPSSKQIVPDTKSINKIIDKNIQSILKKRLSDFGGNTKEAFSDLDKNPIWLNKEKGICIKRVTITGVSNAEALHHQKDHLGKEILDDKGNPIPADFVSTGNNHHLAVYLDSEGKLQDNIVSFYEAVVRTSQGLPVVDKGLNKDLGWKFLFSLKQNEMFVFSNDDFDINDFDLLDDNNAELISKHLYRVQAISKVPVGNSFARDIIFRHHIETTVERKKELKDISYIQLKSLEGLRNIKKVRINHIGKIVQVGEY

SEQ ID NO: 6461 - protein, 1421 aa, synthetic construct
  REGION 1..1421: note = Synthetic
MKKILGLDLGPNSIGWALVNEAENENEKSSIIKIGSRVIHYGDNLVKVDKSGKISASMTPEEDFSSGKGLSPNAGRTKQRSARRNLQRYKQRRNNLIEILKAHSLIDNNFIFSEEGNETTFKTYKNRALAATNEISLEDFIKVLFMINKKRGYKSSRKAKGDEDGQLIDGMAIAIQLYEHNQTPGQFVYNLLKNGKKNIPDFYRSDLQTEFDRIWNFQKAFHQESLSDGICEKLVGQKKNVTSAILFKEFKIESLEIKGKWDEKRFFRYELRNKAVQQELKLNEIAECLVEINGEISNSSGYLGAISDRSKELVFQKITVGQYLYKQIAANPNTSLKKQIFYRQDYLDEFNTLWETQAKYHKELTDELKTQIRDVIIFYQRRLKSQKGLISFCEFESKQIEVFVDGKKSIKTRGMRVIPKSSPLFQEFKIWQILNNIEITDLKTKESRELTDDERQLLFEELNIRPKISKKEALKILTEKPAQYDLNYKDIEGNKTNAKFYEAYNKIIHLSGHDEIDFTDKTSDINEYLKQIFSLLGIKPEILDFDSSLKDEDFEKQLHFQLWHLLYSFEGDNTKTGDEKLLQKLNTKFGFPVEYAKVISNIALPDDYGSLSAKAIRKILPHLKDGFSYGGRKSRPDEPSACEYAGYRHSKASLTKDEKENKTYKDKLEILPKNSLRNPIVEKILNQTINVVNAVIGDYGKPDEIRLELARELKKSAEERQDATDSISKATAKHEKYRKVLQTEFGLKHISRNDLIRYKLYLELKNNGFKTLYSDTYIAPYEIFSKKFDIEHILPKAKLFDDSFSNKTLELKSVNLKKGDMTAYDFVKEEYGTEGLAKYEQRVQDLFLNKKRNEDLDQENESRITDEKISKTKRDKLLMPENKIPTGFIDRELRDSQYIAKKAKTMMEDICKDVVTTTGSVTDRLREDWQLIDIMQELNWPKYAALGLTEEFTNEEGNVIRKIKDWTKRNDHRHHAMDAITIAFTKRSHIQYLNNLSARSDKSSSIYGIEQKELYRDKNNKLRFAPPIPINEFRAEAKMQLENTLISIKAQNKVVTKNKNKISGQKKLQETLTPRGQLHLETIYGKINQYQTAEIKVGGTLDSELINKVANKKTREALLNRLAEFGNDPKKAFTVKNTIDKNPIYLDKHQSYKIPEKVKIVWQEPVYTIRKSITPDLKLDKIIDPKIKALLESRLKECNGDAKLAFSNLAENPIWLNKEKGIQIKRVTITGISNAASLHDKKDLNGKPILDEKGNKISVDFVNTGNNHHVAIYKDENGNLHDNVVTFFEAVERVNQNLPVVDKLFKQKEGWQFLFTMKQNEYFVFPNEITAFNPNEFDLLNPDNYYLISPNLFRVQTMSKVMYGNNTLRDYKFRHHLETTLQDIKELRDIVFKQFKSLSIFDKIVKVRINHLGKIVKTGEY

SEQ ID NO: 6462 - protein, 1421 aa, synthetic construct
  REGION 1..1421: note = Synthetic
MFSQRSQAPYCDLLKILPQIWHFSTTFPTFFQKKLLPCKQKNNNIENTRLVMKLIFGFDLGSTSIGWAVVQEKENDTEASRILKLGVRVNPLTTDEKTNFEKGKPITTNANRRLAHGMRLNLSRYKQRRKELIKSLIRFKFISPDTVLCENGSNTTFETLRLRAKAATEEITLEELSRVLLMINKKRGYKSNRKAQPNDNGAIDNIDIAKKLYQSHLTPGEYVFNNLKQGIQYIPPFYRSDLINEFNKIVDCQTQFYPHLKNIDTGSLLKAKNCDIILDGQDVQRIKQKGSPSEKKRELYCLRAQAATQQIRLEELALVLEKISSEIRNSSGYLGDISDRSKELFINNQTIGQYLMSQLDRNPNNKLKGQVFYRQDYEDEFNRIWETQARFHKELTPERLHIIRDIIIFFQRDLKSQKSNIAICEFEKQKKEITVDGKKKIIEFGPKVCPKSSPIFQEFKIWQTINNLKISNIYGEELSLSSDERQILFEELSIRKKLTCAEILKLLHKDSKCSLNYKEIQGNATISAIFDAFKEIILQSGHDNNNFNKASFKDTMLIIEPIFKMLGINTDILSLDCPTDSHSLKTCPIYQLWHLLYSYAGDNSKTGDSSLIKKLQRRYGFSKEYASIMSKISFDNDYGNLSAKAIMRILPHLRNGLQYSDACNAAGYNHSKRSLTKQDILNKVLVSQIDLLPRNSLRQPVVEKILNQLINITNALISTYGNPDEIRIELARELKKSADERAKLNSANNANEKENNSIRKLLQERFGIQNPSRNDIVRYKLYKELEHTGFKTLYSQSLITDDILFSKEIEIEHIIPQARLFDDSLSNKTLEFHNINQNKSNQTAYDYILSEFGEDYAVQYKKRIDDLLKNGKISRTKHKYLLMSETEIPTDFINRDIRETQYISRKAMEILEPATRKVVASSGAITARLREDWQLVDVMKELNWEKYKALNLTETIQDKDGRRIYKIKDWTKRNDHRHHAMDALTVAFTKPSFIQFLNNLNARSDKGNAIYAIQQKELHRNKDGKLCFNPPLPLDEFRAEAKRQLNDIFVSHKAKNKVATRNSYMTKNGKGTKIVELTPRGQLFNETTYGCVKQYETKLESVNSSFDTDKIMTVADKSYRQALMKRIEEFDGNASLAFSQKNSITKNPIYVDDSHSDTVPVKVKTVVPKPVFTQRIAVDIKLDKTKIAQILDAKIRRILTDRFYEFGEDPQKAFSNIDENPIWLNKEKGIAIKKVTIKTGISGVPIRHKRNNMGRPILNSDGNKIPSDFVVPGNNHHIAIYKDADGNIKEQAVPFYIATNRVIHKQPAVDRNFNADKGWKFLFSIKKNEYFVFPNEKTGFNPAEIDLLNPDNNKIISPNLFRVQKISSSNYYFRHHLETTVDTNNALNGTTWKHVQSLKALENIIKVRVNNIGQIVAVGEY

SEQ ID NO: 6463 - protein, 1420 aa, synthetic construct
  REGION 1..1420: note = Synthetic
MKRNILGLDLGTTSIGFAHIIEGDSPEQSSIKKIGVRVNPLTTDEQTNFEKGKPVSVNADRTLKRGARRNLDRYQLRRENLIDALLQANIITKETILAEDGKNTTHETWLLRAKSVYEKIEKEELARVFLAINKKRGYKSSRKAKNEDEGQLIDGMEIAKRLYEESLTPGQLAYHLLQEGKKFIPDFYRSDLQAELDKVWNFQKQFYPEILTDEFYKELQGKGQRATSASFWGKYQFNTAENKGNREEKKLQAYKWRNEAISKQLEKEEVAYVITEINNNLNNSSGYLGAISDRSKELYFNHETVGQNLYKQLQENPHTKLKNQVFYRQDYLDEFEAIWKEQSKHHKELTDNLKAEIRDITIFYQRKLKSQKGLVSFCEFESKEIEINNNGQIAKRRIGLKAAPKSSPLFQEFKIWQVLNNVLVRKKGSKKRVLKESDQTKLFDKEKEIFDFDLETKQKLFDELNIKGNLKANKIIELLGHKSSEWEINYSELEGNRTNKVLYDAYLKILELEGYDEDLLKLQGKDDINVSELKASAFEVKDMVRRIFEVLNINTEILEFNAELDGKAFEQQASYQLWHLLYSYEGDDSPSGNEKLYELLEKKFGFKKEHGQILANVTLSDDYGNLSSKAMRKIYPYIKEQTYDKAAALAGYRHSASSLTKEEISTRPLKDKLELLKKNSLRNPVVEKILNQLVNVVNALIEKNRSINPNFRFDEIRIELARELKKNAKERAEMTTNINAAKTENDKIRDIIKRDFSNVKNPTKNDLVRYKLYQELSFNAYKNLYTNEKIDYYKLFGKEYDIDHIIPQSKMFDDSFSNKVLVPRQANLNKGNQTAYDYMSNKSKEEFDKYIATIETLYKERKITKAKYQKLLKQETEIGDGFIDRDLRDSQYIAKKARNLLYEICRIVTPTSGSVTGRLREDWGLVNIMQELNMEKFRSLGLTEMVEKKDGTFKERIVDWSKRNDHRHHAMDALTIAFTKHNYIQYLNYLNARKNEYHKLHSNIIGIETLETEIIIDDDGNKKRVFKLPIPNFREKAKEHLENVLVSHKAKNKVVTKNKNKTKSKNGEKTKVELTPRGQLHKETVYGKYQYYVNKEEKVGTKFDEKTINKVSNPLYKKLLLKRLSENGNDPKKAFGGKNALSKSPIYLNEEKTETLPETVKLTWLEEDYSIRKDVTPENFKGEKSIEKILDKKVKDILKERLNTFGNDAKKAFSDLEKNPIWLNEAKGIAIKRVTISGVKNAQFLHYKKDHLGNYILDKNGDKIPVDFVSTGNNHHVAIYRDEKENLQERVVSLFDAVQLVNAGESVIDKNYNQGIGWEFLFTMKQNEYFIFPNEKTGFNPGEIDLLDPKNKKLISPNLFRVQKIATKNYMFRHHLETTVDDKKEMKNIAFIHIQSCNLLKEIIKVRLNHLGDIVSVGEY

SEQ ID NO: 6464 - protein, 1420 aa, synthetic construct
  REGION 1..1420: note = Synthetic
MKKILGLDLGTNSIGWAVVNEAENQTENSSIIKLGVRVNPLTVDELLNFEKGKSITTNADRTLKRSMRRNLQRYKLRRSHLIEVLKERGFIDDSTLLSENGNWTTFETCRLRAKAATEEISLTELARVLLMINKKRGYKSSRKAKSTEEGKLIDGMEIAKKLYDEILTPGQLSLQLLQDGKRHLPDFYRSDLQIEFDRIWQQQKIYYPELLTDQLKEELKGRNKTQTWAICAKPFQIVGVKSSKKGQELRKENYRLRVEALTKKLGLEELAIVLQEVNGQISNASGYLGDISDRSKALYFNHQTVGQYQMAQLENNPHYSLKNQVFYRQDYLNEFETIWETQAKFHTELTTELKKEIRDIVIFYQRPLKSQKGLISFCEFESRQIEVEIDGKKKAKTIGLRVCPKSSPLFQEFKIWQVLNNVQVWGKTTPKRFLFQEEKEKLFAELNYCERLSKAEALKLLFGSPKEYDLNYKDLEGNQTQAGLLEAYKTIIEMIGHDEFDFSKLSSAKTIEKVDEVFSGLGINTGILYFDSSLEGHALEQQPMFKLWHLLYSFEGDKSELGNANLIQKLHEQFGFDKESATVLAGVVFSDDYGSLSSKAIRKILPHLKDGLEYSVACEYAGYRHSKSSLTKEEIENKVLKDKLELLPRNSLRNPVVEKILNQMVNVVNAIIDEYGKPDEIRIELARELKKSAKEREEMTRSINETTRLHEGYVKILQGDPFKLEHVSRNDIIRYKLYEELEMNGYKTLYSNTYIPREKLFSKEFDIEHIIPQAKLFDDSFSNKTLEVRQVNLDKGNATAMDFVNEKYGAQVAEEYVARIENLYSKKVISKTKHDKLLMKEADIPSGFINRDLRDSQYIAKKAREILEEIVRFVVPTTGSITDRLREDWQLVDVMQELNWDKYNQLGLTEIIEGRDGQRIRRIKDWTKRNDHRHHAMDALTIAFTKRSFIQYLNNLNARVQKGVDDYIDLDMVELSLLDKDQRSAAVYGIERKELHRDSHGRLRFNAPMPLEEFRAEAKRQLEAILVSIKAKNKVVTQNINVSKTKNGRNKKVQLTPRGQLHLETVFGSCKRYVTKEEKVNASFDVEKINTVANKRYRDALLARLQQFDGDAKKAFTGKNSLDKNPIWLDDLHTIQVPEKVRIVTFETIYTIRKDITPDLKIEKVVDVHIRRILQERLATFGGDAKKAFSNLDENPIWLNKEKGIAIKRVTITGISNAESLHDKRDKEGQLVLDEKGSTQPVDFVNTGNNHHVAVYRKPKLDKNGQHLLDENGELQYELDERIVSFYEATSRAMLGLPIVDKEYKKEEGWQFMFTMKQNEYFVFPRYDAQGIMVFNPLDYDEAWYKNADNYATISPNLFRVQKFSFKNYVFRHHLETTIDNSGYSLRGITWIDFRSSKGLDLIMKVRVNHIGQIVSVGEY

SEQ ID NO: 6465 - protein, 1419 aa, synthetic construct
  REGION 1..1419: note = Synthetic
MKKILGLDLGTNSIGWAVVNEAESEAEKSSIIKLGVRVNPLTVDEQTNFEKGKPITTNATRTLKRSMRRNLQRYKLRRENLIEVLKESGFIDDETVLSENGNKTTFEIYRLRAKAASKEISLEEFARVLLMINKKRGYKSSRKAKSTEEGQLIDGMEIAKKLYEENLTPGQLSLQLLKSGKRYLPEFYRSDLQNEFERIWASQKQYYPTLLTDKLFNELIGKNKKQTWSLCIGLFKIEGVKRSTKGQDLKIENYQWRVDALTQKLGLEELMVVLQEVNGQISNASGYLGDISDRSKALYFNHQTIGQYQMAQLEKNPNYSLKNQVFYRQDYLNEFETIWKTQAKFHKELNPELKKEIRDIVIFYQRPLKSQKGLISFCEFESRQIEVEIDGKKKTKTIGLRVCPKSSPLFQEFKIWQVLNNMQVWGKTTPKRFLFQEEKEKLFAELNYREKISKAEALKLLFGNQKDYDLNYKDLEGNQTQAELLEAYKTIIEMSGHDDLDFTKMSSSKIIESVVEVFAGLGINTEILYFDSSLEGHALEQQPMFKLWHLLYSYEGDKSELGNANLIQKLHDQFGFDKDFATILAGVVFPDDYGNLSSKAIRKILPHLKDGLEYSVACEYAGYRHSKNSFTKEEIENKVLKDKLDLLPRNSLRNPVVEKILNQMVNVVNAIIDEYGKPDEIRIELARELKKSAKEREEMTKSINETTRLHEGYVKVLQGEPFNLEHVSRNDIIRYKLYEELEMNGYKTLYSNTYIPREKLFSKEFDIEHIIPQAKLFDDSFSNKTLEVRQVNLDKGNATAMDFVNEKYGAQGAEEYVNRIENLYNKKVISKTKRDKLLMKEADIPSGFINRDLRDSQYIAKKAREILEEIVRFVVPTTGSITDRLREDWQLVDVMQELNWDKYNQLGLTEIIEGRDGQRIRRIKDWTKRNDHRHHAMDALTIAFTKRSFIQYLNNLNARVQKGVDDYIDLDMVELSLLDKDQRSAAVYAIERKELHRDSHGKLRFNAPMPLEEFRAEAKRQLEAILVSIKAKNKVVTQNVNVSKTKNGRNKKIQLTPRGQLHLETVFGSCKRYVTKEEKVNASFNVEKINTVTNKRYREALLARLQQCDGDAKKAFTGKNSLEKNPVWLNDLHTIQVPEKIKTVTFETIYTIRKEITPDLKVEKVVDAHTRQILQERLDTFGGDAKKAFSNLDDNPIWLNKEKGIAIKRVTITGISNAESLHDKRDKDGQLILDEKGKTQPVDFVNTGNNHHVAIYRKPKLDKNGQQLLDGKGEPQYELDEVIVSFYEATSRAIQGFPIVDKEYKKEEGWRFMFTMKQNEYFVFPRYDEQGNLVFNPLYYDEVWYKNPENYALISPNLFRVQKMATKDYYFRHHLETIVDENTFLRDITWKRVRNAEGLRGIVKVRINHIGQIVSIGEY

SEQ ID NO: 6466 - protein, 1418 aa, synthetic construct
  REGION 1..1418: note = Synthetic
MKVKNILGLDIGVTSIGFAHVTENEKDNKSHIKQLGVRINPLTVDEQTNFEKGRPASVNADRTLKRGARKMLSRYKDRRKNLIEILSKTGFINSESILAEDGKNTTHSTWALRAKASRERIEKDELGRVLLAINKKRGYKSSRKAKNEDEGQAIDGMAIAKRLYEENLTPGQLVYQLLREGKKYIPDFYRSDLQDELDKVWNFQKQFHQEILTDTFYKDIQGKGQRATSASFYGVYGFNTAENKGSREEKRLQAYAWRSDALTKQLTREEVAFVITEINNNLNNSSGYLGAISDRSKELFFNKKTVGQYLYEQLQQNPHTRLKNQVFYRQDYLDEFETIWTIQSRYYPELTDDLKREIRDVVIFYQRKLKSQKGLVSFCELESKEIMIEKNGKAAVKKIGSKVAPKSSPLFQEFKIWQVLHNVDIKNKKDKTKRPLDDSEKEYLFNELNIKGNLKAAKVIQLLTLNKNETELNYTQLEGNRTQKALYEAYLKILDTEGYDVNNLLGIKSNKDEVFLDDLDVNALEIKTMIKQIFNALNINTGILDFDAELDGKAFEQQASYHLWHLLYSYEEDGSKSGNEHLYKLLENKFGFKPEHARILAGITLSDDYGNLSAKAMRKIYPQIKENNFSTACELVGYRHSKNSLTKEENQERPLKNKLELLKKNSLRQPVVEKILNQMINLVNELIDKNSEKDEQGSIIEYFRFDEIRIELARELKKNTDERRDLDAAIREGNLRNEKIYKLLQAQFGIKNPTRNDIIRYRLYEELKNNGYKDLYTNSYIPQEKLFGKEIDIDHIIPQSKLFDDSFSNKTLTYNTTNKDKGNQTGFDYIESKYGIDGIEAYTARIENLFESGKKNKEEGVSKAKYQKLLKKESEIGDGFIERDLRESQYIAKKAKELLLQITRSVVATSGSITARLREDWDLVNVMKELNLPKYRALGLTEMEERKYGQKVEVIKDWTKRDDHRHHAMDALTIAFTKHNHIQYLNHLNARKDEQHKEHKIINAIENKETILITDKSGNRKRVFKAPMPNFRQTAKQYLEEVLISHKAKNKVVTKNKNKILGKEKIQETLTPRGQLHDQTIYGFNWWSRITLSKKVSRNEIEKIIDNNTKFFLQEFIQLKGSIAKAFSDAELNKLMYKGKILKEIEVAIPCYTQRIDISKVFTDSQKSNSAKEKNIKNILDLKVRNILQNRLSEFKGDFKKAFSDLDKNPIWFNKEKGISIKRVIISGVKNVEPLHYKKDHLGNDILDGKENRIPVDFISTGNNHHVAIYQDEKGNLQEKVVSLFDAVKLVNADEPVIDKTYNQGLGWQFLFTMKQNEMFVFPNDNTGFDPKEIDLLDPSNKKLISPNLFRVQSISIVQYGNNIVRDFKFRNHLESVLNDDKVLHGITFQQIKSLGPLLNIVKVRINHLGDIVSVGEY

SEQ ID NO: 6467 - protein, 1417 aa, synthetic construct
  REGION 1..1417: note = Synthetic
MKRILGLDLGSNSIGWALVNEAENESEESSIIRLGVRVNPLTVDEKQNFEKGKSITTNADRTLKRSIRRNLQRYKLRRENLIEILKENGFIGDETILSENGNHTTFETYRLRQKAVTEKVSLEQFARVLLMINKKRGYKSSRKIKGTEEGALIDGIEIAKRLYNEKLTPGQLCLQLLKSSGKYLPYFYRSDLLSEFDKIWLKQREFYPLLLTDELKKKLLGKNETQTWTICQKPFEIVGIKRVPKGIELKKENFEWRVRALSEKMNLEELAIVFQKINGQIYNSSGCLGDISDRSKELFFNRQTVGQYQMMILDANPNASLRNMVFYRQDYLDEFNTIWDKQAEFHKELTPELKHEIRNVIIFYQRRLKTQKGLISFCEFENRKIEVEVEGKIKIKTVGSRVVPRSSPLFQEFKIWQSLNNLEVSEKGRKVKNNKNKVLPLFHEKENALQIYGKRELFQEEKELLAAELSIKEKLTKSEILKLLFDAPQELDLNFPSLQGNLTQAKLFEAYKSIIDRTGHELDLRKPTNQILDNIEEIFTSLGYNTDILRFNSNSNNLDKEPMYKFWHLLYSFEGDNSVSGNEKLINKISELYGFEKEYAGILANVTFQEDYGSLSTKAIRKILPYLKSGNKYDIACEYAGYRHSASSLTKEEIENKIYKERLEILPKNSLRNPVVEKILNQMVNVINSIIDVYGKPDEIRIELARELKKSAKEREELFKSINETTRLHEQYRDILLKPPFNFSYVSRNDIIRYKLYEELKDNGYKTLYSGTYISPKDVFSGTFDVEHIIPQSRIFDDSFSNKTLELRSINIEKGNRTAIDFVKDKYGEEEGDNCMGNYLNRIEKLYKTGSLSRAKYNKLIIKNENIPEGFIERDIRDTQYISRYAKTLLGDLVKSVVTTSGSITDRLRQDWQLVDIMKELNWIKYKELGFTEEFTNEEGHKIRKIKGWTKRNDHRHHAMDALTVAFTKLSYIQYLNNLNARSDKGSAIYGIEQNELYRNGKGKLLFKPPFALDEFRTEAKRHLENTLISIKAKNKVTTQNINSSKRSGGLNKKVQQTPRGQLHLETIYGSKKQYIVKEETINAKFDIEKITTVTKPSYREALLIRLKQFDNDPKKAFAGVNALSKKPIWLNENHIGRVSEKVKTVNIETVYTIRKEIVGSNPTSKQFIPDEKGLKNVIDAGIRSILEDRLLKYGGDPKKAFSNLDDNPIWLNKGKGISIKRVTISGISNAESLHDKRDKDGNWVLDEKGNSQPVDFVSTGNNHHVAVYRDADGNLQENVISFYEVVSRRNLGLSVIDKSYKAGEGWRFIFSMKQNEYFVFPNENTGFDPHEIDLLNPDNYSLISPNLFRVQKFSKLFYGNSAVREYVFRHHLETKVEDIKELKDITYKSIKSLPIFEKIVKVRINHIGQIVSVGEY

SEQ ID NO: 6468 - protein, 1417 aa, synthetic construct
  REGION 1..1417: note = Synthetic
MKHILGLDLGTNSIGWAIVKEAENDKEQSSIEKIGVRVNPLTTDEQTNFEKGNPITTNAGRTLGRSARRNLQRFKLRRENLIQILKAQNWISDDTVLAENGNKTTFETFRLRALAAEKQLELNELSRVLLQINKKRGYKSSRKVNNTEEGTLIDGMDIAKKLYHENLTPGQFILDLLKSGKKKVPDFYRSDLQAEFDKIWNFQKQFYPEILTDEFKETIKNKGQKVTSQIFYSTYGFNTAENKGTRDKKKLQNYKWRNEALSQQLAKDEVAYILADINGQIYNSSGYLGAISDRSKELYFNNQTVGQYQYAQLQDNPHARLKNQVFYRQDYMDEFEKIWTIQSKGREAIFTEALKEEIRDVVIFYQRKLKSQKGLISFCEFEQREIEVNGKKKTVGLRVVPKSSLLFQEFKIWQNLHNVKLKNKLTKEIYVLSQEDKQMLFNELNLKGNLSASEVLKLLVDKPKDWEINYTSLEGNRTNQALYNAYLTVLENEGYDVREELKLKLKKDDITLADIDKPASEIKEMVQAIFNHLGIKSEILDFNAELEGKAFEEQLSFQLWHLLYAYEEDNSPTGMDTLYRLLEQKFGFNKEQAKVIGSVAFQDDYGSLSSKAIRKIYPFIKENEYSEACVLAGYRHSKHSLTKEEIDKRELKSRLDILPKNSLRNPVVEKILNQMVNVVNTLIDTENDKLEKEGKSRDFKFDEVRIELARELKKNAKEREEMTSEINRATIENEKIKSIIKRDFPHIQNPTRNDVIRYKLYEELSINAYKDLYTDTKVDYHKLFSKEYDIDHIIPQSRLFDDSFSNKVLVPRQSNLDKSNNTAFDYISSKGDNDLLKFQAVIDSLLKANKISKAKYKKLLMKGAEIGEGFIQRDLRDSQYIAKKAKEILFQITKSVLSTSGSVTDRLREDWDLVNVMKELNLEKYRLAGLTEMQTTKDGNPKEVIKDWTKRNDHRHHAMDALTVAFTKRSFIQYLNNLNARRHDEYDGISNAKDKTSIDTNSLKISSRDALGIEEKETHKIHDGKGNYKRVFNEPIPSFRQVAKQHLEAVLVSHKAKNKVVTKNINKIKGSDKVQIALTPRGQMHKETVYGKIKQYAFKEEKVSAKFDESTIALVSNPQYRTLLLQRLVENGNDSKKAFTGKNALSKNPILLKDGTELPEKVKLMWLEDDYTIRKDIGPDLKIDKVIDEGVKRILQTRLNEFKGDAKKAFSDLEQNPIWLNEEKGIAIKRVTISGVKNAETLHYKKDHLGKVILDNNGKKIPVDFVSTGNNHHVAIYEDEKGNLQEKVVSFYEAVVRVNEDLPIVDKLYNQHLGWTFKFTMKQNEMFIFPSEDFNPNEIDLLDRKNQALISKHLFRVQKFGSLLSGFWFRHHLETTVDVNNSLKGVTYKVIQSANNLRDLIKVRTNHLGEIIQVGEY

SEQ ID NO: 6469 - protein, 1417 aa, synthetic construct
  REGION 1..1417: note = Synthetic
MKKILGLDLGTNSIGWALVKEATEPNEKSEIIKLGVRVNPLTVDEKTNFEKGRPLTTNADRTLKRGARRNLQRFKLRREALIKILIKNGLITDKTPLTEIGKNSTYQTLALRAKSAKEKVALEDLAKIFLAINKKRGYKSSRKAQNEEKGQAIDGMAIAKELYENNLTVGQYVFNLLENGKKYIPDFYRSDLQSEFDKIWNFQKQFHPNILTDELYQNLQGKNKKQTWAICKEPFNIVGIKIKENGKELKGADLKKKNYELRSKGFSEQLELEYLAIVLQEINNNLNQSSGYLGAISDRSKALYFHKQTVGEYLFKQIQKKPHTSLKNQVFYRQDYLDEFEQIWSTQSKFHQELTDELKEEIRDVIIFYQRKLKSQKGLLSFCQFESWEIDKKDENGNIIINKITGLPKKQRIGRRVISKSSPLFQETKIWQNINNLEFINEKQNEKIEFVKLEKEIRAEIFNELNLRGDQKPKDILKLLSKHLKLGKVSEWKCNFEKIEGNRTNQVLYNVYQKIANEEGYGFDWAKKSAIEIKEELKAIFLEIGINAEILDFNATLEDKKLKNGKKSNDFENQPAYQLWHLLYATEEDDKISEEDKLIYGNSAVNLKKKLVEKFGFKPQYAKLLANVSLQQDYGNLSSKALRKIMPYLEVGHDYYEACKLAGYNHSKSLTTEENNARELADRLDLVPKNSLRNPVVEKILNQMINVVNQIVEEYGKPDEIRLELARELKKNAKQRAEMTKNITSATKRNEDLKKRITKEFGIPNPTKNDVIRLRLWEELSVNGHKDVFRGKEISPKDLFTGLIEIEHIIPKALLFDDSFSNKTLAFSKDNKQKDKRTALDFMTQDHNADLENYKQRIETLYNNGKGAISKVKRNKLLMSQKDLPEGFIERDLRNSQYIAKKAKEILQELVRERIVSTSGNITDKLREDWDLINMMKDLNLPKYRALGLTGFEERLNKQTGELVKHEIIKDWTKRNDHRHHAMDALTVAFTKHDHIQYLNNLNAIQELEEDKIDLEKSELYGLKNKITFLDNKKKRRFTPPMKNFRKEAKKHIESVLISIKNKNKVVTKNINKIKKKGKDKYYRKEELTPRGQLHKETVYGKSKRLMAKPTKLSKKISLKQVNLIANPIQKELVLSHLLDFKNNPNIAFDTKTMKKNPIIYKDEPLKEVICYEEIFTIRKDISLDLKIEKVIDPKIREILQQRKKDFGGDAKKAFSDLEKNPIWLNKEKGIAIKRVTITGVSNAEPLHYKKDHLGNEILDQNGEKQAVDFVSTGNNHHVAIYQDKNGKLQENVVCFYEAVARVNEGLPIIDKEYNKHLGWEFLFTMKQNEMFVFPNDDFDINTIDFFDENNFAKVSKHLFRVQKIGSKDYWFRHHLETSVTNNLDFTYKRISSLKGIEGIIKVRINHIGQIVQVGEY

SEQ ID NO: 6470 - protein, 1415 aa, synthetic construct
  REGION 1..1415: note = Synthetic
MSKTILGLDLGTSSIGWALVKESDEADYNSEIVKLGVRVIQYDNFNVVERASGKVKDSRDPVQDFIAGKGLSPNAKRTKDRGARRNLQRFKLRRKNLIRILIENGIINENTPLTEIGKNTTHQTLWLRTQAAHNKIKIEDLARVLLSINKKRGYKSSRKSKGEEEGLAVDGMSIAKILYDQKLTPGEYVFQLLSEGRHFIPDFYRSDLRNEKIKIWDKQSKFYPDQLTNDLYRALEDKNKGTTWKILEGPWSLKGLKQTGTRDEQRLERYKWRKQSLSEQIDLEKLVIVLQEINGELSNSSGYLGAISDRSKELYFNKITVGEFLYNQIKKNPHISLKKQVFYRQDYLDEFECIWETQAKYYPKILTPKLKEEIRDVIIFYQRKLKSQKGLISFCPFESRHVEYIESTTGKTKTRIIGQRVAPKSSPVFQEFKIWQNLNNVVFIHEMSGEIIDLKRLDDAARSDIFVELNTRGNLTPKDIIQIISRHLYINKISDWKCNFEKIEGNSTNKALFDIYQQIAQAEGYGFDWAKKTATEIREELTSIFPLVGINKDILSFDINLESKDFERQPCYQLWHLLYSAEDESKSSEEDRITYGNNDTKLRKKLHEKFGFKPEYAIKLSNIPLQQDYGNLSTRAMRKIIPYLQAGHPYAKGSDNDTEVGACELAGYNHSKSVTAEELMNKILKEKLDILPKNSLRNPVVEKILNQMVNLVNQIIDEYGKPDEVRIELARELKKTSEEREKMSREIMDATKRNDDIKKLIIKEFQIPNPTKNDIVRYRLWDELKDRGYKTIFTDKYIPKEKLFSKEIDIEHIVPQALLFDDSFSNKTLAFKSENLQKNNRTAYDFIYQDYNSNKTTYEQNVEAWYNNGKGSISKAKRNKLLMPYKDIPEGFIERDLRNTQYISKKARHMLLEVFRTVVPTTGSITDRLREDWGLVNMMKELNLPKYRALGLTEFEDRFDIGLEKPKKVEVITDWTKRNDHRHHAMDALTVAFTTHNHIQYINNLNARRDTNHKQHYAICAIENVITQKRNGSRIFKEPIPNFRNVAKEAIESILVSYKAKNKVVTNNINKTKLSGKLRYKKSLQTTPRGQLHKETVYGKSLRPVAKPIKLNNRFSQEMAQLIIDSKEREAVLQHMSKYENNSNIAFALKTLKNDPILLNNEQLNEVGCFEVIFTIRKPITSDLQLDKVIDNGIRTVLEERLNKFNGNSKEAFSNLEENPIWLNKEKGIAIKNVTISGVSNAVPLHFRRDHLGKEILGNTGERADSDYVQTRNNHHVAIYKDTDGNLQESVVSFYEAVERANQGLPIIDKALNRHLGWEFQFTMKQNEMFVFPASDFDPSEIDLTDPENAILISKNLFRVQKLSTNYYTFRHHLETSVTNDLDFTYRRIRTPNGLKGIIKVRVNHIGKIVCIGEY

SEQ ID NO: 6471 - protein, 1413 aa, synthetic construct
  REGION 1..1413: note = Synthetic
MKRILGLDLGTNSIGWALVNEAGNEQETSSIIKLGVRVIQYDNFSKVDASGKVSESKNPTQDFAGGKSLTPNASRTQKRGARRNLQRYKMRRKNLIEILKFNGFIDSDTALTEIGKNTTHQTLSLRASASAKKIELEDLAKVFLTINKKRGYKSSRKAQNEEDGQAIDGMAVAKKLYDENLTPGEYVLTILKKDGKYIPDFYRSDLKEEFKKIWDTQKKIYPNILSSTLSDELQDKNKSQTWAICQKPFDIVGIKRTGTAQEKRLENYEWRVKALTEKLDLEHLAIVLQEINNNINKSSGYLGAISDRSKQLYLNRETVGQFLYKQLLKNPYTSLKNKVFYRQDYLDEFETIWSTQSKYHSELTEALKEEIRDVIIFYQRKLKSQKLLISFCQFESWEQEYIEQETGKSKSRRVGRRVIPKSSPLFQEFKTWQNLNHLVFTNPETKSRIEVKDLDAEIRQKLFEELNLRGDMTYKELLKILSEEMDIGKLSNWKSNFDKIEGNRTNAALFNVFQTISEREGYGIDWKKASAATIKEELKNTFPSIGISKNILDFKPLEDDFEKQAHYQLWHLLYATEEDDKISEEDRLIYGNSSVALKKKLQKKFGFKPEYATLLTNISFSQDYGNVSAKAIRNILPYLEDGDLYSESCARAGYNHSKSLNREDLKNRELKPKLEILKKNSLRNPMVEKILNQMVNVVNQIIDTYGKPDEIRIELARELKKSAKERAEMTKGITDGTRRNDEIRKLLTQKFGIPNPTKNDVIRYRLYQELESRGHKDLFTDTYIAPDKIFSKEIDIEHIIPKALLFDDSFSNKTLAFKKDNLKKANRTAYDFISQDYHLGLEAFVERIEAMHKDGKINRAKRNKLLMPLAKIPDGFIERDLRNSQYIARKAKEMLFEVVEDVVATTGSITDKLRNDWDLINVMKELNLPKYSALGLTEFEERLNKTTQKLKKHEVIKDWTKRNDHRHHAMDALAVAFTTRNHIQHINNLSARKDSTQDNHPLIKNIEANIKERNEKGKSVYKSPMPRFRESAKQHIESILISFKNKNKVVTQNINKTKTGKGQIKSKIQLTPRGQLHKETIYGKSKRPLEKPTKISKRFTLEEARLIINLKEREVVLNHLAQYNNNPQVAFDTKMLKNDSITHNGGLLKEVLCFEEIFTIRKDLNSDNFKNAKHIDKILDNTVKNALNARLKEYGNDYKKAFSDLDTHPIYLNKEKGIVIKRVRITGVSNAQSLHTAKNHLGESIFDENGQEIPVDFVSTGNNHHVAIYQDEDGELDDDVVPFYDAVIRKDQKLSIVKEKNQNGWPLLFSLKQNEMFIFPNENFDPLEIDLLDPSNQNLISPNLFRVQKISKVEYGNSAVRDYVFRHHLETEVNDVKELKDITWKPIKSLGHLDGIVKVRLNHLGNIVQTGEY

SEQ ID NO: 6472 - protein, 1410 aa, synthetic construct
  REGION 1..1410: note = Synthetic
MIRNILGLDLGVSSIGWAYVQEDSENSENNTIIKLGVRVNPLTVDEQLNFEKGKPITTNAGRTLARSARRNLQRFKLRRSNLIDVLKKNNIFRETDLLAEVGKNSTFQTQELRAKAAKEKIELSELARVLLLINKKRGYKSSRKAKNDDDGQIVDGMAVAKKLYEENLTPGEYSYQLLQQGKKQLPDFYRSDLQAEFDKVWDFQKQFNPEIFTNELYERLRGKNRNATWKELEIPFSLVGIKQTGTMQEKKSEKYFWRSEAVRKQSDFESLAVVFQEINSNLNNSSGYLGAISDRSKELYFNNQTVGEYLYHQLKINPHTKLKNQVFYRQDYLDEFEKIWEIQSKYHKELTKELKEEIRDIVIFYQRKLKSQKGLISICEFENREIEIAESGKTKKKTVGLKVAPKSSPLFQEFKIWQVLNNLQFQNIESKEIFPIDLDFKQSIFNEVNTKGRLSAKEVLDIVGYSGKEWKTNFKDIEGNNTNENLYNAFLRIIANEGIEFPKEFKLTIDDEIKVAKINSSAETIKLFVKEKLSELGINTSILDFNPELDGSDFEKQVSYQLWHLLYSYEGDDSPSGNEKLYELLEKKFGLKKEHSKILAEIGFPQDYGSLSSKAMRKIYPYIKEHKYSVACNYAGYHHSKNSLTKEQLENRVLKEQLEILPKNSLRNPVVEKILNQMINLVNFLIDEYSEKDNDGHIVKHFKFAEIRIELARELKLNAEERATMTSEINKATIQHQKYSEVLQREFGIKSPSRNDIIRYKLYLELANNGYKDLYTDVKIERENLFTEKYDIDHIIPQSRFFDDSFSNKVLVPRGANLKKGNFTAFDYLEIEGKEKLEKFLNIIKELYDKGVITKAKYEKLQKKGIEIGDGFIERDLRNTQYIAKKAKEILFGITNSVVSTSGRITDKLREDWNLVNTMKELNLEKYKKLGLTETIINSKGEEKQRIIDWTKRNDHRHHAMDALTVAFTTHSHIQYLNYLNARKDEKHKEHQNIFAIENTITKVIEKKNGSKERRFIEPIKNLRVDAKRHLDEVLISHKAKNKVVTKNINKIKKKGSVVAKTELTPRGQLHKETIYGRSKFLKTKEEKISGKFDLETIHKVQNETFRNALLGRLQEFGGDPKKAFTGKNVISKNLIFLNDDKTEQLPETVSLAWYETGYTIRKVVNPDNFKDYKNIEKVTDKRIRDILTERLKAFNGNSKEAFSDLEKNPIWLNKAKGIVVKTVTITGINNAEALHYKKDHLGKEILDENGKKIAADFVSTGNNHHVAIYEDADGNLQERVVSFYEAVERVNQGLTIINKDYNQDLGWKFLFTMKQNEMFLFPSEDFNPKEIDLFDDKNLSLISKNLFRVQKFGSLLSGFWFRHHLETSVEVNSKLKDISYKVIQSSNNLKPIVKVRLNHLGRIVQVGEY

SEQ ID NO: 6473 - protein, 1410 aa, synthetic construct
  REGION 1..1410: note = Synthetic
MTKNILGLDLGVSSIGWALVQENSKNPENNKIVKLGVRVNPLTVDEQINFEKGKPITTNASRTLARSARRNLQRFKLRRANLIDVLKKGNILKQGDLLTEIGKNSTFQTQELRAKSAKEKVELSDFVRILLLINKKRGYKSSRKAKNEDEGQIIDGMAVAKKLYEENITPGEYSYKLLQEGRKQLPDFYRSDLQAEFDKIWNFQKQFNPEIFTNELYKRLQGKNRNATWKELEIPFYLVGIKQIGTMQEKKIERYFWRSEAVKKQLDFESLAVVFQEINSNLNNSSGYLGAISDRSKELYFNNQTVGEYLYNQLKINPHTKLKNQVFYRQDYLDEFEKIWETQAKYHKKLTKELKEEIRDIVIFYQRKLKSQKGLISFCEFENREIEITVNGKTKKKTVGLKVVPRSSPLFQEFKIWQRLNDLEFKNVETKEIFPLELEHKEILFGNLNIKGNLSSKELIEQLGYPSKEWKCNFKEIDGNKTHENLYTAFLKIIANEGIEFPKEFKLSIDDDIKVSKIDVSSEKIKEFIKENFLKLGINTSILDFNPELDGKDFEKQESYQLWHLLYSYEGDDSASGNEKLYELLEKKFGFKREYSKILADVGFSQDYGSLSSKAMRKIFTYIKENKYSEACHLAGYNHSKNSLTKEQLANRILKEQLEILPKNALRNPVVEKILNQMINLVNEVIKEYGKPDEIRIELARELKKNAEERANMTSDISKATLLHQKYAEVLQKEFGIKAPSRNDIIRYKLYLELANNGYKDLYTNQKIEKENIFTDKYDIDHIIPQSRFFDDSFSNKVLVPRCANQDKDNYTAVDYIEKKYGERGKEDFLNRIHLVFKSKEAIAGKSESQISSMNTKFLKLQKKGSEIGEGFIERDLRDTQYIAKKAKEILFGITNSVISTSGRITDKLREDWNLVNTMKELNLEKYRKLGLTELIANSKGEEKERIIDWTKRNDHRHHAMDALTVAFTTHNHIQYLNYLNARKDEKHKEHHNIFAIENIITEIVEKKNGSKERRFKLPIKNFRTEAKKQLEEVLISHKAKNKVVTKNINKTKKKGGVVSKIVLTPRGQLHKETIYGSAKFLKTKEEKISGKFDLETINKVQNEKFKNALLDRLKEFNGDSKKAFTGKNVPAKNPIYLNEQKTEQVPESVVLAWYETGYTIRKAVNADNFKDYKNLEKIIDKGVKEILKNRLNAFNGNAKEAFSDLEKKPIWLNQSKGIAVKTVTITGINNAETLHYKKDHFGNELLDENGKKIPVDFVSTGNNHHVAIYEDADGNLQERVVSFYEAVERVNQGLSIIDKEYNQDLGWKFLFTMKQNEMFLFPSEDFNPKETDLFDEKNLNLISKNMFRVQKFGSLLSGFWFRHHLETTVDLNSSLKDTSYKVIQSCNNLKLIVKVRLNHLGKIVQIGEY

SEQ ID NO: 6474 - protein, 1410 aa, synthetic construct
  REGION 1..1410: note = Synthetic
MVKNVLGIDLGVTSIGWAFVHEDTNFGELSKIVQAGVRLVALSTDEQLEFEKGKPLSINANRTLKRSMRRNLQRYKMRRKQLIKLFKQYNIIPEDAILAEDGKHTTFETYELRAKAVHEKISLLQFARVLLMLNKKRGYKSSRKVQSEEEGQAIDGMDVAKKLFHDKITPGQYCLELLKNEKKSLPSFYRSDLQDEFMKVWNFQMAFHPSILTTDLLKKLDGVGQKATAAIFYKELNITTAEIKGKRDEKKLASYQLRSDAIQKELSIEEVAFVLAQVNNDINSSSGYLGAIGDKSKELFFNKQTVGEYLYKQLKENPHARLKNQVFYRQDYLDEFERTWSCQAQFHPELTNDLKKEIGDITIFYQRKLKSQKGLISLCQFEQQKRLVTKNGRQIIKTTGYRVCPKSSPLFQEFKVWQNLQNVEIKADGVKGRLSEEQKQLLFEHLNMKGELSKTEALKLLKLNPKTADMNFTKLEANRTNNTLYNVYCRILEDAGYDLADILKVKSDKDQITVSDSTLPAKEITRIIAEIFGSLGIKTSILDFDAQLDGKAFEKQDSYLLWHILYSYESDDSASGNEKLYQTLEKKFGFSKEQAKVLASISFEDDYANLSTKALRKIMPFIITNKYDEACALASYNHSNSLTKEEKESRKLEDRLELIPKNSLRNPVVEKILNQLVHVINAIIEDPNMGKPDEIRIELARELKKNAAEREEMSRQIAQADRDHKAIRDTIQKEFGIANPSRNDIIKFKLYEELSFNGYHDLYTNAYINRKELFSNKYDVDHIIPQQSLFDDSFSNKTLTPRDVNLNKGNRTAYDYIEQVHGAEKLEAFKSRVQDYLDKNIKANPGAKAKAKKLLMPASEIGDGFIERDLRNSQYIAKKARTILETICRDVVATSGSITARLREDWDLMNIMQELNLPKYRAINYTELRERKDGSQKEVIKDWTKRNDHRHHAMDAITVAFTKHNHVQYLNYLNARKNESHKMHGNIIAIEKKETEYIQDKDGNGKKRFKSPMPNFRVAAKKALEEILVSFKAKNKVVTNNRNRYKVKKLKEGVQYPPIQLTPRGSLHKETVYGILHRYNTKEETIGAKFNAELIETVANPKYKAALLQRLAANGHDPKKAFTGKNSPAKNPIYINGEGSEVLPAKVKVVKLEPEYTIRKDITPENFSDEKSIMKVIDVGIRNILLERLKASKDAKEAFSNLDINPIWLNKAKDGDPSKNIPIKRVTITGVSNAEALHHKRDHLGNHILDKEGNKQPVDFVSTGNNHHVAIYRDANGKLQDKLVSFYEAVERANQGLPIIDKSYNQGEGWQFLFTMKKNEYFLFPGDGFDPKEVDLLDPKNKTLISKYLFRVQKLADRYFVFRHHLEAKEDDNLTLKGMTFHRLQSLEPLDGIIKVRINHLGNIVKVGEY

SEQ ID NO: 6475 - protein, 1408 aa, synthetic construct
  REGION 1..1408: note = Synthetic
MKKILGLDLGTTSIGWAYVHEAENEKETSSIQKLGVRVNPLTVDEQINFEKGKPITTNATRTESRSARRNLQRYKLRREHLTKILTENNWISEASILTEIGNQSTFETFRLRNKAASEQISLEELSRVLLMINKKRGYKSSRKVNNTEDGQLIDGMAIAKKLYHEQLTPGQLSLELLQKGIKKLPDYYRSDLNEELDLIWSFQQKFYPDILTKAFKDNIKNKGSRATSALFWVTYNFNTAENKGTREEKKTQSYQWRVEALSKQLTKEEVAFVIAEINGQIHNSSGYLGAISDRSKILYFNKWTVGQYLYKQLQENPHTRLKSQVFYRQDYLDEFETIWNTQSKYYPTQLTSVLKKDIRDTIIFYQRKLKSQKGLISFCEFEQTQKLINGKVKIVGNRVIPKSSPLFQEFKIWQQLHNVTLRNKETNETCYLAEEQKVHLFEELNLKGKLTSTQVLKLIESKPKKWELNYSELEGNNTNKVLYNAYLDIIDDEGYDVRNELKIKLNKDDIELTDLDVDASQIKEMIYTIFKDLGIDTTILEFNALLEDKTFEKQQSYQLWHLLYSYEEDDSPTGLERLYTQLQNKFSFTLAQAKRLGNILFQDDYGNLSTRAIRKIFPFIKDNKYSDACNLAGYRHSKHSLTKEEIENRELKNKLDLLAKNSLRNPVVEKILNQMINVINTLIDSENNKLIAEGKKPNFQFDEIRIELARELKKNAKEREEFTNSINKGKTDHEKIIKILQKEDGIKNPSRNDIIRYKLYQELKNTGYKDLYTNEYIERKDIFTKEYDIEHIIPQSKLFDDSFSNKTLVRRNINLKKGNQTAYDFILTEYGKEKANDFEQRVTDLFNLGQSEGISRSKYKKLLMRENEIGEGFIERDLRDTQYIAKKAKSMLFDITRRVVSTSGRITDRLRDDWGLINVMKELNIPKYRDASLTEFIEMKDGNKKEVIIDWTKRNDHRHHAMDALTVAFTKHNHIQYLNNLNARKNENTEKHSNIIAIETKETHIVKDDLGNIKRVFKEPIPNFRQVAKQHLESVLVSHKAKNKVVTRNVNKIAGRKIGQQTLTPRGQLHKETVYGKIRQYASKEEKVGPKFGIETIQLVSNPTYKKLLLKRLEENNNDPKKAFGGKNALAKSPIYVNLEKNITIPEKVKLVWLEDNYTIRKEISPDLKIDKVIDEGVKRILQQRLKAYDNNYKLAFADLDRNPIWLNKEKGITIKRVTISGVKNALPLHTKKDHLGKPILDNKGREIPVDFINTGNNHHVAIYEDEKGNLQESVVSLFEAVSRVNQQLPIIDKTYNQHLGWKFLFSMKQNELFLFASDEFNPNEIDLFDKNNYHTISKYLFRVQKISTKNYMFTHHLETKAIDGETLKSKKALAEKNYYFVQTPEKLRNILKVRTNHLGEIIHIGEY

SEQ ID NO: 6476 - protein, 1408 aa, synthetic construct
  REGION 1..1408: note = Synthetic
MAKKILGLDLGVSSIGWAIVEEDAKNSMNNKIIKLGVRVNPLTVDEQINFEKGKPITTNAGRTLARGARRNLQRFKLRRLHLIDILQKNKILKQTDLLAESGGDSTFQTQEIRAKSAKKKVELSEFARVLLLINKKRGYKSSRKAKNEDEGQIIDGMAVAKELYEENTTPGEYSYELLKSGKKQLPDFYRSDLQAEFDRVWNFQKQFYPEIFSDNLYKELQGKNKNATWKILEIPFSLVGIKQVGTQQDKKIEKCFWRSEAVKKHLDFESLAVVFQEINSNLNNSSGYLGAISDRSKELYFNNQTVGEYLHCQLKENPHSKLKNQVFYRQDYLDEFEKIWETQSKYHVLLTKELKNEIRDVVIFYQRKLKSQKGLISICEFENREIEITENGKIKKKEVGLKVAPKSSLLFQEFKIWQVLNNLQFQNIESKEIFPIDLEFKESIFNEVNIKGTISAKAVLDVLGYSGKEWKTNFKDIEGNNTNENLYTAYLKIIANEGIEFPKEFKYNLDDDIKVSKISCSAGKIIEFVREKFSELGINTSILDFNSELEGTNFEKQDSYQLWHLLYSYEGDVSPSGNEKLYELLEKKFGFRKEHSIILADIGFPQDYGSLSTKAMRKIIPHLKAGLPFARKSDNDTILSATAMAGYNHSKSLTKEELAKRVLKEHLEILPKNSLRNPVVEKILNQMINVVNEVIKEYGKPDEIRIELARELKKNAEERANMTSEIGKATIQHQKYSEILQKEFGIKSPSRNDIIRYKLYLELSNNGFKDLYTDVQIKREELFTDKYDIDHIIPQSRFFDDSFSNKVLVPRGANLKKGNLTAFDYLESEGKDTLGKFTNTITEFYDKGIITKAKYEKLQKKGTEIGDGFIERDLRDTQYIAKKAKEILFGITNSVVSTSGRITDKLREDWNLVNTMKELNLDKYRKLGLTETVINSKGEEKEKIIDWSKRNDHRHHAMDALTVAFTTHNHIQYLNYLNARKNEAHNQHKMISNIENLITKVFEKKNGSKQRRFLEPIHNFRVAAKKHLDEILISHKAKNKVVTKNINKIKKKGSIISKIELTPRGQLHKETIYGSSKYLKTKDEKVSGKFDLETINKVQNERYKNALLERLKEFGDDSKKAFTGKNILAKNPIFLNIEKTEQLPEVLTLGWYEIIYTIRKSINSDNFKDYKNIDKVTDKKVRNILTDRLREFNGNSKDAFSDLEKNPIWLNKPKGIAIKKVTITGVNNVEALHYKKDHFGKEILDDKGHKMPVDFVSTGNNHHVAIYEDAVGNLQERVLSFYEAVERVNQGLSVIDNEYNSSLGWKFLFTMKQNEMFLFPSEDFNPQEIDLYDEKNLRLISKNLFRVQKFGELSKSGFWFRHHLETSVDVKKELRNFSYLDFYSKDFMKTIVKVRLNHLGKIVQVGEY

SEQ ID NO: 6477 - protein, 1408 aa, synthetic construct
  REGION 1..1408: note = Synthetic
MKKILGLDLGTTSIGWAYVHEAENENEVSTIEKIGVRVNPLTVDEQINFEKGKPITTNATRTLSRSARRNLQRYKLRREHLISILKENNWIKDNTLLAENGNQSTFETFLLRDKAATQQISLEELSRVLLMINKKRGYKSSRKVNNTEEGQLIDGMAIAKRLYHEQLTPGQLSLQLIKQGTKKLPDYYRSDLNQELDLIWSFQQKFYPEVFTPVFKELLKGKGLRATSTQFWTSYSFNTADNKGTRDEKRLQSYQWRADALTKQLDKEIVAFVIAEINGQIHNSSGYLGAISDRSKELYFNQWTVGQYLYKQLIDNPHTRLKNQVFYRQDYLDEFEKIWDTQSKFYPKELTPILKEEIRDTIIFYQRKLKSQKGLISFCEFEQEQKVINGKTKTIGQRVTPKSSPLFQEFKIWQQLHNVTLRNKETNEIINLAAEQKEHLFEELNLKGKLSNAQVLKLIEYKPKKWELNYSELEGNNTNKALYNAYLDIIDIAGYDIRNELKIKLNKDDIELSDLDVNASEIKEMIFSIFKHLGINTEILEFDATLEGKAFEKQASYQLWHLLYSYEEDNSPTGLDRLYDLLQKKFNFTLEQAKCVGNVLFQDDYGSLSSKAIRKIFPFIKENNYSSACEYAGYNHSKHSLTKEENEKRELKSRLTILTKNSLRNPVVEKILNQMINVINTLIDGENEKLVAQGKEPNFQFDEIRIELARELKKNAKEREELTKSMTQGKTDHEKFIKILQKEDGIKNPTRNDIIRFKLYNELKNNGYKDLYTNEYIKRQDIFTKEYDIEHIIPQSKLFDDSFSNKTLVRRNVNLKKGNQTAYDFILSEYGQEKANEFETRVTDLFSLGQTEGISKAKHKKLLMRENEIGEGFIERDLRETQYIAKKAKSMLFEITRFVVSTSGKITDRLRDDWGLINVMKELNLQKYRDAGLTEFIEMKDGNKKEVITDWTKRNDHRHHAMDALTVAFTKHNHIQYLNNLNARKNENAKKHSTIIAIETKETHIEKDNLGNRKRVFNEPIPNFRNIAKAHLENVLISHKAKNKVVTKNINKISGQKVGQQTLTPRGQLHKETVYGKIRQYVSKEEKVGPKFTVDIIEQVSNPTYRNLLLKRLEENNNDPKKAFGGKNALNKTPIYISLEKDTKVPEIVKLVWLEDDYTIRKEVSPDLKIDKVIDEGVKRILQQRLKDYDNNAKTAFSDLDKNPIWLNEEKGIAIKRVTISGVKNALPLHIKKDHLGQPILDNKGREIPVDFISTGNNHHVAIYEDENGKLQESVVSLFEAVERVNQQLPIIDKTLNQHLGWKFLFTMKQNELFLFPTDDFNPKEVDLFDKKNYAVISKHLFRVQKISTKNYMFTHHLETKAIDGETLKNKKTLAEKVYYSIRTPENLINIIKVRTNHLGEIVHIGEY

SEQ ID NO: 6478 - protein, 1408 aa, synthetic construct
  REGION 1..1408: note = Synthetic
MTKNILGLDVGVSSIGWALINEDIENPKNNKIIKLGVRVNPLTVDEQINFEKGKPITTNAGRTLARGARRNLQRFKLRRFHLIDILQKNNILKQADLLAEVGKNSTFQTQEIRAKSAKQKVELSELARIFLLINKKRGYKSSRKAKNEDEGQIIDGMFIAKKLYDEKLTPGEYSYQLLKESKKQLPDFYRSDLQSEFDKIWNFQKQFYPENFSDNLYKELQGKNKNATWKTLEIPFSLVGIKQTGTLQEKKLEKYSWRSDAVKKQLDYEKLAVVFQEINSNIYNSSGYLGAISDRSKELYFNNQTVGEYLYNQIKENPHTKLKNQVFYRQDYLDEFEKIWETQSKYHTTLTKELKEEIRDIIIFYQRKLKSQKGLISICEFENREIEIKENGKIKKKTVGLKVAPKSSPLFQEFKIWQILNNLQFQNIESKEIFPIDLDFKESIFNEVNIKGRISAKAVLDLLGYSGKEWNPNFKDIEGNNTNENLYNAYLKIIADEEFELPKEFKLNGDDDLYVSKIACSASKIKDFVKEKFSEIGINTSILDFNPELEGKDFEKQASYQFWHLLYSYEGDDSQSGNEKLYELLEKKFGFKKEHSKILSNIGFPLDYGNLSTKAMRKIIPHLKAGLSFAKKSKEDNILSATAMAGYNHSNSYTKEDLAKRVLKEKLEVFPKNSLRNPVVEKILNQMINLVNEAVEEYGTIDEVRIELARELKKNAEERANMTSEIGKATLLHQKYAEILKKEFDIPVPSRNDIIRYKLYLELANNGYKDLYTDVQIKREELFTNKYDIDHIIPQSRFFDDSFSNKVLVPRGANLKKANQTAFDYLENEDKQKLEKFLNIIKNLYDKGEITKAKYEKLQKKGSDIGEGFIERDLRDTQYIAKKAKEILFGITHSVISTSGKITDKLREDWNLVNTMKELNLDKYKKLGLTETLLNSKGEEKERIIDWSKRNDHRHHAMDALTVAFTTHNHIQYLNYLNARKDEDHKQHKVISNIENLITKVFEKKNGAKQRRFIEPINNFRVDAKKHLDEILISHKAKNKVVTKNINKIKKKGSVVAKTELTPRGQLHKETIYGSSKFLKTKDEKISGKFDLETINKVQNEKYKNALLQRLREFGEDSKKAFTGKNVISKNPIYLDEEKTLQIPESVTLAWYEMIYTIRKPVNPDNFKDYKNIDKVTDEKIRAVLTDRLRKFNGNSKEAFSDLEKNPIWLNKSKGIAIKTVTITGMSNVEALHYKKDHLGKEILDKKGDRMPVDFVSTGNNHHAAIYEDAKGNLQERVVSFYEAVERVNQGLSVVNKDYNAGLGWKFLFTMKQNEMFLFPSEDFNPKEIDLYDEKNLKLIAKNLFRVQKFGELSKSGFWFRHHLETSVDVKKELRNYSYLDFYSKDFMKTIVKVRLNHLGKIVQVGEY

SEQ ID NO: 6479 - protein, 1407 aa, synthetic construct
  REGION 1..1407: note = Synthetic
LIYNSFCRKKVIYLVENVKHTSMKKILGLDLGTNSTGWALVNEAENTAEKSSITKLGVRIIKYDNFVNTETGSESKEPEKDFCGGKGISPNAGRTKGRSARRNLQRYKLRRANLIEYLKKCGLITDSAVLCENGNRTTFQTYRLRAMAVTEEISLEELSRVFLMINKKRGYKSSRKAKLPDEGQLIDGMAVAEQLYENDLTPGQFVFSILQQGKKSIPEFYRSDLQNELNRIWDHQKQFYPEILTDEFRKQIEGEGRPNTAKMFLGKYKIYTADIKGKDKRLQAYQWRSNALTSQLSIDEVAFVVSELNGAINNASSYLGAIGDRSKELRFNKLTVGQYLMKQLDKDPNYSLKNQVFYRQDYLDEFEAIWEKQAQYHPELTPELKKDIRDIIIFYQRPLKSQKGLVSFCEFESRQIEVNVDGKQKLRTIGCKVCPKSSPLFQEFKIWHTLHSLIVKEKKTNAERFLYQEEKETLFAELNIKETLSKLDALKLLYKNYKDLDLNYDKIEGNRTQAALFKAYQTIISMTGHGEYDFSKMMSDEVMEIVEGVFSGLGYNTNILHFDAENELFDKQPMYMLWHLLYSYEGDKSSTGNKSLIDKIFKLCGFEKEYASIIANIIFQPDYGSLSTKAIRKILPRMKEGNEYSLACEYAGYRHSQRSLTKDELDNKVYKDHLDLLPRNSLRNPVVEKILNQMINVVNFVVDAYGKPDEIRIELARELKKSSKERKEMTMAINKTTADHEKYRQILQKEFGLTNVTRNDIIRYKLYLELKSNGYKTLYSNTYIPQEKLFSKEFDIEHIIPKAKLFDDSFSNKTLESRRVNIEKSNLTAYDYVLGVYDEKGINDYEIRIENLYKSGIISKAKRDKLMMKEVDIPSGFIERDLRDSQYIAKKAREILEELVKFVVPTTGTITDRLREDWQLIDVMQELNWEKYDKLGLTEIVKDKDGREIRRIKDWTKRNDHRHHAMDALTVVFTKRSYIQYLNNLNARSDKSGSIYAIEQKELYRDKHGKLRFNPPMPLDVFRAEAKRQLENTLISIKARNKVLTQNVNITKTKKTESGYRKKVQLTPRGQLHNETFYGAIKWYVPKLESVGSGFNVEQIALVANKRYREALLTRLAACGNDPKKAFTGKNSLEKNPLYLDELHTQQVPTKVKTVTLETVYTTRKDISSDLKIEKVIDRKVRSILKERLKEFGGDPKKAFSNLDANPIWLNKEKGISIKRVTITAVSKAEPLHAKRDHFGKYILDANGAKQPVDYVNTGNNHHVAIYRDEKGVLQERVVSFYEATASASVGLPVVDKEYRKSEGWTFLFSMKQNEYFVFPNEKNGFNPNEIDLMDPDNYALISPNLFRVQKITSKDYVFRHHLETTVEDRKELQNITWKRFQSLTNLDKLVKVRVNHIGQIVSVGEY

SEQ ID NO: 6480 - protein, 1407 aa, synthetic construct
  REGION 1..1407: note = Synthetic
MIRNILGLDLGVSSIGWAYVQEDSKNSENNRIIKLGVRVNPLTVDEQLNFEKGKPITTNAGRTLARSARRNLQRFKLRRSNLMDVLKKNNILKETDLLAEVGKNSTFQTQELRAKSAKEKIELSEFARVLLLINKKRGYKSSRKAKNDEDGQIVDGMAVAKKLFEENLTPGEYSYQLLQQGKKQLPDFYRSDLQAEFDKIWDFQKQFNPEIFTNELYEKLQGKNRNATWKELEFPFSLVGIKQTGTMQEKKVEKYFWRSEAVKKQLDFESLAVVFQEINSNLNNSSGYLGAISDRSKELYFYNQTVGEYLFQQLKTNPHTKLKNQVFYRQDYLDEFEKIWETQSKYHKELTKELKEEIRDITIFYQRKLKSQKGLISICEFENREIEITENGKTKKKTVGLKVAPKSSPLFQEFKIWQVLNNLQFQNIETKEVFPIDLDFKQSIFDEVNIKGKLSAKDVLDLVGYSGKEWKTNFKEIEGNYTNENLYTAFLKIIASKEIEFPKEFKITIDDEIKVSKINASAEIIKLFVREKFSELGIDTSILDFNPELEGSDFEKQASYQLWHLLYSYEGDDSSSGNEKLYELLENKFGFKKENSKILAEIGFSQDYGSLSSKAMRKIYPYIKEHKYSVACSYAGYNHSKNSLTKEQLENRILKERLDILPKNSLRNPVVEKILNQMINLVNCLIDEYSEKDKDGQIVKYFKFDEIRIELARELKLNAEERATMTSEINKATIQHQKYAEVLQREFGLKAPSRNDIIRYKLYLELANNGFKDLYTDAKIERENLFTDKYDIDHIIPQSRFFDDSFSNKVLVPRNANLKKGNFTAFDYLEIEGKEKLEKFLNIIKDLYDKGAITKAKYEKLQKKDFEIGDGFIERDLRNTQYIAKKSKEILFGITNSVVTTSGRITDKLREDWNLINTMKELNLEKYRKLGLTETVINSKGEEKQRIIDWTKRNDHRHHAMDALTVAFTTHNHIQYLNYLNARKDEKHKEHQNIFAIENLITEIIDKKNGSKERRFKEPVKNLRAEARKHLDEILISHKVKNKVVTKNINKIKKKGSVIAKTELTPRGQLHKETIYGSSKFLKTKEEKISGKFDVETIQKVQNERYRNALLKRLQEFGGDSKKAFTGKNVISKNPIFLNNEKTEQLPETVTLAWYEMGYTIRKAVNPDNFKDFKNIEKTIDKGIRDILTKRLKEFNGNSKEAFSDLDKNPIWLNKSKGISIKAVTITGINNAEALHYKKDHLGKDFLDENGKRIAVDFVSTGNNHHVAIYEDENGNLQEKVVSFYEAVERVNQNLPIIDKEYNSESGWKFLFTMKQNEMFLFPSEDFNPKEMDLFDEKNVNLISKNLFRVQKFTIKDYFFRHHLETNVEDSSPLKGITWKREGLNGIENILKVRLNHLGKIVQIGEY

SEQ ID NO: 6481 - protein, 1406 aa, synthetic construct
  REGION 1..1406: note = Synthetic
MKTVLGLDLGTNSIGWALVKEASNDKEKSSIVKLGVRVIQYDTFSKIDKSGKVSESKNPIEDFATGKGLSPNAARTLKRGARRNLQRYKLRRKNLLEILLKNNIIQNDTALTEVGKDTTHQTLKLRAKSAKEKVELEEFARILLAINKKRGYKSSRKVSNEDEGQVIDGMSIAKELYEREITPGQYVLELLNNGKKYIPDFYRSDLQNEFDAIWEFQKQFYPDILDDNLYNSLKNQGKQNTQKRFLAIKQIYTAENKGSRDEKKIEAYGWRANAIKENLTIEQVAFVLVEINNELKKSSGYLGAISDRSKELLFNKLTVGEYLYNQIHENPHTSLKSQVFYRQDYLDEFEKIWEIQAKFYSVLTKELKEQVRDVIIFYQRKLKSQKGLVSFCQFESWEIDNKDKYGELVFNKLSGLPKKITIGQKVIPKSSPLFQEFKIWQNINNLEFRKIKGKQTNDKDFYVLDEEDRNLLFQELNVRGKLTEKELFKLLGLKSKEWKTNYTESGLEGNRTNEALYNIYQAIALNAGYGHDWNKKNAKEIKEELEEVFPSLGINVNILNFDALIEGNEFEKQESYQLWHLLYSIEEDDKVSKEDRLIYGNNSVTLKKNLCKKFGFTPEQANLLASVSLQDDYGNLSTKAIRKIMPYLAEGMNFYEASKEAGYNHSNSLSKEDNDKRVLKNKLDILPKNSLRNPVVEKILNQVINLVNQVVDKYGKPDEIRIELARELKKSAKEKADAVKFINSNTSLNEDVRNIIKKEFGFVPTRNDVIRYKLWMELKDNNYKSLFTNKYISKDKIFSKEIDIEHIIPKALLFDDSFSNKTLAYRNVNLKKGDRTAIDFITEDYASEKEQYLGRVESLYQSNAISRGKYKKLQMTKEKLPEDFIERDLRNSQYIAKKAKSILQDLIRNPIVSTTGRITDELRNDWDLVNVMKELNLPKYRSLGLTEKQTRWDVGQEKEKEVEVISSWTKRNDHRHHAMDALTVAFTTHNHIQYINNLSARKNQNSDMHKTILNVEKKIKHKNENGKNVFISPMPNFRKEAKRHIESILISFKPRNKVVTQNINKTSKKKGVNEKIQLTPRGQMHKETVYGKIKRPLSKPVKISKKLNLEQAELIIDKQIRQLVLDHLLKYRNDPTKAFDTKTLKKDPIVWNNSELKHIKCFEEIFTIRKDIGPDLKIDKVIDPKIKSILQNRIKEMGSAKDAFTDIEKNPIWINKDKGICIKRVTITGVSNAEALHSAKDHFGKEIIDEEGSTKAVDFVSTGNNHHVAIYEDENGDLHEEVVPFYEAVARVNANLPIINKEHKNGWRFLFTLKQNEMFIFPNEEKMFDPNGIDLEDEKNYYEISPNLFRVQKIGSKDYWFRHHLEATLNDIEDVTYKRKRNPKSIGNIIKVRLNHLGEIVRIGEY

SEQ ID NO: 6482 - protein, 1406 aa, synthetic construct
  REGION 1..1406: note = Synthetic
MKKILGLDLGTNSIGWALVNEAEDDNEKSTIIKLGVRVNPLTADEKTNFEKGRPLSTNADRTLKRGARRNLQRYKQRRKHLVNILIKNGFITKDSPLTEIGKDTTFQTLKLRAASAREKVSLEDLARVLLTINKKRGYKSSRKAQNEEDGQLIDGMAVAKKLYETHKTPGQYVHYLLKNNKKYIPDFYRSDLQTEFDAIWNVQKTFYPTILNDELYNNLQGKNKSQTWAICQKPFNIEGIKLKGTANEQKLQRYQFRVNALTQSLELEHLAIVLQEINNNLNNSSGYLGAISDRSKELYFNKETVGENLYKQLQKNPHISLKNQVFYRQDYLDEFEQIWETQAKYHSKLTLDLKKEIRDTIIFYQRKLKSQKGLLSFCQFENWQQEYIEKETGKSKTRTIGNQVISKSSPLFQEFKIWQNLNNLIFKNSINNEVIEVTKLDDDVRNILFEELNLRGDLKPNNILKLLSRFLEVGKVSEWKCNFEKIEGNLTNKTLYNSYQQIADNEGYGFDWAKKTAKEINEELKAIFTEININPSILDFNAEINGKDFDKQPSYQLWHLLYSAEDDSKINEEDKLIYGNSNVALKKKLHLKYGFKPEYAAMLANIALQSDYGNLSSKAIRKIYPYLKSGNAYSDACKLAGYNHANSLTTKELENRKRKSKLELLKKNSLRNPVVEKILNQMVNVINQVVDAYGSPDEIRIELARELKKSAKERSEMTKNIADATRRNEDIKKTISKEFGIPNPTKTDVVRYRLWLELESRGFKSLFTNQYIPKEKLFSKEIDIEHIVPKALLFDDSFSNKTLAYRDINLKKRDRTAFDFISQEYQSNIESYKERVESLYDNGKGVITKAKRNKLLLSQAKLPEGFIERDLRNSQYIAKKAKQMLFEVFEKVTVTSGSITNKLREDWGLINVMKELNLQKYRELGLTKIEERWDIGQEKIKSAEVIKNWSKRNDHRHHAMDALTIAFTSQNHIQYLNNLNTYYNLRGNETDLEKSKLFALKNSITRIYKEDNGKDKRKFIPPIDNFRSEAKKHIESILISFKNKNKVATKNINKIKLKNKDNYYSKIQLTPRGQLHKETIYGKSKRPMEKSIKINKHFTSEQVEFIINKEIKNCILNHLAKYDNNPEVAFDTKTLKKEPLLYKGISLKEVHCFEEIHTIRKDINPDNFKDKKNISKVIDGKIKQLLLNRLAAYNGNSKEAFSDLNKNPIWLDKTKGIQIKRVTISGINNAEALHHKKDHLGKEILDINGRPQAVDFVSTGNNHHVAIYRDKNGKLQEKIVSFYEAVISVNSKLPIVDKEFNKNLGWEFLFTMKQNEMFVFPDDNFNPNEIDLLNENNYALISPHLFRVQKIATKNYFFRHHLETTVETQKELKGMTYKPQLGLNAIEGIVKVRINHIGKIVQIGEY

SEQ ID NO: 6483 - protein, 1406 aa, synthetic construct
  REGION 1..1406: note = Synthetic
MIKNILGLDLGTNSIGWAFVKETVNNTKQSIIEKIGVRVNPLTTDEQTNFEKGKPITTNAGRTLARSSRRNLQRYKLRRDNLIKILKENKWITDETILAENGNQTTFETFRLRALAAEENLNLSDLSRVLLMINKKRGYKSSRKVNNTEDGQLIDGMAIAKKLYEENLTPGQYVHDSLKSGNKRIPDFYRSDLQNELNAIWEYQKQFYLELLTDNLKEELNGKGKIATWTTLKVPFSLESIKREKKRDELKFENYQWRNDALQQQLNLEQLTIVLQEINTQIYNSSGYLGAISDRSKELYFNQQTVGQYQYLQLKNNPHARLKAQVFYRQDYLDEFEKIWEVQAKGREDVLTNNLKEDIRDVIIFYQRKLKSHKGLISLCEFEQKEIIINGKKKNVGLRVIPKSSPLFQEFKIWQKLHNVKLKNKETKEVFTLNEQDKIMLFEELNLKGNLAADKVLALLYDKPKEWELNYKELDGNRTNQALYNAYLSILDNEKCDIRGALKLKLNKDEILINDVEIPSFEIKALMESIFEKNNIDSSVLSFNAELEGKEFEQQSSYKLWHLLYAYEEDDSLTGMDTLYRLLMHKFGFELEQAKVIGNIAFQDDYGSLSAKAIRKIFPYIKESEYSKACEYVSIEYNLPNYRYSKNYLSKEEIDKRVLKERLDVLSKNSLRNPVVEKVMNQMINVVNTLIDTENDKLEEKGKPRDFRFDEIRIELARELKKSAKEREELTKQINSAKLAHDKIVKILQTQDGIKFPTRNDIIRYKLYQELKNNGYRDLYTNQYINREDIFTKKYDIDHIIPQSRLFDNSFSNKTLVPRNINLAKGNKTAYDYILDVFGIDKLNEFKKRVEALYNEKEDGISKAKNKKLLMTGNEIGEGFIERDLRDSQYIAKKAKEILFQIAKIVVSTSGSVSDRLREDWGLVSLMKEINLEKYQNSGLTETQKTKDGRLKEVIVGWSKRSDYRHQAMNALTIAFTKCAFIQYLSNLNSRKNKDAEKHETIIEIEKKETHYKVDEKGNKKLVFNEPMPNFRKVAKQHLESVLVSHKPKNKIVTRNINKIKGSDKIQITLTPRGQMHKETVYGKIKQPVIKEEKVSAKFNEETIQKVSNPTYRALLFHRLKKNDYDPKKAFAGKNTLSKNPILLEDGSQLPEKVKLTWLEDYYTIRKEVSPDLKLDKIIDEGVKRILQQRLNLFNGDAKKAFSDLDQNPIWLNEEKGIAIKRVTILGVKNAESLHVKKDHLGKEILDNEGNFIPVDFVNTGNNHHVAIYEDEKGNLQEKIVSFYEAVARVNQNLPVVDKQYNQHLGWSFKFTMKQNEMFVFSSDDFNPLEIDLLDKTNQPLISKHLYRVQKIATKDYFFRHHLETKVDDVNELKNITWKREGISGVKNIIKVRTNHLGDIVEVGEY

SEQ ID NO: 6484 - protein, 1405 aa, synthetic construct
  REGION 1..1405: note = Synthetic
MKTILGLDLGTNSIGWALVKEAENSNEKSEIIKLGVRVNPLTVDEKTNFEAGRPLSTNADRTAKRSARRNLQRYKLRRKNLIDLLIKNQLIDKDTPLTEIGKNTTHQTLELRAKAARERIELEDLARVFLAINKKRGYRSSRKVNNEEEGQAVDGMAVAKKLYDENLTPGQYAYELLSKGKKYVPDFYRSDLQAEFNAIWEYQKQFYADILDDELYNALKGQGQQNSRKRFLAIKGVYTAENKGKRDDVKLRHYKWRSEAISKKINIEEVAYVLVEINNDLNKSSGYLGAISDRSKELYFNKETVGENLWKQIQKNPHTSLKNQVFYRQDYLDEFEQIWETQAQFHPQLTLALKEQIRDVIIFYQRKLKSQKGLLSFCQFESWEIERKDENGNVILNKTTQLPKRQTVGRRVAPKSSPLFQEFKIWQNINNLEVTKISEGASKNKKETETLSDDERKLLFEELNLRGNLSQKEVLQILGLKDKEYKTNFSEGLEGNRTNAALFNIYQQIAENEGYGFDWSKKSAQEIKEELKAVFPQIGIQADILDFNANLDGKEFENQASYQLWHLLYSAEEDDKINEEDQIIYGNSAVSLKKKLCEKFGFTPEYAKWIANVSLQDDYGNLSTKAMRKIIPYLIDGNDYSEACALAGYNHSNSLTKEENDNRELLDKLELLPKNSLRNPVVEKILNQMVNVVNQVIETYGKPDEVRIELARELKKSAEKRAEMTKSINEATRRNEDIKKLITKDFGIPNPTKSDVVRYRLWEELAPLAYKDVFTGKQIKKEDLFSSKIDIEHIIPKALLFDDSFSNKTLVFRETNLKKADRTAYDFIESDYNATLDDYIQRVETLYNNTKGTISKGKRNKLLMAQKNLPDGFIERDLRNSQYIAKKAKAMLYQVFKDVNVTSGSITDRLREDWDLINVMKELNFPKYKALGLTEIEERYDIGQEKTKRVEVITDWTKRNDHRHHAMNALTVAFTTSSHIQYLNYLNARKNESHKEHKNIKGIENKITHKQKDKRKFIPPMPNFREEAKKHIETILVSIKNKNKVYTKNINKTKKKSGHNTKEQLTPRGQLHKETVYGKSKRPMSKPTKINKNFSLEQAQLIINVQEKELVLRHLAQFDNNPAVAFDTKTLKKMPLLKNGEPLKEVLCFEEIFTIRKDITPDLKIEKVVDEKIKAILEQRKKDFGGNAKEAFSDLDKNPIWLNKKKGICIKRVTITGVSNAEALHHQKDHLGREILDDNGNPIPADFVSTGNNHHLAVYLDSEGKLQDNIVSFYEAVVRTSQGLPVVDKGLNKDLGWKFLFSLKQNEMFVFPNDDFDINDFDLLDDKKAELISKHLYRVQKISKVSAGNSFVRDIVFRHHLETTVKEVKELKDISYIQLKSLEGLRNIKKVRINHIGKIVQVGEY

SEQ ID NO: 6485 - protein, 1405 aa, synthetic construct
  REGION 1..1405: note = Synthetic
MKHILGLDLGTTSIGWALVKEAEDTNEKSSIVKVGVRVNPLTVDEQTNFEKGKPITTNAVRAQARSARRNLQRYKLRRENLVKILIENHIIDSSTILAENGKNTTFQICELRAKAAQEVLSLTDFARVLLAINKKRGYKSSRKVNTTEDGQLIDGMEIAKKLYEDHLTPGQYVYQNSINKKFSIPEFYRSDLENEFLRVWEFQKQFYSEILTDELKENIKGRNKTQTWAILKESLQLVGIKRDKKGKELRLENYQWRNDALVLQLNLETLAIVLQEINGQIAGSSGYLGAISDRSKELYFNKQTVGQYLYSQLQKNKHARLRGQVFYRQDYLDEFEKIWEVQAQQHQELTSELKEKIRDVIIFYQRKLKSKKNLISLCEFEQREIKDKNGKARTVGLRVAPKSSPLFQEVKIWQQLHNVKIKHKKTGEELDLCQEDKNLLFEELNLKGYMSAEQVLNILGKGKEYKLNYKVLEGNLTNEQLYNKYLDILDLSGYDLRKNFKVSTGKEEVNLKDIKLDAHEIKNTVQAIFEDLGIDTEILNFHSEWEGEQFQKQPAYQLWHLLYSYNEDDIPPEIKKESRTGMEYLYVQLHKKFGFTLEQAKRLGTVVFKDDYGSLSTKALKKISVYIKENDYAQACALAGYRHSKNSLTQEELAQRKLKDRLENLPKNSLRNPVVEKILNQMVNVVNTILDSENDRLEAQGQERNFKLDEIRVELARELKKNAKEREELSKQVESAHKYHQKIIEILQQAPFHIKNPSRNDIIRYKLYQELKINGYKDLYTNQYIEPQNLFSNLYDIDHILPKALLFDDSFSNKTLSPKKINRDKSASTAYDYILNNYGPQGLEDFIARVENLYKAKERGITEAKYKKLLKKATEIGDGFIERDLRDTQYIAKKAKDLLFQITPTVVSTTGSVTQKLREDWGLLNVMKELNLPKYRQAGLTEIIDNKKGEQIIDWTKRNDHRHHAMDALTVAFTKPSHIQYLNYKNARSNENHPFHPIITAIEDKELIKVKSKSGKNKSLFKEPLPNFRQQAREHLETVLISHKNKNKVVTKNKNKIAGNSKIQDTLTPRGQMHKETIYGKIKQCVYKEYRINASFDEPTILKICNSLHRNLLLKRLKENNNDPKKAFTGKNSLSKNPIYLDDDKKETLPDKVKLRELEERFTIRKNVDPKLNIEKVVDEGIKQILKQRLLDYGNNPKVAFSNLDENPIWLNKKKNKALRRVTIFGVINAEPLHTKKDHLGKEILNEKGHPIPVDYISTGNNHHVAIYRDEKGNLQEKVVSFMEAVERKNQHLPVIDKTYQQDLGWTFLFTLKQNEMFVFPSEDFHPAEINLLDKKNYHLISKHLFRVQKLTTKEYYFRHHLETNVETHAKTKDLTWKRVGLSGIENIVKVRLNHLGEIVQTGEY

SEQ ID NO: 6486 - protein, 1405 aa, synthetic construct
  REGION 1..1405: note = Synthetic
MKKVLGLDLGTNSIGWALVKEAEEKNEHSSIIKLGVRVIRYDNFNKVDKVGNVSESKNPIDDFKSGKGLSPNAKRTKSRSARRNLQRFKLRRKNLIEILVKYSIINKDTLLTESGKNTTHQTLELRSKSAKEKIPLEAFARVLLAINKKRGYKSSRKVKSEDEGVSVDGMAIAKEIYEKQLTPGHYVYKSLQNGKKYIPDFYQSDLQAEFDTVWNKQKHFYPATLTDEFYKKLKGQGQQNSRKLFLAVHQVYTAENKGKRDEKKLQHYKWRSEAITKQLSIEEVAYVLVEINNNINKSSGYLGAISDRSKELYFNNETVGEYLYNKLLENPHVSLKNQVFYRQDYLDEFETIWETQAKYHKELTNKLKEEIRDIVIFYQRKLKSQKHLISECQFEKHHKVIPKSSPLFQEFKIWQNLNHLVFKNTQTKEEVSFVDLDEETRHLVFEELNLKGSLKMKNVKNIIGFKAPNYWKANFDDIEGNRTNEGLFNAYKAIAEDLGYGFNWEKKTAYEIKTELKAIFVEAKINTDILQFDTDTEGNTFDKQKSYQLWHILYSAEDTDKASEEDKLVYGNIHTKLKKKLNQKFGFEATYGSLLTNISFQQDYGNLSAKAIKKILPHLKSGNSFSQACALNGYNHSNALTKEESENRNLKDKLTILPKNSLRNPVVEKILNQMVNLINQVIDAYGKPKEVRIELARELKKSAKQRDELTKHINDATLINQNIRVILQKEFGVKHPTRNDIIRYKLYEELKDNGYKTLFTNQYIPRERLFTGETEIEHIIPKAILFDDSFSNKTLAYSDVNRKKGDSTALDFIANIYSDELENYKARVEALHKAKKISKGKYKKLLMARKDLPNDFIERDLRNSQYIAKKATQMLQEVFRTVTPTSGRITDKLREDWNLINVMQELNLPKYKTLGLTETQERKKGNTVERIIDWTKRNDHRHHAMDALTVAFTTNRHIQYLNNLNTAHGLDGSEIDHEKSKLYRIKKDITKLYKSGNTQKRKFIPPSNNFRSEAKKHLETILISFKNKNKVVSKNKNRIKTGEKGVTYEKVQLTPRGQLHKETVYGHVKKEIITTEKVSNKFTIEKIQWVTKPSYRKALLKRLETYENNPKKAFSGKNSLQKNPLYIDSISGKKVPESVKLKSFQDVYVIRKEVNPENFTNSKSLEKIIDVGIRRILQKRLEKYGEKAKEAFSNLDKNPIWRDDKKKVAIKKVRIEALKNAESLHTKKDHTGHEMLNETGKNTPVDFVSTGNNHHVAIYCDSDGKLHDEVVSFYEAVSRVNLGIPIIDESLNSHLGWKFLFTMKQNEMFVFPSDEFNPKEVDLENPKNNKFISKHLFRVQKFSKVTYGNSAVRDYVFRHHLETELIDKKELKGIAYYQLKSIGMLEKLVKVRINHIGKIVQVGEY

SEQ ID NO: 6487 - protein, 1405 aa, synthetic construct
  REGION 1..1405: note = Synthetic
MTMAERTLGLDLGVSSIGWALVEEDVKNPENNKIIKLGVRVTPLTIDEKTNFEKGKSITTNAGRTSARSARRNLQRFKLRRQNLLDILIEHKIIKHDAILAEIGENSTFQTQYLRAKAAKEKIELDELARVLFLINKKRGYKSSRKVQNDDEGKAIDGMSVAKELYEKNYTPGQYAYDLLNKGKKQIPDFYRSDLQNEFDRVWEFQKQYHPDILTDEFKKELDGKGQRATTAIFLNRYKIYTADNKGTREEKRFQAYQWRVEALSQPLDIKEVAYVITEINNNLNNSSGYLGAISDRSKKLYFNGQTIGEYLYEELSVNPHTRLKNQVFYRQDYQDEFEKIWETQAKFHPELTKKLKEEVRDVVIFYQRKLKSQKGLISFCEFESREIEIEENGKKKKKRVGLKVAPKSSPLFQEFKIWQVLNNIEIKSEDERRYLDPEEKELLFNELNYKGNFTSQKCLELLGFKSKETKLNFKVVEGNRTNEKLYDAFLKILELEGYNIFELLKIKEDKDEAKLSELKSSAEEIKEMIREVFHANLIDTSILDFNAELEGKDFENQASYQFWHLIYSYEGDDSPTGNEKLYELLEKKFGFKKEHSRILSSIVFPQEYGSLSAKAMRKIYPYIKDNKYSEACLLAGYNHSKHSLTKEDLENRKLKDKLEILPKNSLRNPVVEKVLNQMINLVNATISEYGKPDKIRIELARGLKKSAQEREDMTKSINEATLLHQKYAVTLKQEFGVVNPSRNDIIRYKLYMELASNGFKDLYTNSKIEKENLFTDKYDIDHIIPQSRFFDDSFSNKVLVPRQANLDKGNLTGYDFMSNKGTEREEHFLNVIKDLLDKGSITKAKYEKLKKKGTEIGDGFIERDLRDTQYITRKAKEILFDITNSVMTTSGKITEKLREDWDLVNIMKELNLEKYRKLGLTDVIKNSKGEEKEVIQDWTKRNDHRHHAMDALTVAFTARNHIQYLNYLNARKDEKHKEHQNIYAIENIITEVIEKKNGSKVRRFKSPMSKFRNEAKKHLKEVLVSHKTKNKVVTSNINKTKKRGGLQKKTELTPRGQLHKETIYGSRKFLQTKEEKISAKFDYQTILMVINPVHRNALLKRLKEYGNDPKKAFSGKNAVNKNPVYLSDSKIEALPEKVTLSWFETGYTIRKAVTPDNFKDYKNLEKITDTGIKKILKERLDQFKGNAKEAFSNLDKDPIWLNQEKGITIKTVTITGVSNAESLHFKKDHLGKEILDEKGNKIPVDFVSTGNNHHLAIYVDDEGKIDDKMVTFYEAVLRVNQGLPVIDKDYSREKGYNFLMTLKQNEMFVFPGEDFDPNEIDLLDERNLEQISKHLFRVQKISKVGYGNSFVRDFVFRHHLETTVEERKELRNTTYIQLKSLEGLRNIVKVRLNHLGKIVQIGEY

SEQ ID NO: 6488 - protein, 1404 aa, synthetic construct
  REGION 1..1404: note = Synthetic
MTKNILGLDLGVSSIGWALVQEDSKNPENNRIVKLGVRVNPLTVDEQINFEKGKPITTNASRTLARSARRNLQRFKFRRANLIDVLKKCNILKQGDLLTEIGKNSTFQTQELRAKSAKEKVELSDFVRVLLLMNKKRGYRSSRKAKNEDEGQIIDGMSVAKKLYEENLTPGEYSYQLLIENKKQLPDFYRSDLQSEFDRVWKFQKQFNPEILTDDLYKELQGKNKNATWAVLKEPFSLVGIKQIGTIQEKKAEKYFWRSEAVKRQLDFESLAVVFQEINSNLNNSSGYLGAISDRSKELYFNNQTVGEYLFQQLKENSHTKLKNQVFYRQDYLDEFEKIWETQSKYYKELTKELKEEIRDIIIFYQRKLKSQKGLISICEFENREIEITENGKIKKKTVGLKVAPKSSPLFQEFKIWQVLNNLVFQSIESKELFPLDLDIKESIFNEVNIKGNLSAKNVLDLMGYSGKEWKTNFKNIEGNRTNENLYTAFLKIIASEGIEFPKEFKLSIDDDIKVSKIDISSEKIKEFIKENFLKLGINTSILDFNPELDGKDFEKQESYQLWHLLYSYEGDDSASGNVKLYELLEKKFGFKKEHSKILADVGFSPDYGSLSSKAMRKIYPYIKENKYSDACHLAGYNHSKNSFTKDQLANRILKEQLEILPKNALRNPVVEKILNQMINLVNEVIKAYGKPDEIRIELARELKKNAEERANMTSDISKATLLHQKYAEVLQKEFGIKAPSRNDIIRYKLYLELEKNLFKDLYTDVQIKREELFTDKYDIDHIIPQSRFFDDSFSNKVLVPRGANLKKGNFTALDYMEIEGKEKLEKFLNIIKELFDKGAISKAKFEKLQKKGSEIGEGFIERDLRDTQYIAKKAKEILFGITNSVISTSGRITDKLREDWNLVNTMKELNLEKYRKLGLTELIVNSKGEEKERIIDWTKRNDHRHHAMDALTVAFTTHNHIQYLNYLNARKDEKHKEHQNIFAIENTITEIVEKKNGSKERRFKLPIKNFRTEAKKQLEEVLISHKAKNKVVTKNINKIKKKGSIIAKTELTPRGQLHKETIYGSSKFLKTKEEKISGKFDLEMIQKVQNEKYRNALLKRLQEFGGDSKKAFTGKNVISKNPIFLNAEKTEQLPETVTLAWYETGYTIRKVVNPDNFKDFKNIEKVIDKGVRDILTERLKEFNGNSKEAFSNLEKNPIWLNKSKGISIKTVTITGINNAEALHYKKDHLGKEILDENGQRIAVDFVSTGNNHHVAIYEDDNGNLQEKVVSFYEAVERVNQNLPIINKEYNFELGWKFLFTMKQNEMFLFPSDDFDPKEVDLFDDKYLSLISKNLFRVQSISIVQYGNSVIRDFKFRHHLETSVSDEKKLQGVTYQQIKSLQPLKDIIKIRLNNLGKIVQIGEY

SEQ ID NO: 6489 - protein, 1404 aa, synthetic construct
  REGION 1..1404: note = Synthetic
MKKILGLDLGTNSIGWAMVGEERDENNKLIDADIIKLGVRVNPLTTDELTDFEKGKPLSTNAERTLKRGARRNLQRYKLRRENLMELLAAANIIKAGIPLTEVGSQSTHQTLQLRAKAARHPIELNELARVLLAINKKRGYKSSRKAQSEDEGMAVDGMAVAKHLYDNQLTPGQYVLELLLKGKKYIPDFYRSDLKAEFDIIWEVQKAFHPEILDDELYKALKDQGQQNTRKRFLAIKGIYTAENKGKREQVKLQAYQWRTDAIQKRVPIAAVAYVLTEINNDTNKSSGYLGKISDRSKILYSDGLTVGEYLYNQIKSNPHTSLKNQVFYRQDYLDEFEQIWETQAKYHPELTPALKEQIRDVVIFYQRKLKSQKGLISHCVFESWEEVRTDKAGNTVYNKSTHQPKMRTVGHRVIPKSSPLFQEFKIWSVLNNLEIKSLKDSNKADLLTEPTTIFEIDESQRDLLFEELNLRGKLTEKQILNLLGISAKEFKTNYPEGLEGNRTNAALFNIYQTIAENEGYGHDWEKKSASEITTELKAIFPEMGIEAGILDFDSNLEGNDFDKQPAYQLWHLLYSVTDDDKVSEEDKITYGNNATALKKKLHLKFGFKPEYTKLLAAITLSDDYGNLSARAIRKIMPFLQNGNRYDEACKLAGYNHSNSLTKEENEKRALKDKLEVLAKNSLRNPVVEKILNQMVNVVNQVIDEYGKPDEIRVELARDLKKSAKERAEDIKFIADNTKANDEVRQIIQKDFGFTPTRNDVIRYKLWLELGKNGYKDIFTNQQIKREQIFSKEIDIEHIIPKALLFDDSFSNKTLAFRQVNLKKSNRTAVDFISDEYGDEGLAQFTARVESLFKNNAITKGKYKKLLMTQDKLPDGFIERDLRNSQYIAKKATAMLQELVRPKVVATTGKITDRLRSDWDLINVMKELNLPKYRELGLTKMQTRRDNGQEQEKEVEIIEGWTKRNDHRHHAMDALTVAFTHHNHIQYINNLNARKNEFHKKHSNIIAIEKVITATKNNKRYFIPPMPNFRQEAQKHIEGILISFKTKNKVVTKNINKIKKKKGYTDKTQLTPRGQLHKETIYGKSKRPMDKPTKLSKRFTMQQAQLIIDAEQRKLVLAHMAQFGNNPEIALDTKTLKKQPITWKDEPLKAVLCFEEIFTIRKDISPDLTVDKVVDDKVRAILQQRIKDYGNAKAAFSDIAKDPIWLNKDKGISIKRVTITGVSNAEALHTKKDHLGNEILDTNGKPIPVDYVSTGNNHHVAIYRDADGKLQEQVVSFYEAVARVQQDLPIIDKAYNTDLGWEFLFTMKQNEMFIFPSEKDNFNPAHIDLMDVHNAALISKHLFRVQKIATKNYFFRHHLETTVENHKELNGIAYKSQLGLSAIEGIIKVRLNHLGKIVQIGEY

SEQ ID NO: 6490 - protein, 1403 aa, synthetic construct
  REGION 1..1403: note = Synthetic
MSKRIIGLDLGVSSIGWAVVEEDLKNPENNKIIKLGVRVNPLTTDEQTNFEKGKPITTNAGRTLARSARRNLQRFKLRRKNLLEILIDHKIINRNDILTEVGEHSTFQTQQLRAKSAREKIELSELARVLFLINKKRGYKSSRKVQSDDEGKAIDGMAVAKQLYEGNSTPGEYGYQLLKKGKKQIPDFYRSDLQAELDKVWSFQKQFYLEILTDEFKKELEGKGQRATIATFLNRYKIYTADNKGTKEEKKLQAYEWRSKAISHQLDIKEVAYVITEINNNLNNSSGYLGAISDRSKELYFNDQTIGEYLYVQLQKNPHTRLKNQVFYRQDYLDEFEKIWEAQSKFHSELTLELKDEIRDVVIFYQRKLKSQKGLISICEFENKEIEIQENGKTKRKTVGLKVAPKSSPLFQEFKIWQVLNNIEIKNEEGRRFLDLEEKEMIFDEVNLKGNITAQKALELIGFKEKEVKINFKTIEGNKTNEKLYQAYLKILDLEGYNVFKLLKIKEDKDEAKLSELKVSASEIKAMIKPIFEANTINTSVLDFDPELPNPEYEKQPFYQLWHLLYSYEGDNSASGNEKLYELLEKKFGFKKEHSKILSSIVFSQEYGSLSSKAMRRIFPYIKEHKYSEACFLAGYNHSKNSLTAEDLKNRVLKDKLDILSKNSLRNPVVEKILNQMINLVNEIIKEYGNPDEIRIELARELKKNAEERAEMTKSMNEATLLHQKYAEELKREFGIPKPSKNDIIRYKLYLELAANGFKDLYTDKKIQKENLFTGKYDIDHIIPQSRFFDDSFSNKVLVPRQSNLDKGNFTAYDFIEQGNKEDFGKYLNVIKELYEKKSISKAKYEKLLKKGLEIGDGFVERDLRDSQYIAKKAKEILFGITHSVISTSGSITDKLREDWNLVNTMKELNLEKFRKSGLTEIVRNSKGEEKEIISEWSKRNDHRHHAMDALTVAFTTHNHIQYLNYLNARSNEKHKEHKNIYAIENMITEVIEKKNGSGSRRFISPIKDFRKMAKKHLQEVLISHKAKNKVVTSNINKIKKKGGVIKKTGLTPRGQLHKETVYGTARILQTREEKISAKFDLQTIQKVQNEVYKNALLKRLNENGNDPKKAFSGKNAIQKNPVYYNEEKTGVIPEKIILSWYDTIFTIRKPINADNFKDYKNLEKIIDAGTRKILKSRLDEFDGNAKEAFSDLDKNPIWLNKEKGISIKSVTITGVSNAESLHFKKDHFGNEILDDHNNKIPVDFVSTGNNHHLAVYIKENGELDDDIVSFYEAVERVNQKLPVVNKNYRSGEGYRFLFTLKQNEMFLFLGEDFNPNEIDLYDNGNLEMISKNLFRVQKISKLLYGNSYVREYVFRHHLETSVEDKKELKDITYKSVKSLEGLRNIVKVRLNHLGRIVQAGEY

SEQ ID NO: 6491 - protein, 1403 aa, synthetic construct
  REGION 1..1403: note = Synthetic
MTKRILGLDLGVSSIGWAIVDEDVKNPENNKIIKLGVRVNPLTVDEQTNFEKGKPITTNAGRTLARSARRNLQRFKLRRENLLDILIKNKILSEDDILAENGKNSTFQTHALRAKAAKERVELYELARVLFLINKKRGYKSSRKVQNDDEGMAIDGMEIAKKLYEEGLTPGEYAYQLLKNGKKKIPDFYRSDLQNEFDRVWKFQKQFYPEVLTDDLKKELEGKGQRATIAVFLNRHKIYTADNKGTREEKKLMAYEWRNNAVGKQLEIKEVAYVITEINHNLNNSSGYLGAISDRSKELYFNQQTIGEYLYNQLCTNSHTRLKNQVFYRQDYLDEFERIWETQKNFHPVLSARLKDDILDVVIFYQRKLKSQKGLISFCEFESREIEIKDNGKVKRKKVGLKVAPKSSPLFQEFKIWQVLNNIEIKNDEGRRPLDWEEKELLFDELNIKGNLGSQKILELIGFKAKDVKINFKSIEGNRTNEKFYDAYLKILELEGYSIFELLKIKEDKEEVKLSDLKVPASEIREMVRSVFEVNYIDVSILDFDAEVSNPEFEKQPFYQLWHLLYSYEADDSASGNEKLYELLNKKFGFKREHAKILSSITFPQEYGSLSSKAMRKIYPYNKENKYSYACSLAGYNHSKDSLTADELEKRVLKDTLEILPKNSLRNPVVEKILNQMINVVNAVIAEYGKPDEVRIELARELKKNAEERAEMNKSINDATLLHQKYAEILKKEFNVTSPSRNDIIRYKLYLELSNNGFKDLYTNTKIEKENLFTNKYDIDHIIPQSRFFDDSFSNKVLVPRQANLEKANLTAYDFISGKGKDREEHFLNMIKELFNNKDISKAKYEKLQKKGAEIGEGFIERDLRDTQYIAKKAREILFGITNSVVSTSGNITDKLREDWNLINTMKELNLEKFRKLGLTEMVINSKGEEKEVIKDWTKRNDHRHHAMDALTVAFTTRNHIQYLNYLNARKDEKHKEHHHIYAIENLITEIVEKKNGSQSRKFKSPIAGFRKEAKKHLEEVLISHKAKNKVVTSNVNKIKKKGGIIKKTELTPRGQLHKETIYGTAKILQTKEEKVSAKFDYKTILKVQNKEYRNALLQRLEKNDNDPKKAFAGKNGILKNPVYISDDKKGTVPEQVILAWYDTVYTIRKSVNPENFKDYKNLEKIIDQGTRELLKKRLDEFNGNAKEAFSNLDKNPIWFNQEKGISIKTVSITGVSNAESLHFKKDHFGNEILDDNGNRISVDFVSTGNNHHLAVYLDAEENLDDRMVSFYEAVERVNQNQPVIDKNYNNEKGYSLLFTLKQNEMFLFPNKDFVPNEIDLFDEKNAAVISKNLFRVQKISKVSYGNSFIRDFVFRHHLETTVEERKELRNITYVQLKSLEGLRNIVKVRLNHLGKIVQVGEY

SEQ ID NO: 6492 - protein, 1403 aa, synthetic construct
  REGION 1..1403: note = Synthetic
MTKRILGLDLGVSSIGWAIVDEDVKNPENNKIIKLGVRVNPLTVDEQTNFEKGKPITTNAGRTLARGARRNLQRFKLRRENLLDILIKNKILNENPVLAEHGKNSTFETHALRCKAAKERVELQEFARVLFLINKKRGYKSSRKVQNDDEGTAIDGMEIAKKLYEEDLTPGEYTYQLLKNGKKKTPDFYRSDLQNELDRVWQFQEKFYPEILTNDFKKELEGKGQRATMAVFLSRYKIYTADNKGTRDEKKLKAYEWRSNALAKQLEIKEVAYVITEINNNLNTSSGYLGAISDRSKELYFNQQTVGEYLYNQLCTNPHTRLKNQVFYRQDYLDEFERIWETQKNFHPVLNVTLKNDICDVVIFYQRKLKSQKGLISFCEFESREIEINDKGKTKRKTVGLKVAPKSSPLFQEFKIWQVLNNIEIKNDEGRRLLDLEEKELLFDELNIKGNLTSQKALELIGLKAKDIKINFKSIEGNRTNEKFYQAYLKILELEGYNIFELLKINEDKDDVKLSELRVPASEIKEMIQSIFEAGQINGSILNFDAELPNQEFEKQSFYQLWHLLYSYEVDDSASGNEKLYELLNKKFGFKREHAKILSTISFAQEYGSLSSKAMRKIYPYSKENKYSYACSLAGYNHSKDSLTTEELEKRILKDTLEILPKNSLRNPVVEKILNQMINVVNAVIAEYGKPDEVRIELARELKKNAEERAEMTKSINNATLLHQKYAEILKKEFDVSSPSRNDIIRYKLYLELSNNGFKDLYTNTKIERENLFTNKYDIDHIIPQSRFFDDSFSNKVLVPRQANLDKGNLTAYDFISGKGKDREEHFLNMIKELFDNKDISKAKYEKLQKKISEIGEGFIERDLRDTQYIAKKARETLFGITNSVVSTSGNITDKLREDWNLVSTMKELNLEKFRKLGLTEIVINSKGEEKEVIKDWTKRNDHRHHAMDALTVAFTTHNHIQYLNYLNARKDEKHKEHSNIYAIENLITEVVEKKNGSKTRRFKSPISGFRKTARKHLEEILISHKTKNKVVTSNINKIKKKGGMVKKTELTPRGQLHKETIYGTAKILQTKEEKVSAKFDYETIMKVQNTNYKNALLQRLENNANDPKKAFAGKNAILKNPVCINDDKKDIVPEKVILAWYNTVYTIRKSVNPENFKDYKSLEKIIDQGIKELLKKRLDEWNGNAKEAFSNLEKDPIWFNKEKGISIKTVSITGVSNVKSLHFKKDHFGHEVLDDNGNKIQVDFVSTGNNHHLAVYVDPEENLDDRMMSFYEAVERVSQNQPVVDRNYNTEKGYRLLFTLKQNEMFLFPNEDFIPNEIDLLDERNLPAISKNLFRVQKISKVGYGNSFVRDFVFRHHLETTVEERKELRNITYVQLKSLEGLRNIVKVRLNHLGKIVHVGEY

SEQ ID NO: 6493 - protein, 1402 aa, synthetic construct
  REGION 1..1402: note = Synthetic
MKKILGLDLGTTSIGWALVNEAENNNETSEIIKLGVRVNPLTVDEKTNFEKGRPLSTNADRTLKRSTRRNLQRYKLRRKNLIEILIKNGFINHETPLTEIGKNTTHQTLQLRALATKTEISIEDLARVFLMINKKRGYKSSRKANNEEEGQAIDGMAVAKTLYENNQTPGQYVLQLLKDNRKYIPDFYRSDLQNEFDNVWEHQKKYYPTILTDALYKELQGKNKGATWAICQTPFSIEGIKLEGNATEQKLKRYQLRSDALHQQISLEHFAIVLQEINNNLNQSSGYLGAISDRSKELFFNNETVGENLYNQLLNNPHQSLTNQVFYRQDYLDEFERIWETQAKFHSELTEKLKTEIRDVIIFYQRKLKSQKGLLSFCQFESWEQTYTEKESGKQKKRTVGNRVISKSSPLFQEFKIWQNINNLQFKRIDGKTNDLFNQDIENDYVLDEEIKLLLFEELNVRGDLKANEVLKFLGKKPKEWKCNFEKIEGNRTNKALFDIYQKIADYEGFGHDWNKKTAIEIKEELKAIFPQTGIDASILDFNAELEGAAFDKQSSYQLWHLLYSAEDDSKITEDDKNLYGNSNVALKKKLHTKYGFAPKYANLLCNIKLQDDYGNLSSKAIRKIIPYLKAGHIYSEACKMASYNHSNSETVEERAKKVYADKLELVKKNSLRNPVVEKILNQMINVINQVIDSYGKPNEVRIELARELKKNADERREMTVNIAAATRRNEDIKKSITKEFGIPNPTKNDVIRYRLWLELEQRGYKSLFTNTYIPKEKLFSKEIDVEHIIPKALLFDDSFSNKTLAYRHINLKKADRTAYDFISDEYQSDLENYIERVESLYNKGKGSISKAKRNKLLMPLSKLPDGFIERDLRNSQYIAKKARQLLLEVFPEVIPTSGNITDKLREDWDLINVMKELNFPKYKALGLTAFEERLDKSTEKLKQVEVIKDWTKRNDHRHHAMDALTVAFTSHNHIQYLNNLSASRNEQSELYGIRNKITYKNEEGKRKFIKPMNNFRGEAKKHIESVLVSHKAKNKVVTKNINKSKLKGKNKYQTKIQLTPRGQLHKETVYGKSKQTLSKATKLNKKFTIKDARLIIDKRQRELVLQHLKNFNNNPDVAFDTNTLKQNLILFNENPLKEVLCFEEIFTIRKDINPENFKDVKTINKVVDLKVRQILLDRLSKYNGKPKDAFSDLEKNPIWLNKAKGISIKRVTIIGVSNAEPLHHKKDHLGKELLDDLGNRQATDFVSTGNNHHVAIYKDANGKLHEKVVSFYEAVARVNEDLPVINKTLNEHFGWTFQFTMKQNEMFVFPSKDFDPKEINLLDKNNFNLISQHLFRVQKIATKNYMFTHHLETQATNGDDLKKLKMLSGKKYHFIQTPEKLDRIIKVRINHIGQIVQIGEY

SEQ ID NO: 6494 - protein, 1402 aa, synthetic construct
  REGION 1..1402: note = Synthetic
VERILGLDLGVSSIGWALVEEDVKNPENNKIIKLGVRVNPLTIDEKTNFEKGKSITTNAGRTSARSARRNLQRFKLRRKKLLEILIHYKIIKNDAVLAETGKNTTFQTQYLRAKAAREKIELDELARVLLLINKKRGYKSSRKVQNDDDGKAIDGLSVAKELYEKNYTPGQYAYDLLKRGKKQIPDFYRSDLQNELDRIWEFQKQYHPDILTDEFKKELEGKGQRATAAIFLNRYKIYTADNKGTREEKKIQAYQWRVEALSQPLDVKEVAYVIAEINNNLNNSSGYLGAISDRSKKLYFNGQTIGEYLFEELSANPHTRLKNQVFYRQDYQDEFEKIWKIQTKFHPELTKELKEQVRDIVIFYQRKLKSQKGLISFCEFESREIEIEENGKRKRKKVGLKVAPKSSPLFQEFKIWQVLNNIEIKNEDERRYLEPEEKELLFNELNCKGNLTSQKCLELLGFKSKDAKLNFKVVEGNRTNEKLYDAFLKILELQGYNVFELLKIKEDKDEAKLSELKASADEIKGMIKEIFNANLINTSILDFNAELEGKDFENQASYQFWHLMYSYEGDNSPSGNEKLYELLEKKFGFKKEHSKILSTIVFSQEYGSLSTKAMRRIYPYIKDNKYSEACLLAGYNHSKHSLTKEELENRKLKEQLEVLPKNSLRNPVVEKILNQMINLVNATISEYGKLDGVRIELARELKKSAQEREDMAKSINEATLLHQKYATILKQEFGVVNPSRNDIIRYKLYMELTVNGYKDLYTNTKIEKENLFTDKYDIDHIIPQSRFFDDSFSNKVLVPRQSNLDKGNLTAYDFMSNKGSEREEHFLNVIKELLDKGSISKAKYEKLKKKGLEIGDGFIERDLRDTQYIAKKAKEILFEITNSVVTTSGRITDKLRKDWDLVNIMKELNLDNYRRLGLTEIVRNSKGEEKELIPDWTKRNDHRHHAMDALTVAFTTRNHIQYLNYLNARKDEKHKEHQNIYAIENIITEVIEKKNGSKTRRFKAPMNSFRHEAKQHLKEILVSHKTKNKVVTSNINKTKKKGGIHKKTELTPRGQLHKETVYGSKKFLQSREEKVSAKFDYETILMVVNPIHRNALLNRLKEYGNDPKKAFSGKNAINKNPVYLDDSKTDILSEKVTLSWYETGYTIRKSVTPDNFKDYKNLEKITDLGIKKILKERLDQFKGNAKEAFSNLDKDPIWLNEEKGIAIKTVTITGVSNAESLHFKKDHLGKEILDENGNKIPGDFVSTGNNHHLAIYLDEEEKLDDKMVTFYEAVLRVNQGLPVIDKDYNKEKGYKFLMTLKQNEMFVFPNEDFDPNEIDLLDERNLERISKHLFRVQKISKVGYGNSFVRDFVFRHHLETTVEERKELRNITYIQLKSLEGLRNIIKVRLNHLGKIVQIGEY

SEQ ID NO: 6495 - protein, 1401 aa, synthetic construct
  REGION 1..1401: note = Synthetic
MKNILGLDLGTTSIGWALVNEAETKIEKSEIIKLGVRIIQYDNFSKVDKSGKVSESKNPESDFLAGKGLSPNAGRTLKRGARRNLQRFKLRRTNLIEILIKNKIISKSTALTEVGESTTHQTLNLRAKSAKEKIELTEFARVLLAINKKRGYKSSRKANSEEEGNSIDGMKIAKELYDNNLTVGQYVSNLLESGKKFIPDFYRSDLQQEFNLVWNFQKQFYIDVLDDEFYKIIEGQGQQTSRKVFLKYKGIYTAENKGKREEVKKQHYLWRSEAISKQLKIEEVAYVLVEINNNLNQSSGYLGAISDRSKELYFNKETVGENLYNQIKENKHTSLRNQVFYRQDYLDEFEQIWETQVKFHSELTLELKKEIRDIVIFYQRKLKSQKHLISDCQFERYHKAIPKSSPLFQEFKIWSILNNLEFENIETKEKKILGEEIKQDLFEKLNGSKKLTEKEILKFVDLSDKLWKTNFSEGVEGNKTNEKIYEVYKTIAENEGYGFDWDKKSSKEIENELKAIFKMVRIKESILDFNSDLEGNDFDKQDSYQFWHLLYSAQDDDKISEVDKITYGNSNVALKKKLHQKYGFKPDFGNLLANVPLQQDYGKLSAKAIKKILPYLKSGQEYSEASRLAGYNHSNSLTKEELENRVLKDNLELLPKNSLRNPVVEKILNQMVNVINGIIAEYGKPKEIRIELARDLKKSAKERADTTQYINKATLENEAVRKVLQDEFRIKNPTRNDVIKYKLYQELKNNGYRTLFTNTYIPTEKLFSKEIDIEHIIPKAKLFDDSFSNKTLAYRKVNLEKADTLAFDFIDNKYNSDLENYKLRVESTFKSGAITKGKYKKLLLSEKNLPDGFIDRDLRNSQYIAKKAKQILEEVFEKVTPTIGNITDKLREDWDLINVMKELNLSKYRELGLTEWEERKYDQKVEKIIDWTKRNDHRHHAMDALTVAFTTHNHIQYLNNLGAINSSFKNKRDLDKSYLFGIKQKITKVYKDKQGRGKRKFIPPSENFRSEAKDQIGDILISFKAKNKVVTNNKNKIKVAGKDNYIIKTQLTPRGQLHKETVYGRSKDEIIKIEKINANFDLQKINEVTKPKYKEALLKRFQEFENDGKKAFAGKNALSKNPLYTIEGKLVPIEIKTRTFEDSYTIRKEVNPDNFKNLKSLQKVIDVGIRRILEERLAQYNGKPKEAFSDLIKNPIWLHKQKGISIKRVAISGVKNAENLHVKKNHFGDDHLDETNKKVKNDFVSTGNNHHMAIYIDEKGKLHDNVVSFYKAVARMNSGLPAIDKELNANNGWEFLFTMKQNEMFLIPSEGFNPLESDLSDKSNLKIISKNLFRVQKFSKVDYGNSSIRDYVFRHHLETELIDKKETKNITYKVFKSIGDFDQILKVRINHIGKIVHVGEY

SEQ ID NO: 6496 - protein, 1401 aa, synthetic construct
  REGION 1..1401: note = Synthetic
MKKILGLDLGTTSIGWALVNEAENINETSEIIKLGVRVNPLSSDEITDFEKGNPLSVNADRTLKRGARRNLQRFKLRRKNLIETLLKNKVIQSESILTEIGSNSTFETLSLRAKAAKERVEKEEFARILLSINKKRGYKSSRKAKSEEEGTLIDGMSVAKHLYENNFTPGQYVYQLLLENKKYIPDFYQSDLKSEFLKIWNFQKEFYTEILTDELFQNLEGKSKNQTWAICKEPFKITGITQKGSASQKKLEKYKWRSEALESKVDLEILAIVFQEINNDLNKSSGYLGAIGDRSKKLYFNKITVGQYLYRQIELNRHTSLKNQVFYRQDYLDEFEQIWETQAKYHTELTPSLKEELRDIIIFYQRKLKSQKGLISICEFEQKTIEVTVEDKVKKKTIGPRVVPKSSPVFQEFKIWQVLNNLSFTPIKETPTDLFKKEFPEEVLTLDQKKLIFEELNTRGKLKNTDILKLLKLKTKDWKCNFESIEGNNTNQAIYNVLQQISENEGHGFDWNKKNASEIKEELKATLPEIGVNPNILDFDINADNFEQQASYQLWHLLYSAEDDTKISKQDEAIYGKTSVSLKKKLHLKFGIPVKYTALFANISLQPDYGNLSARAIRKIMPHLQDGIEYSQACVLAGYNHSNSITKEENLKRALKEKLELLPKNSLRNPVVEKILNQLVNVVNQIIDSYGKPDEIRIELARELKKSAKQRKEMTVGIAAATKRNEGVKKTLQKAPFNILNPTKNDVTRYRLYQELETNGYKTLYTNQYIAPNKLFSKEIDIEHIIPKAKLFDDSFSNKTLAFRTVNLTKSNMTSYDFIAEKYNDDLENYVLRVKNLYDNGVISKGKYSKLLMKESNLADGFIERDLKNTQYIAKKAKNMLQEVVRNVVPTTGSITDKLREDWDLINVMKELNLPKYRQLGLTVLEERKNGNKVEQIIDWSKRNDHRHHAMDALAVAFTTHNHIQYINNLNSSRDEESSSEYAKKSKKEINLFSIRNKITKNYDQKNGGKKRKFIPPLTNFRAEAKKHIEGILISFKTKNKVATKNINKTKKQGGYHVQKAKTPRGQLHKETVYGRSKKEIVKQEKIGTSFTIDKINTVTQPEYRTLLLKKITQFNNDPKKAFGGKNAPSKTPIYLANGKQMPLTVTTKTYQDVYTIRKEITPDLKIEKIVDAKIKALLYQRVEAFNGDKKAAFSNLDNNPIWLNKEKGIAIKRVTISGVSNVEALHDKRDYFGNLILDAEGHTQPVDFVSTGNNHHVAIYKDEKGKLQEQVVSLFDAIARVNQDLPIVNKDYNKDKGWEFLFTLKQNELFIFPTDTFNPEGIDLLNENNYALISPHLFRVQKISSLLSGLWFRHHLETTVSVNKSLKDTTYKVIQSLSKIENIIKVRTNHLGNIVQIGEY

SEQ ID NO: 6497 - protein, 1400 aa, synthetic construct
  REGION 1..1400: note = Synthetic
MKRILGLDLGTNSIGWALVHQSEAKEELSEIIKLGVRVNPLTVDEKRDFEAGRPLSTNAERTSKRGARRNLQRFKLRRKKLIEILIKNHFITEETPLTEIGKGTTHQNLELRAKSAREKVELEDLAKIFLAINKKRGYKSSRKVQNEEDDQPIDAMSIAKEIYEKEITVGQYVLNLLEEDKKYIPDFYRSDLQQEFDKVWNFQKRFYPEILTDELYKELQNKNKTRTWAICKEPFQLVGISLTEKGADLKKKKYQLRSQMIAEKLDLELLAIVLQEINNDLNKSSGYLGAISDRSKELYFNNETVGENLWKQIKDNPHTSLKNQVFYRQDYLDEFEQIWETQAKYHKELTPKLKEEIRDVIIFYQRKLKSQKSLLSFCQFESWKIDKKDEKGNIIQNKLSGLPKQQRIGRRVISKSSPLFQEFKIWQNINNLVFRRMYGATKDLFNQEIQTDYILKDEDRNLLFEQLNIRGKLKEKDVLKTLGLNAKLWKTNFPEGLEGNRTNEALYKVYKLIAENEGYGFNWDRKNATEIKEELSAIFTEIGINSNILDFDANIEGEEFEKQASYQLWHLLYSAEDDNNTKISEEDIEKYGNTSVNLKKKLCEKFGFIPKYAKLLVNIPLQPDYGNLSSKAIRKIMPYLQEGHIYSEACSLAGYNHSNSLTKEDNENRELADYLELLPKNSLRNPVVEKILNQMVNVVNQIIDEYGKLDAIHIELARELKKNAKERELATKRINEATKRNEEIKKKISEDFNIPNPTRNDVIRYRLWEELKTNGYKTVFTNQYIPYEKLFSKEIEIEHIMPKALIFDDSFSNKTLAYHSENQAKGNRTAIDFISNDNSLDVENYQTRVDLLYDNGKGTITKAKRNKLLLSQKDLPDGFIERDLRNSQYIAKQAKNMLQTVVREPVVSTSGNITNKLREDWDLINIMKELNLPKYRALGLTEFEERLNKQTGKCVKHEVIKDWTKRNDHRHHAMDALTVAFTTHNHIQYLNNLNARKDENHDKHLSILKIQNKITKYEDSKRKFIAPMPNFRSEAKRHIESILVSIKNKNKVVTINKNYTKGGTAKPQQTFTPRGQLHKETVYGKSKRLMTKPTKLNKNFTQEYCRLIANPYLKGIVAEHLAKYNNKPEIAFSAKILKKEPILYKDNAIKEVLCYEDIFTIRKTIAPDLKLDKVIDLRVQDVLQNRLNEYNGNSKKAFSDIEKNPIWLNKEKGIAIKRVTITGVSNVEALHTKKDHLGQNILDEQGNTQPINYVSTGNNHHVAIYRDSEGDLQEKVVSLFEAVERVNQRLAIIDKEYKKDLGWEFLFTMKQNEMFVFPTEDFKPHEIDLLDIENADRISPHLFRVQKIGSKDYWFRHHLETTITNNLNFTYCRVTSTKPLEGIVKVRINHIGEIVQAGEY

SEQ ID NO: 6498 - protein, 1400 aa, synthetic construct
  REGION 1..1400: note = Synthetic
MMKRILGLDLGTSSIGWAYVLEAQDDNEISKIEKLGVRVNPLTTDEQLNFEKGKPITTNAGRTLARSARRNLQRFKLRRDNLIEVLKREKWIDDKSILTENGNKSTFETYALRATAASKEIGLEELARVLLMINKKRGYKSSRKVNKEDEGQLVDGIEVAKKLYHENLPPGAFVYQLLKEGKKKLPDFYRSDLQRELDLIWDFQANYYPDLLTPDFKEELKGKGLRATSAIIWSKYKFNTAENKGTREEKKIQAYQWRKDGLTKQLEKEEVAYIIAEINGQLTNSSGYLGAISDRSKELYFNKQTVGQYLFNQLQQNTHARLKNQVFYRQDYLDEFEKIWSVQSQFHHCLTEQLKEEIRDIIIFYQRKLKSQKGLISFCEFEQREVVVNGKNKVIGLRVAPKSSPMFQEFKIWQQLNNVKLRNKTNKEVYNLAEEQKKYLFETLNLKGKLSAHQVLSLIEGKPKEWELNYTELEGNSTNAALYNAYLDILDMEGYDVRNELKIKLNKDEITLSDLDKPVSEIKDMIRRIFQHLGINTFILDFDAQLQGDDFEKQLSYQLWHLLYSYEEDDSKTGMDRLYNQLNLKFGFSLDQAKIIGKIALQDDYGNLSTKAMRQIYPYIQDAEYSAACKLAGYNHSKSSLTKEQLTNRVLKDHLDILPKNSLRNPVVEKILNQMVNVVNTLIDTENDKLVQEGKEADFRFDEIRIELARELKKNAKEREELTKAINTSKAEHEKIINILQTEDGIKNPTRNDIIRFKLYQELKNNGYKNLYTNEYIQRKDLFTNVYDIDHIIPQSRLFDDSFSNKVLVPRNVNIEKGNQTAFDYIHTKFGEDGIEAYEARVERLFNLREEGVSRSKYRKLLMRGSDIGEGFIERDLRDSQYIAKKAKAMLFEITPSVISTSGSVTDRLREDWGLVSVMKELNLPKFKAVGLTEYLETKDGNRKEVIKDWSKRNDHRHHAMDAITVAFTKHSHIQYLNHLNARKNEKSEFFSTIKAIEMKETYVDRDDLGNRKRFFKEPIAHFRSIVKAHLERILVSHKAKNKVVTKNRNKIDGKKEAQEVLTPRGQLHKETIYGKILQYTSKEEKISAKFDAATIAMVSNPRYRSALLDRLTAYGNDPKKAFTGKNSPIKSPIYFDQQRQLAVPEKVKLVWLEEDYTIRKAIGPDLKIEKVIDRGVKRVLEQRLSAYGGDTKKAFSDLENNPIWLNEEKGIAIKRVTISGVKNAEALHTKKDHFGQVLKDKDGNTMPVDFVSTGNNHHVAIYADENGALQERIVSFYEAVARVNSGFSIIDKDYNQHLGWKFLFSMKQNEMFLFPSEDFDPKQINFFDRNSYKLISENLFRVQKFTIKDYFFRHHLETNVEDNSKTKGKLWRREGLNGINGIVKVRINHLGEIVQVGEY

SEQ ID NO: 6499 - protein, 1376 aa, synthetic construct
  REGION 1..1376: note = Synthetic
MKTILGLDLGTNSIGWALVKETENSNEKSEIIKLGVRVNPLTVDEKTNFEAGRPLSTNADRTAKRSARRNLQRYKLRRKNLIDLLIKHRLIDKDTPLTEIGKNTTHQTLELRAKAARERIELEDLARVFLAINKKRGYRSSRKVNNEEEGQVVDGMAVAKKLYDENLTPGQYAYELLSKGKKYVPDFYRSDLQAEFDSIWEYQKQFYADILDDELYNALKGQGQQNSRKRFLAIKGVYTAENKGKRDEVKLQHYKWRSEAITQKLSIEEVAYVLVEINNDLNKSSGYLGAISDRSKELYFNKETVGENLWKQIQKNPHTSLKNQVFYRQDYLDEFEQIWETQAQFHPQLTLALKEQIRDVVIFYQRKLKSQKGLLSFCQFESWEIERKDENGNVILNKTTQLPKRQTVGRRVAPKSSPLFQEFKIWQNINNLEIAKISDGNSKNKKETEALSDDERKLLFEELNLRGNLSQKEVLQILGLKDKEYKTNFPEGLEGNRTNAALFNIYQQIAENEGYGDWTKKSAQEIKEELKAVFPQIGIQADILDFNAELDGKEFENQASYQLWHLLYSAEEDDKINEEDQIIYGNSAVSLKKKLCEKFGFTPEYAKWIANVSLQDDYGNLSTKAMRKIIPYLIDGNDYSEACALAGYNHSNSLTKEENDNRERLNKLELLPKNSLRNPVVEKILNQMVNVVNQVIETYGKPDEVRIELARELKKSAEERAEMTKGINEATRRNEDIKKLITKNFGIPNPTKNDVVRYRLWEELAPLAYKDVFTGRQIKKEDLFSSKIDIEHIIPKALLFDDSFSNKTLAFRETNLKKADRTAYGFIESDYNATLDDYIQRVETLYNNAKGTISKGKRNKLLMAQKNLPDGFIERDLRNSQYIAKKAKSMIEKVFNDVNVTSGSITDRLREDWDLINVMKELNFPKYKALGLTEIEERYDIGQEKTKKVEVITDWTKRNDHRHHAMDALTVAFTTKSHVQYLNNLNTIHSLKGDEVDLELSKLYGLKNTITEVVNKKRKFIPPMPNFREEAKKHIETILVSIKNKNKVYTKNINKTKKESGYHTKEQLTPRGQLHKETVYGKSKRPMNKPTKINKNFSLEQAQLIINVQEKELVLRHLAQFDNNPAVAFDTKTLKKCHYLKMVNLKKCCVLRKFLRLEKTLLLIRLKRWWMKKKLFSNAKKILEVMQKKPFQIWIKIRYGSTKKKEFASSEPLQEVTPKLYTIKKTIAGKFWTITETLYLRILVRGIIIMSLFMRMKKVNCKKKCRFMKQQEQIKAYLLLIKDMKIDGSFYLQNRMKCLFSLMTILMMILIYMRITLKLVSICLEFRNRQKIICFDIIRPMFKRKNMIHINLLEVQNLKTSKKFVLTIEKFKWENI

SEQ ID NO: 6500 - protein, 1399 aa, synthetic construct
  REGION 1..1399: note = Synthetic
MNKNILGLDLGVSSIGWAYVHEDSKNFENNKIIKLGVRVNPLTVDEQLNFEKGRPITTNAGRTLARSARRNLQRFKLRRSCLIDVLKKNNILSETDLLAEVGKNSTFQTQELRAKATKEKVELSEFARVLLLINKKRGYKSSRKVKNDEDGQIIDGMTVAKKLYQENLTPGQYSYRLLQEGKKQLPDFYRSDLRSEFDKVWNFQKQFHPDIFKEELYTDLQGKNKNSTWAILQEPFSLVGIKQTGTAQEKKTEKYFWRNEAVKKQLDFESLAVVFQEINSNLNNSSGYLGAISDRSKELYFNNQTVGEYLFQQLKANPHTKLKNQVFYRQDYLDEFEIIWDTQSKYHKELTKGVKEEVRDIIIFYQRKLKSQKGLISICEFENREIAITENGRTKKKTVGLKVAPKSSPLFQEFKIWQILNNLQFQNVETKEAFPIDLDFKQSIFNEVNIKGKLSSKDILDIVGYSSKEWKTNIKDVEGNYTNENLYDAFLRIIVNDGIEFPKEFKLTIDDDIKISKLNVSAEVIKLFLEEKLSELGINTSILDFNPELEGNDFEKQASYQLWHLLYSYEGDDSASGNEKLYELLNKKYGFKEEHSKILAQISFPQDYGNLSSKAMRKIYPYIKEHKYSEACNYAGYNHSKNSLTKEQLENRVLKEQLDILAKNSLRNPVVEKILNQMVNLVNEIIKEYGRPDEIRIELARELKLSAEERANITSEINKTTIQHQKYAEILKKEFNILVPSRNDIIRYKLYMELANNGFKDLYTDLKIERENLFTEKYDIDHIIPQSRFFDDSFSNKVLVPRGANLKKGNFTAFDYLEIEGKEKVEKFLSIIKDLYDKGAITKAKYEKLQKKSSEIGDGFIERDLRNTQYIAKKAKEMLFEITNSVVSTSGRITDKLREDWNLVNTMKELNLEKYRKLGLTETVINSKGEEKQRIIDWTKRNDHRHHAMDALTVAFTTHNHIQYLNYLNARKDEKHKQHQNIFAIEKLITKVFEKKNGSKERRFIEPIKNFRIAAKKHLDEILVSYKAKNKVVTKNINKIKKKGSLIVKTELTPRGQLHKETIYGSSKFLKTKEEKVSGKFDVQTISKVQNEKFRNALLDRLQEFNGDPKKAFTGKNIISKIPIYLNDERTEQLPETVTLAWYETGYTIRKAVNPDNFKDYKNLEKIIDKRIRNILIERLKEFKGNSKEAFTDLEKNPIWLNKTKGIPIKTVTISGINNAEALHYKKDQLGNHILDEHGKKIASDFVSTGNNHHVAIYEDEKGNLQERVVSFYEAVERVNQGLTITDKDYNIDLGWKFLFTMKQNEMFLFPSEDFNPKETDLFDEKKLFLISKNLYRVQKFGELSKSGFWFRHHLETSVEVKKELRNYSYLDFYSKDFMKTVVKVRLNHLGKIVQVGEY

SEQ ID NO: 6501 - protein, 1399 aa, synthetic construct
  REGION 1..1399: note = Synthetic
LYCKYILEFDIFQKFSKKNALSSMNFFIFVKNRKNKTIMKRVLGLDLGTTSIGWAVVDQAASQEEKSKIIQLGVRVNPITVDEQSSFENGKSITTTADRTLKRGMRRSLQRYKQRREHLVGLLKKHGIINDDTLLNENGNATTFQTYRLRAKAAHEEISLEEFARVLLMINKKRGYKSNRRADSQEDGELIDGMAVAKKLYNEHLTPGEFAYHILQSGKRFIPSFYRSDLQNEFDKIWNCQNQFYPQVLTAELKDKLTDRSKKDTENIFFAIHHISSATVKDRKTATLTIYKWRVQALRQQLDLEQVVAVLASLNGAIAGASGYLGHISDNSKELYFGHMTVGEYLMRGLEQDPHFRVKNRVFYRQDYLNEFEQIWETQRRFHPELTAELKEKIRDTVIFYQRKLKSQKGLIAYCELEGREITVKVDGKEKRVMTGPKVCPRSMPLYQEFKMWQVINNLRLQSKIDGTQVPLTMEQKKLLHDALNVEGDMQAARVLKVLALKPKDYGINCDEVPGNTTNAALFKKYKSIVEWTGHDVEKFDKLSASEKIALVESVFKALKFNTDFLGDGCDEQSKAFRLWHLLYSYEGDNSNTGIDKLVDHICSLTALPADYAKAVAQVKFDDDYGSLSAKAIKKILPYMQQGMMYSEACEAAGYRHSKSSLTREEIAAKQLLQHLEVLPKNSLRNPVVEKILNQMVHVVNACQDAYGPFDEIHVEMARELKLTSKQREERTKALNQRTKETEEIKQKLIKDFNVPHPSRNDIIKYRLYMELAPNGFKTLYTDTPISHEKLFTREFNIEHIIPQAKMFDDSFTNKTLETAEANLDKSKMTAYDYVLSRQGEEGAKRYKAKIEKLFGASNPKKCERLLMRETDIPDGFLNRDLSDSQYIARKAKEMLGKITRVVVPTTGAITARLREDWQIVDVMKELNLEKYEKLGLVETYSDRDGRCVKRIKDWSKRNDHRHHAMDALAIAFTQPSHIQLLNHLNAHESDDIKANAYALMRRTLTKGGTFIPPMENFRTVAKKHLEAVLVSIKAKNKVVTPHVNRIKGSAHHQLTLTPRGQLHKDFFYSKKYFYATKVEKVGKSFNAAKIATVCKKTYREALLRRLQEYGGDPAKAFTGKNSLLKNPLYVDESNMKVVPSKVKTVTMEEFFSKRNLVDKDLKIDDVVDEGIKEILRKRLDEYGDVNEAFANLRDNPIWFNKQADIAVKRVTTKERITNPIYIHEKRDNAGRFILDEKGNRRPNDFVNPRNNNHVAIFEDEDGNLHEHIVSLYDAVNLARKGLPIVDKLYNSDKGWKFLYTMKRNELFVVPDLEHGFNPAEIDLMDVKNYPAISKHLYRVQKITKKDYFFKLHIDTTSEFQAPLKDIHWKRITKENDLKGFVKVRVDHIGHIVAVGEYN

SEQ ID NO: 6502 - protein, 1399 aa, synthetic construct
  REGION 1..1399: note = Synthetic
MENKTKTVLGLDLGTNSIGWALVKEDIENNSNSNIIDCGVRVIPLTSEEIDNFEKGKSITTNKDRTQKRHARRNLHRFKLRRKVLIETLKKAGIIDEQAVLTEDGKGTTHELIRIRAQAADQQIKLDEFARVLLAINKKRGYKSSRKTKSAEEGEAIDSMDIAKILYEKNLTPGEYVLNLLEKGKNFIPDFYPSDLQEEFNRIWEKQKEYYPEILTDELKKEVINKSGRQTWTILKKPFNIVGIKRTGKKHEQRLENYQWRVEALKNKLDLEQLAIVLQEINTQLNRTSGYLGEISDRSKQLYLNKITVGQYLYNQIKENPHNRLKNQVFYRQDYLDEFNKIWDTQSKFYPDILSPELKKEIRDIIIFYQRPLKSQKGLISICELEGREAEIKVDGKTKKKVIGPRVIPKSSPLFQEFKIWQRLNDIIVKNPVTKEEYYLSEEHKNIIFEEVNLKGKISDKELLKLLGLKSKDWEVNFKTIEGNSTNAELLKAYQEIINTAGYDNQELKKMDAGKAVPFLEELFESLGINKHIVKFSTDLPDNEIEKQPHYQLWHLLYSYEGDNSKSGNESLYKHLKEKFGIEKEYAQPFIKINFKSDYGNLSAKAIKKILPHLKDGKDYSEAAQLAGYNHSHSFTKKENLERELVDKLEILPKNSLRNPVVEKILNQMINVVNAIIDEYGKPDEIRIELARELKKSAKERQKTTEYITKSTKEHEQIKKILEKMPPFNQGVRITRNDIIKYKLWKELEPNKYHTLYSNQYIPLEKLFSKEIDVEHIIPKALLYDDSFSNKTLEYRNVNLEKGDRTAYDYMIDKYGENSEEFKRYITVIEELYKDGKISKGKFNKLLMKQSEIPDDFIERDLRNTQYIAKKAKELLLKLVRTVVPTSGTVTDKLRQDWGLVDIMKELNWDKYNQLGLTDYEETKDGKRIKIIKDWSKRNDQRHHAMDAITIAFTTHNHIQYLNNLNTIYNLHEQEEVQHDKSNLYGIKEKITELVEDKNGNKKRKFKKPMPNLRSEAKKHLENILVSYKAKNKVVTQNKNYIKVSANNPRKNKIKRKGKHYLVQDTLTPRGQLHNETIYGKIKQPLKKPVKLSKKFTAKQAELIINKEIKQTVLNHLAKYNNKHEIAFESKTLKKDPVIFNNKPLKEVHCFEEFYTIRKDISPDLKIDKVIDEKAKKILETRLKEYNGNAKEAFANLDKNPIWLNKEKGIAIKKVTIKGINNAEVLHTKKDHFGKEILDENNHPVPADFVNTGNNHHVAIYRDKDGNLHEKVVSFFEAVERANQGMPIIDKDYKKGLGWELLFTLKQNEMFVFPNPETGFNPSEIDLLNPNNKSLISPNLFRVQKIGSSDYWFRHHLETNIKNNIKGITYFRITNKNTLQNIKKVRINHTGKIVAVGEY

SEQ ID NO: 6503 - protein, 1399 aa, synthetic construct
  REGION 1..1399: note = Synthetic
MKKILGLDLGTNSIGWAVVNEAENAQEKSSIVKLGVRVINYDNFVSGETGKEVKGNPADFFIAGKSVTPNAARTQSRSMRRNLQRRKLRRNKLVKILKENHFISDESILCENGNNTTFETYRLRAKAVTEEVGLEDLARIFLMISKKRGYKSSRKANSSEDGQLIDGMKIAEEMIERHLTPAQYLLEMINNGKRENPDFYQSDLQNEFDLIWNKQKGFYPEILSDELKNALVGKNKTQSWGVCKEPFGIVGIKRLTKGFEQKKENLQWRVEALSQKIGLEELAIVLQEINGDISSSSGYLGKISDRSKELYFNKITVGQYLMEQLDRNPNYSLKNQVFYRQDYLDEFNAIWNKQKEFHPELSDDLKKEIGQRTIFFQRPLKSQKGLVGICELEGELKEIEVDGQKKIKKIGPKVCPKSSPLFQEFKIWQKVNDFEVNGEPIPLEEKQIIARELSVRGKMSSKDILKELYENYRDLFSNFDELDGNTTQVKLYEAYAKIIENSGHDTFDFKKMSAEESTSIVEEIFNALHFNTEILHFDSSLPTPKFEQQASFKLWHLLYSFEGDGSKTGNEKLVQKLQQEFSFDEDSAKILASVTFKEDYGSLSSKAMKKILPYLKQGYCYSDACEKAGYKHSARSLTKEELEKKTYKERLQELPKNSLRNPVVEKILNQMVHVVNGVIDTYGKPTEIRIELARELKNSAKKRENLSKINADSQKLNEKYREILQKNFGIAHPSRNDLIRYKLYRELETNGFHTLYSNTYISQDNLFTNKFDIEHIIPQSKIFDDSFANKTLESREINIEKGNKTARDFVVDKYGESGNDCSFDQFEQRVDKLHREGAISKNKRKNLLKKECELESGFINRDLKDTQYIAKKAREMLEDLVRDVVPTTGKITDKLREDWELVNVMQELNWDKYDKLDLTEWIENKEGKKIRRIKDWTKRNDHRHHAMDALTIAFTKRSYIQFLNTLNARGRDPEIDSIEKQETHGQRIFNAPFELNEFRAQAKEHLENILVSIKAKNKVVTPNINKAKNGVVTEISLPNGEKKMIKGQLTKTPRNSLHNDTIYAKRLKENLKEEKVNASLTIEKINSVINEEYKNALLKRLAENGNDSKKAFGGKNAISKNPIFLNAEKSRCVPEIVRTKSFHEIFTIRKEVSPDLKLDKVVDDRIRMILQERLTEFNNDAKAAFSNLDKNPIWQNKEKGIAIKRVAISGPSNTMPLHSKKDHFGKNIQNENGNIANDYVQLGNNHHVAVYRDENGEVQDIVVSAYEATQRNIQNKPVIDKEYNKDKGWTFLFSMKQNEFFVFANEETGFDPSKIDLMDEKNNALISPNLFRVQKFSKVGYGNSFVRDYMFRHHLESTLDENKMLRGMTYLQFKSTSFMDKMVKVRVNHIGKIVFVGEF

SEQ ID NO: 6504 - protein, 1399 aa, synthetic construct
  REGION 1..1399: note = Synthetic
MKTILGLDLGTTSIGWALVKEAEPFSDEKSEIVRLGVRVIPLTVDERTSFENGKSITTNALRTQKRGMRRNLQRYKLRRQALIEELKSTGWIGDDFIFSETGPGSTFRTLRLRAKSASEEVTLGDLARILLQINKKRGYKSSRKMVSSDDGQAIDGMAVAKEMYDKGLTPGEYVYQRMLEGKYAIPEFYKSDLQEEFDRIWALQKSFHTELTDELYRKLSDRNKSQTWAICRDELGIQGLKSSFTGKERLKEAYRYRHLAATQEVNMEVLTCALQEINGQKASLSGLLSKISDRSKELYLNNLTVGQMLLKRIEDNPNNSLKNIVFYRQDYLDEFERIWTVQSKYHTELTHELKKRLRDIIIFYQRPLKSQKGLISLCELETKDIEVAIDGVKKMKNIGPRVCPRSSPLFQEFKIWQTINNIFVNGAALDDEDKSVIAKELMFKDKLKDSDLLKLLFKTTKGQSVNFKEVDGNRTMATLMKACFKIAENLGYDDIDLSKLSSEDQMVRIEGIFKEQGFKTGFLHFDSSLASPEFENQDSYRLWHLLYSYEGDKSASGNESLVKCIMDLCSMDEGSAKILASCTFLPDYGSLSAKAMRKILPYMKDGLEYTAACAMAGYRHSKRSLTKEELDTKEYSDRLSLLPKNSLRNPVVEKILNQMINVVNSVIDVYGKPDEIRIEMARELKKSAKEREEAQRDIASSTAESQKVIEILKGEPFFIQFPTRNDIIRYRLYQELAQNGFKTLYSNTYIPKDKLFSKEFDIEHIIPQALIFNDSFANKTLESRQCNLEKGKETAMDYVKSKYDETGVQAYCDRVNGLIGKGISKTKAKWLLMEGKDIPEDFINRELRDSQYIAKKAREILESLVKFVVPTTGSVTARLREDWQLVNVMQELNWEKYARLGLTGVREDKDGRRIPFIQDWTKRNDHRHHAMDALTIAFTRRQFIQYLNHLNSKIDVVSWDKKDLDLRDYDLEDIKFGNLSAGDRYGIVKALQDKFLYKDGNDKYRFVPPIPLDEFRRQAKEQLSDILISFKAKNKVCTRNVNVTKNKGGANRKTQLTPRGPLHNETIYGSSLEYVTKENEKIGSSFDTERITTVCKKKFRDALARRLEEFGGDPKKAFTGKNSPEKNPIWVDEHHSEQVPAKVRTVTMEQRFTGRKPIDATLKIEKVIDKRIREILQARLDEFDGKAAKAFSNLDENPIWLNKEKGIAIKRVTVSGPANPVPVRFKRDKDGKPIIDDAGKTIGADFVTPGNNHHIAIFRDSSGKLQEHPVSFLEATIAKSHGLDVIDRNYNKDEGWEFLFTLKQNEYFVFPNSETGFNPLDYDLTDPRNYAEISPNLYRVQSISTNDYFFRHHLETTSEKNNSLYGITWKRIRNASALEGLVKVRIDNLGRIVAVGEYD

SEQ ID NO: 6505 - protein, 1398 aa, synthetic construct
  REGION 1..1398: note = Synthetic
MSFKKILGLNVGISSIGWAVVHENEENPNLNTITKLGVRVIPITKDEKNNFEKGLSVTPNAERSSARSARRNLQRFKLRRNNLIALLLQNQIISSNSSLTEKGKFTSFETLKNRAKATKERIEPEELARVLLHINKKRGYKSSRKVKNNEDGKAIDGMEIAKLLYEKKLTPGQYTYQLIRKGKKQTPDFYRSDLEKERSVLWDFQKKYYPDILTEDFKKELEGKGQRATAALFLKKYGIRVAINKGKRDDKKLQAFKWRNQAISEKITLEEIAYVLADINNHIANSSGYLGAISDRSKELYFNQQTIGENLFSQVEKNIHTKLKNQVFLRQDYLDEFEQIWETQAQFHPQLTPELKKKIRDSVIFYQRKLRSQKRLISLCEFENQEIEINKNGKKKKKKIGLKVAPKSSPLFQQFKIWQSLGNVLIKREGNDRPLTLKEKELLFTELNIKGNLSGPKALSLLKLPSKETKINFTILEGNRTQEQLYRIYLKILDMEGYNVFELLDISEDQEELKPGDSKIPASEIKEIVKSVFETCSISTSILDFDPLLPNPEFENQSAYQLWHLIYSYEGDNSTSGNDKLLELLTTKFGFKKEYAQLFASISYDSEYGNLSSKAMRKIFPYCKENTFSEACILAGYQHYSKHYLSREDSNNRKLKDRLEILPKNSLRSPVVEKVINQLINLVNSLMDEYGAFDEIRLESAKELKKNAKEREKISKNRDAAKIRYQKYAEILKKEFNISSPSKNDIIRYRLYLELEANGFNDLYTHNPINKDYLFTNNYDVDHIIPQSKIFDDSFSNKVLVPRQANLDKSNLTAFDYLSNQGKEKEERFQYVISELYKKGAISETKYKNLRKKGSEIGESFIYRELKDTPYIAGKIKEILFEITPDVVTTSSNITSKLRKDWNLTGLMKELNIEKFRNAGLTKLVENSRGEKKEMIIDWDKGNDHRHQALDAILVAFTSRNHIHYLNYINARDDEKHKRHAAIIAIEKKIKYKYNKINENESSPSRFTFPTQNFRQEVEKQLKEILVSYKTKNTVATVNLNKPKKKGGYSPKLELTPRGPLHKETIYGMSKISRTKEIMISSKCNYETVSMIQNPIYKNALLKRLNDYFNDPKKAFSGKNSVTKKPIFLNAYSTDTIPEKVTIQWFEKVYTIRKAITPENFKNEKTIEKVLDPTIQNILKNRLKIAHGNAKEAFSDLEKKPIWLNKEKGICIKTVTITGVNIVESLHTKKDHFGNELLDINGKPIPVDFVSTGNNHHVAIYEDAEGNLQEKIVSFFEAVEKVNQGLPVIDKFYKGNQGWKYLFTMKQNEMFLFPSEDFNPNDIDINDEKNLNLISQHLFRVQKLASKDYYFRHHLETGIEINDANLKRITWRRERPSGVRNIVKVRLNHIGKIVHIGE

SEQ ID NO: 6506 - protein, 1398 aa, synthetic construct
  REGION 1..1398: note = Synthetic
MKKILGLDLGTTSIGWALVNEKENDNEKSEIIRLGVRVNPLTVDEKTNFEKGKSITTNADRRLKRSMHRNLQRYKLRRKNLIACLLEHHIITEDTPLFEQGNNTTFKTYRARAKAATEEISLEDFARVLLMINKKRGYKSSRKVKDGEEGELIDGMEIAKRLYEENLTPGQLLLDLYNKGKRNRPTFYRSDLQAEFDKIWEVQAKYYPNILTNDFKDSIHGFNKTQTSGAFYGVHQIYTAKNSGKEGYAQSLLWRTEALKHQLDIEEVAYALADINGAINNSSKRLAMISDRSKELYFSHQTIGQYLMKRLDENPNNSLTNIIFYRQDYMDEFETIWEKQAQYHPELTKELKKEIRDIIIFYQRDLKSCKNLVSYCELEHTEREIIIDGKKKVILTGCKVCPKSSLLFQDFKIWQILNNLQVSVVGTQRKRIKKDKTQLSLFNDAETGALNRFLTQEEKDILYNELSIKDKLSKKDVLKILFDNPKNLDLNYKEVEGNRTMATLFKAYQDIISLSGNGEYDFSKMPAEEVLPLVKEIFTGLGYKTDFLTFNPLLDGKALEQQPAYRLWHLLYSYTGDNSATGNEALLQKIQDICGFEKEYATILSNASFALDYGSLSAKAIRKILPHMMKGYEYSEACKMAGYNHSVRSLTKDELANKDYKNRLDEIKRNSLRNPVVEKILNQMINVVNEIIKTYGKPDEIRIEMARELKKSQEERELLDAAIRKNTAESEQLRKELEKEFGIQHVTRNDILRYKLYNELKINGYKTLYSNTYIPREELFSKRFDIEHIIPQSRLFDDSFSNKTLEARDINIEKGNMTAYDYVAGKYDEKYLADYESRIEDLFEQKVISRTKRNNLLMKEEDIPSDFLARDLRDSQYIAKKAREILEDLVPFVVTTTGAVTSRLREDWQLVNLMQELNWDKYDALGLTERYTDKNGNIVKRIKDWTKRNDHRHHAMDALTIAFTKRSFVQYLSNINARSDKSSSIYGIEQKELHRDEKDHKLVFNAPMPLNEFRAEARKQLESILVSIKAKNKVVTKNINKAKTKDGHQNKVQLTPRGALHNETVYGKIQNYEAEYRKVDGKFTEDVILRVSNQKCREALLKRLAEFDNDPKKAFTGKNSLEKNPIWLNAEHSYAVPLKVKLFKIVDVFTIKKAVDKDLKLDKVIDLKVRAILQQRLDEFGGDAAKAFSNLDDNPIWLNKEKGIAIKRVKIRAKVSSDTSVPLHIKKDLFGNMLKDAKGIALPTDYVNTASNHHVAIFVDEDGNWHEHVVSFFEATVNARLGHPIVDKYYKSEEGWNFLFSMKQNEYFVFPNEKTGFIPSEIDLMDPKNYPLISPNLYRVQKFSSSFYVFRHHLETNVDESNELKETTWKRITSVKGLEGVIKVRINHLGNIVNIGEY

SEQ ID NO: 6507 - protein, 1398 aa, synthetic construct
  REGION 1..1398: note = Synthetic
MKKIIGLDLGTNSIGWAIVNEKENDSEKSSIIRLGVRVNPLTVDEKTNFEKGKSITTNADRRMKRSMHRNLQRYKLRRKNLIECMLENGIITEDTPLFESGNRSTFNTYRARAKAVEKEISLEDFARVLLMINKKRGYKSNRKIKDTEEGELIDGMEIAKKMYDEHLTPGQLLLDLLKKGKKNKPIFYRSDLQSEFDKIWEVQSVYYPDVLNEEFKQRINGFNKTQTSGAFYAIHNVSTVKNNGKGGYEQALEWRTKAIKEKLDIEIVAYVLCDINGAINNSSKRLAMISDRSKELYFNHQTVGQYLMEIINHNPNSSLKNIIFYRQDYLDEFEAIWERQAQYHPQLTPQLKKEIRDIIIFYQRDLKSCKSLISFCEFEHKDKEIEVDGKKKTIITGYKVCPKSSPLFQDFKIWQVLNNLKVSVNSRKLKRIKRNDGQLPLFDSLDDEPGNRYLDQEEKDILYKELTFKEKMSKKDVLNLLFENPQTLDLNYNEVEGNRTMAAFFKGFQDIISLTGNGEYDFSKMPADEVLATTSEIFSGLGYKTDFLQFNLLVQGKDLDKQPLYRLWHLLYSYSGDKSITGNDALLRRISEICGFEKEYASVLANISLPIDYGSLSAKAIRKILPFMMKGLEYSEACEKAGYKHSARSLTKEDLQKKEYKSHLSVLRKNSLRNPVVEKILNQMINVVNQLIDTYGKPDEIRIELARELKKSQEERASLSDAIRKNTGESDSIRKILQDEFKIQHVTRNDILRYRLYEELKLNGYKTIYSNTYIPREELFSNRFDIEHIIPKARLFDDSFSNKTLERRDINIEKADKTAYEYVADKYDEKWLSDYETRIEELFDQKAISKTKRNHLLMKAADIPTDFLSRELRDSQYIARKAREILEDIVPIVVSTTGAITSRLREDWQLVHIMQELNWNKYDQLGETETYTDKNGEIIRIIKNWTKRNDHRHHAMDALTIAFTKPSIIQYLNNLNARSDKGGSIYGIEQKELNRDNRHNKLVFNAPMPLDEFRAEAKKHLESILVSIKAKNKVVTKNVNKTKKKNGIIKTNQITPRGPLHNETVYGKIKNFVAEYKNVNGQFDESTILRVCNQRYRNALLKRLSEYDYNPKKAFTGKNCLEKNPIWLNAEHSYSVPTKIKLFKVVDVFTIRKSIDSNLKIDKVIDKKIREILQQRLDENGKDANKAFSNLNDNPIWLNEEKGIAIKRVKVKAKVSSDTSVPLHIKKDLSGNVINDDEGRVVPTDYVNTASNHHIAIFVDSNGIWQEHVVSFFEATASALLGMPIVDKSYKSEEGWKFLFSMKQNEYFVFPNKETGFNPSEIDLMDESNYPIISQNLYRLQKFSSSDYVFRHHLETNVEENNALKGTTWKRIKSIKNLKGIVKVRVNHIGRIVAIGEY

SEQ ID NO: 6508 - protein, 1398 aa, synthetic construct
  REGION 1..1398: note = Synthetic
MKKILGLDLGTTSIGWALVNEKENDNEKSEIIRLGVRVNPLTVDEKSNFEKGKSITTNADRRMKRSMHRNLQRYKLRRKNLIECLLEHHIITDETPLFEKGNNTTFQTYRARAKAVTEEISLEDFARVLLMINKKRGYKSSRKVKDGEEGELIDGMEIAKRLYEENITPGQLLLDLYNKGKRNRPTFYRSDLQAEFDKIWAMQSTFYPEILTDDFKSSIRGFNKMQTSGAFYGVHQIYTAKNSGKEGYAQALLWRTEALKHQMDIEEVAYALADINGAINNSSKRLAMISDRSKELYFDHLTIGQYLMKRLDENPNNSLTNIIFYRQDYMDEFEAIWEKQAQYHPELTQELKKEIRDIIIFYQRDLKSCKNLVSYCELEHTEREITIDGKKKTILTGCKVCPKSSPLFQDFKIWQILNNLQVSVVGRQRKKIKKDKNQLSLFDDVETGALNRFLTQEEKDILYNELSIKEKLSKKDVLKLLFDNHNSLDLNYKEVEGNRTMAALFKAYQDIISLTGNGEYDFSKMPTDEVMNITSEIFKGLGYKTDFLTFNPLLEGKSLEQQSVYRLWHLLYSYTGDKSATGNEALLNKIQDLCGFEKEYAVILSNISFALDYSSLSAKAIRKILPHMMKGFEYSEACKIAGYNHSERSLTKEELAQKEYKSHLDEIKRNSLRNPVVEKILNQMINVVNEIIKTYGKPDEIRVEMARELKKSQEERELLDAAIRKNTAESEKLRKELEEEFGIQHVTRNDILRYKLYNELKLNGYKTLYSNTYIPREDLFSKRFDIEHIIPQSRLFDDSFSNKTLEVRDINIEKGNKTAYDYVSEKYDEQGVTDYESRVEELFNNKVISRTKRNNLLMKEADIPSDFLNRDLRDSQYIARKAREILEELVPFVVTTTGAVTSRLREDWQLVNIMQELNWEKYDALGLTEQYTDKNGNIVKRIKDWTKRNDHRHHAMDALTIAFTKRSIVQYLSNMNARSDKSGSIYGIEQKELHRDEKDHKLVFNAPMPLDIFRAEAKKHLECILVSIKAKNKVVTKNINKSKTKNGHQQKVQLTPRGALHNETVYGKIQNYEAEYKKVDGKFTEDVILRVSSQKHREALLKRLAEYGNDPKKAFTGKNSLEKNPIWLNADHSYAVPLKVKLYKIVDVFTIKKAVDKDLKLDKVIDNKVRAILQARLDEFNGDAAKAFSNLDENPIWLNKEKGIAIKRVKIKAKVSSDTSVPLHVKKDLIGNILKDSDGKALPTDYVNTANNHHVAIFVDNDGNWHEHVVSFYEATASALLGLPIVDKNYKSEEGWKFLFSMKQNEYFVFPNEKTGFVPSEIDLTDPKNYSLISPNLYRVQKFSSLFYIFRHHLETNVEEPNELRDMTWKSIRSVKNLNGAIKVRVNHIGSIVAVGEY

SEQ ID NO: 6509 - protein, 1398 aa, synthetic construct
  REGION 1..1398: note = Synthetic
MKKILGLDLGTTSIGWAIVNEKENDNEASSIIRLGVRVNPLTVDEKTNYEKGKSITTNADRRAKRSMHRNLQRYKLRRTNLIECLCQYNLITKETPLFEQGNYSTLSTYRARAKAVTEEISLEELAKVLLMINKKRGYKSCRKVKDGEEGELIDGMEIAKRLYEENLTPGQLLLELSQNGKRNRPTFYRSDLQAEFDKVWDIQSAFYPDILTDDFKHSLHGFNKTQTSGAFYAVHNISTAKNSGKEGYLQSLIWRADALRYKMGIEEVAYILADINGAINNSSKRLAMISDRSKELYFNHQTIGQYLMQRLNENPNASLKNIIFYRQDYMDEFEAIWEKQKQYHPELTPELKKEIRDIIIFYQRDLKSCKNLVNYCELEHEEREILVDGKKKTIMTGCKVCPKSSPLFQCFKIWQILNNIQVSVVGHKRKRIKKDKDQPSLFEDTQVESLQRFLDQEEKDILYKELSIKEKMSKKEILKLLFENPNNLDLNYKEVEGNKTMAALFKSFQDIISSTGNGEYDFTKMPADEVMSITSEIFTGLGYKTDFLTFNPLLEGKAFEQQPAFRLWHLLYSYSGDNSTTGNEALYNKIQEICGFDKEYATILANVSMPLDYGSLSAKAIRKVLPHMMKGYEYSEACNMAGYNHSTRSLTKDDLANKEYKSHIDSIKRNSLRNPVVEKILNQMINVVNEIVATYGKPDEIRIEMARELKKSQEERQLLDAAIRKNTTESEKLRKELEEEFGIKHVTKNDILRLKLYNELKPNGFKTLYSNTYIPREELFSKRFDIEHIIPKARLFDDSFSNKTLEVRDINIEKGDLTAYDYIAGKYDDDYLAEYESRIEDLYVQKAISKTKRNNLLMKESDIPSDFLERDLRDSQYIARKACEILEELVPFVVTTTGAVTNRLREDWQLVNLMQELNWEKYDALGMTDSYTDKNGNIVKRIKDWTKRNDHRHHAMDALTIAFTKRSIVQYLSNLNARSDKSGSIYGIEQKELHRDEKGHKLVFNAPMPLNEFRAEARKHLESVLVSVKAKNKVTTKNINKAKNKDGHQLKVQLTPRGALHNETVYGKICNFEAEYKNVDGKFTEETILRVSNQKYRQALLERLSAFDNDPKKAFTGKNSLDKNPIWLNAEHSHCVPLKVKLYKIIDVFTIKKAVDKDLKIDKVIDRRVREILQQRLDEFRGVAAKAFSNLDDNPIWLNKEKGISIKRVKIKAKVSTETSVPLHMKRDLWGNILKDKEGKAIPTDYVNTASNHHVAIFVDAEGNWHEHVVSFFEATASALLGLPIVDKNYKRDEGWKFLFSMKQNEYFVFPNEKTGFNPSDIDMMDPNNYTLISPNLFRVQKFSSSFYVFRHHLETNVEEQNELKDTTWKSIRSVKKLEGAIKVRVNHIGAIVAIGEY

SEQ ID NO: 6510 - protein, 1397 aa, synthetic construct
  REGION 1..1397: note = Synthetic
MKKVLGLDLGTNSIGWALVNEATKEEKKEGKSSEIIKLGVRVNPLTVDEKTNFEKGRPLSTNADRTLKRSARRNLQRYKLRRRNLIEILIKNGFITKDTPLTETGKDTTHQTLKLRAKSAKEKVDLKDFAKILLTINKKRGYKSSRKVNSDEDGLAIDGMAVAKHLYEQNLTPGQYVLNLLQKNKKYVPDFYRSDLQEEFKNIWNNQKTYYFDILTDTLFEELKDKNKSQTWAICKKPFDIAGIKQIGKASDKRLERYKWRTEGLTQKLNLEYLAIALQEINNDINKSSGYLGAISDRSKELFFNKETVGENLYRQLVKTPHTSLRNQVFYRQDYLDEFETIWETQAKFYPQLTHTLKEEIRDVIIFYQRKLKSQKSLISFCQFESWEQTYIEKETGKSKTRTVGRKVIPKSSPLFQEFKIWQNLNSLEFRNSDEGEIIEFIKLDEDIRQTVFEELNLRGNLKPNDVLKILGNYISLGKVSQWKCNFEEIEGNRTNAALYNVYQIIAENEGYGFDWAKKTASEINKELKNIFPQLGIDASILDFDFTQANFDKQTSYQLWHLLYSAEEDFKISEEDKVLYGNSSVSLKKKLHQKYGFKPEYTKLLTNISLQPDYGNLSAKAICNILPYLKENNVYSEACDLTGYNHSNFLTAEEQAKRPLKPILELLKKNSLRNPVVEKILNQMVNVVNQVIETYGKPDEIRIELTRELKKSAKERANMTKSIADATRRNDDYRKTIIKEFGIPNPTKSDVVRYRLWQELASRGYKDIFTDTEIKPQELFSNKIDIEHIIPKALLFDDSFSNKTLAFKKDNLKKANRTAYDFIANDYAPNLENYIERVESLHKDRKITRAKRNKLLMLQSKLPDGFIERDLRNSQYITKEAKKMLYEVCRTVVSTSGSITDKLREDWDLINVMKELNFPKYKALGLTEKIERYDIGAEKMKEVEIIEDWNKRNDHRHHAIDALTVAFSTHSHIQYLNHLNARRDEGHKKHAAIIAIESTITEKEGNKKRRFIAPLPNFRLQAKEHIESILVSFKNKNKVVTNNINKTKRIKKDKFNTKVQLTPRGQLHKETIYGKIKQPLEKHIKLNKSFTLEQAKLIIDKRQREKVLNHLEKYAHNSDIAFNSKTLKKNPLLISDEPLKEVLCFEEVFTIRKDISYDNFKNEKQLDKVIDEKVKQALKERINQYNGDFREAFSDIERNPIWLNKAKGICVKRATIKGVSNAEPLHTAKNHLGEEVLTENKEQIPVDYVSTGNNHHVAIYEDEDGNLQEKVVSFYEAVIRVNEGLPIIDKEYNKSLGWTFKFTMKQNEMFVFPSEDFNPTEIDLLDQKNASLISPNLFRVQKFTIKDYFFRHHLETTVENNNTLKNTTWRREGLSGIYGIIKIRLNHLGEIVQVGEY

SEQ ID NO: 6511 - protein, 1397 aa, synthetic construct
  REGION 1..1397: note = Synthetic
MKKILGLDLGTTSIGWALIEEAEKRENSKIIKLGVRVNPLTVDEKINFEGGKPISTNADRTLKRGARRNLDRFQLRRDNLIEILKEHNFINDDTALTEIGKNTTYETLFIRAKAAREKITLEDLSKVLLAINKKRGYKSSRKTKEESDGVAVDGMAVAKILYEYELTPGEYTFSLLKNKKKHIPDFYPSDLKAEFLAIWENQKNYYPELLTQALFLELKDKKSGQTWTICSKPFEIEGKYLKGSNDEQRLLKYQFRNDGLKEQLDLEQLAIALQEINNDIDGTSGYLGKISDRSKILITDKITVGEFMYDQIKKDPHTSLKNQVFYRQDYLDEFELIWNTQAAFHKQLSDELKSEIRDVVIFYQRPLKSQKGLLSHCIFESWEQEYYDQIKEKTRKRTVGHRVIPKSSPLFQQFKIWQNINDLEFKYIGKNIDELKKEDLIIDKKLVTLKIDQEDRELLFNEANSKANSKGKISTTEVLKLLGLSSKDWKCNFEEGINANTTNQKLLDVYQTIANREGYGHDWSKKTGSEIWEELQVVFNDIGIDNGILGFDPLIEGNEYSSQKSLELWHLLYAAGDGGKVQEEDQLIYGNQDVALRKKLHLKYGFKPEYAKMLSNISFPNDYGSLSSRAIRKIMPHLIEGHDYYEACDLAGYNHSNSLNKEENDNRELADHLDLISKNSLRNPVVEKILNQVVNLVNQVIDTYGKPDEIRIELARELKKSTEERKKMTQYINTATKLNLDIAKTIQKDFGFTPTKSDVVKYKLWEELSTRGYKSLFSDTYIAKEDLFSKKIDIEHIIPKALVYDDSFSNKTLAYREVNLKKANRTAMDFISQDKSKDIEVYKERVEALYDKGKGAITKAKRDKLLKAAGDINEGFIERDLRNSQYIAKKSRTLLEKVCKTVTPTTGMITDKLREEWGIINVLKELNLDKYKALGLVEVEQRKHGKEVEKIKDWTKRNDHRHHAMDALAVAFTTVSHIQYINNLNARRNTLHEKHKLILGIENKITEMVLNKNGKNKRVYIKPFPNFRSHAKKNLEEILISFKAKNKVVTKNINKTKKEGGYNRTKSLTPRGQLHKETIYGKSLTPEVKTTKLNKRFAFAKAEHVIDQKQKIIVLEYLKKYKDDPELAFDGKTLKKDPLLWHDKPLTEVLCYKEIYTIRKDVSPDLKIDKVIDNGTKEILRKRLSEYGNNAKEAFSNLENNPIWQNKERGIAIKKVTITGVSNAVPLHTAKDHLGTDLIDENNNKIPVDYVSLGNNHHVAIYKDPKDKLQEKVVSLYEAVTRSNQDLPIIDKTYNQELGWEFLFTMKQNEMFVFPSEEFDPKEIDLMDEKNRQLISPHLFRVQKIANKNYMFRHHLESTINYNLDFTYKHYQSLGLLEGLIKVRLNHIGQIVHVGEY

SEQ ID NO: 6512 - protein, 1396 aa, synthetic construct
  REGION 1..1396: note = Synthetic
MKKILGLDLGTNSIGWAVVNEKEDDREKSSITKVGTRKVSLTSEEQNNFNKGKSAGTNAKRTLKHGARINLQRYKLRRDALIRVLKENNFITDDTLLSENGNNTTFETYRFRAQAADSEVTLEQLARVLLMINKKRGYKSNRKAKSKDESGQLIDGMDIARQLYDENLTPGQYTLSLIKQGKKKVPDFYTSDLNNEFERIWSFQKQFYPDLLTDDLKTELNGKDEKGVGTICLDKFGIVGIKRNTKGWEQKKEDYVWRAESLEKKMDLERLTIVFQKICGQIKNAGGYLGSISDRSKELYFSGQTVGQYKMSELINNPNRSIKNQVFYRQDYLDEFERIWETQATFHKELTPELKHEIRDIIIFYQRPLKSQKKLVAYCELESKQVEVEVNGKKKKVTIGQRVCPKSSPLFQEFRIWQQINNIQVSGYIIPESQTDLFGNTPANKKGRRFLLQDEKEILFKELNLKEKMSKTEILKLLFDNYKELDLNYKEVKGNTTLAKLFQAYKTIIEQSGHELNNLSNKSAGDIIDIIHKIFDGLGFNTDILAFDSSIQGKAFEKQPLYRLWHLLYSFEGDKSKTGNEKLIKKISDLYGFDKEYASILAGIVFEPEYGNLSAKAIRKILPFMKDGLEYSDACLYAGYRHSKRSLTKEEINSKQLADHIELLPRNSLRNPVVEKILNQMINVVNAVIVEYGRPDEIRVEMARELKLNNVRREECIRTINKSTSENESYRKKLQTELEGMEYVSRKDIIKYRLYLELESNGFHTLYSNTFIPLEKLFTREFDVEHILPQAKLFDNSFANKTIEKRSVNQEKGDRTAYDYVYSKYHEKGLEDYKKRVEDLYKKGKISKTKRNRLLTQEQDIPKDFLNRDLSNTQYIARKACEILESVVKTVTTTTGSITSKLREDWQLVDVLKELNWDKYDKLGLTEIIKGRDGQRIRHIKDWTKRNDHRNHAMDALTIAFTKPSFIQYLNNRSARSDKNSIISKIEQKELYRTADGKTKFLPPMPIDEFRAEAKRHLENILVSTKAKNKVVTRNVNVTKTKRTETNKREQVQLTPRGELHNDTIYGRRKFYDTDNEKVNASFDVSKIMTVADKRYREALLKRLEQFDGDAEKAFTGKNSLEQNPLYVDELHTKKVPDMVKTVKFKTIYTQRKGISDELKIDKVLDKRIRTILEERLAEFNGDAKKAFSNLDENPIWLNKEKGISIKRVTINSGLKDLIALHDKHDNNGRLILDKAGRKQPSDFIYTDGNHHVAIFCDSEGNIQEHLVSFYEAVARAVQHLPVIDKNYNKDKGWQFMFTMKQNEYFVFPNKETGFDPKEIDLFNPDNYEVISRNLYRVQKLSSKDYVFRHHLETTVNYKKELRGITWKRIRSLEHIRNIVKVRINHLGQIVDVGEY

SEQ ID NO: 6513 - protein, 1396 aa, synthetic construct
  REGION 1..1396: note = Synthetic
MSKKILGLDLGTTSIGWAFVIEADNQEYSEIKKIGVRVNPLTTDEQTNFEKGKPVSVNADRTLKRGARRNLQRYKQRRENLVEVLKNNNLITSDSVLAENDKNTTHSTFEIRARAASEKVEKEELARILLMINKKRGYKSSRKAKNEEEGQAIDGMAIAKRLYDENLTPGQLSCALLKEGRKVLPDFYRSDLQTEFNGIWDFHQSFYPDILTDGFKNEIAGKGQRATAASFWNRYKFNTAENKGTKAEKRLRSYEWRSKAINTKLSAEEVAYVLTEVNNNISNSSGYLGEISDRSKELYFNKETIGQYLYKQLLVSPHSRMKGQVFYRQDYFDEFETIWETQSRYHSELTKDLKIEIRDIIIFYQRKLKSQKGQVGICELENKEIDLEIDGKKVTRTIGAKVIPKSSPLFQEFKIWQNLNNLLFQNKKSKEIIPLDLDAKGILFEELNSKGNLKTDDALNILGYNPKEWDANFSSLEGNKTNQIFYETFLKMLELEGHEEYVLSDFSGKEIKELILSFFESMGIEISILNFSADLDGKAFEKQPAYLFWHLLYSYTDDSSTTGDKQLLEILQSKFGFKKEHAILLSNINFENDYGNLSAKAIRKILPFLKAGHPLSGESKFDGSLSARLLAGYKDSSSITKEENDNRDLKERLKILPKNSLRNPVVEKILNQMVNVVNAIIDDPSLGRPDEIRIELARELKKNAKEREEMTSQINSAKTNHEAIRKKLINEFGVKNPTRNDIIRFKLYDELKLNSYKDLYTNHYISPQELFTNKYDIEHIIPKSRLFDDSFSNKTIVPRSVNANKDKATAYDFISNTYSNDLKDYLARVEMMFKTKDGSISKAKYKKLLMKGSDIGEGFIERDLRDSQYIAKKAKQMLLRICRTVVSTTGSVTDRLREDWNLVNVMQELNMDKFRKLGLTEMVEKKDGSFKERITEWTKRNDHRHHGMDALTIAFTRHEHIQYLNNLNAKNKEDKKGKEIYGIEQKITFLEGENGSKKRKFKAPLPNFRNEAKSHLENLLISCKSKNKVTTKNKNKVKVKNGTKTRIELTPRGALHKETVYGRIRQYKTKEEKIGAKFDLETIKTVANSTYRDLLTDRLLNNENDPKKAFTGANSLIKKPIYINSGKVDVVPEKVKLVWLEDDFTIRKEITPDLKIDKVIDSGIRKILENRLMDFDGNAKEAFSNLDKNPIWLNEKAGIAIKRVKISGVKNAESLHYKKDNLGNYVEDNLGKRIPTDFVSTGSNHHVAIYRDEEGNLQDQVISFYETVERVNQGLSIIDRSYNQDKGWKFLFSMKQNEYFVFPASDFDPSEVDLLNSANNKLISPNLFRVQKFSKVTYGNSSVRDYVFRHHLETSVEEKKALKDVAYKSIKSVSNFENIIKVRVNHIGKIVKVGEY

SEQ ID NO: 6514 - protein, 1395 aa, synthetic construct
  REGION 1..1395: note = Synthetic
MKKILGLDLGTNSIGWALVKERENENEQSSIIRLGVREIYLTTDEQSNFEKGKSITTNADRTQKRSMRRNLQRYKIRRDSLINVLKDHGFITADTLLNENGNRTTFETYRLRARAVTEEISLEEFARVLLMINKKRGYKSSRKVKSNDESGQLIDGMEVAKKLYDDNLTPGQYVALLLHNGKNSIPDFYRSDLVDEFNKIWNFQRLFYPNVLTDNLKEELKGKGDKETWAICSKPFDIVGLKRKTKGWEQKKEDYVWRAESLHHKIDLERLAIVLQKVNGQIKNSSGYLGAISDRSKELFFYKLTVGQYQMSELDKNPNFSLKNQVFYRQDYLDEFECIWETQAKFHKELTPELKHIIRDIVIFYQRPLKSQKGLISLCELESREIEIEKNGKKVKKTIGPRVCPKSSPMYQEFRIWQTINNLQVSGMIVADNRFDLFGETVGMKFGKRFLEQEEKEILFKELNFKSKLAKKEILRLLFKNYKELDLNYNEVKGNTTMAALLEACSKIIEMSGHGEYDFSKMTADEIKDFVFPIFNGLGFNTDILSFDSSVEGKAFEKQPSYMFWHLLYSYEGDKSKTGNESLINKISECYGFDKEYAAVIAGIRLEPDYGNLSVKAMRKILPYMKDGLGYSDACQYAGYRHSKRSLTKEEIDSRPLKNKVDLLPRNSLRNPIVEKILNQMINVVNAVVDVYGRPDEIRVEMARELKKTKAQREETVKTIRKVTVENEKYKKELEEEFGLKNVSRNDIIRYRLYLELKDNGFKTLYSNTYIPREKLFSKEFDIEHIIPQAKLFDDSLSNKTLEARNVNIEKADSTAYDYVKAKYGDEGLKKYNEKVKQLYEKKIIGKTKFKRLLTTEKDIPDGFINRDLSNTQYIARKACEILEEVARRVVSTTGSVTSRLREDWQLVDIMKELNWDKYDRLGLTEIVEDRDGRRIKHIKDWTKRNDQRHHAMDALTIAFTKPAFIQYLNNLNARSDKGGSIYTIERKELYRDNKGKLRLYPPMPLDEFRAEAKCHLENILVSIKAKNKVVTRNVNITRTEKAEKGKHERIQLTPRGKLHNETIYGSIKRYDGNKEKVNASFDVSKIMTVADKRYREALLRRLEQFEGDARKAFTGKNSLEKNPLFVDELHTKKVPDIVKTVKFGTIYTQRKEISDELKIDKVIDNKVRKILEERLAEFNGDAKKAFSNLDENPIWLNKEKGISIKRVTINSGLKDPTALHDKRDNNGRLILDKDGKKQPTDFVSTSNNHHVAIFCDIEGQIQEHLVSFYEATARAIQHLPVVDRNFNKDKDWQFMFTMKQNEYFVFPNKETGFDPKEIDLLNPKNYAAISPNLYRVQKLSSKYYVFRHHLETTVDDKKELLGITWKRIRSLDNLRDIVKVRINHLGQIVNVGEY

SEQ ID NO: 6515 - protein, 1395 aa, synthetic construct
  REGION 1..1395: note = Synthetic
MKKILGLDLGTTSIGWALVNEKENDNEKSVIIRLGVRVNPLTVDEKTNFEKGKSITTNADRRMKRSMHRNLQRYKLRRKNLIECLLEHHIISDETLLYEQGNNTTFQTYRARAKAVTEEISLEDFARVLLMINKKRGYKSSRKVKDGEEGELIDGMEIAKRLYEENMTPGQLLLDLYNKGKKNRPTFYRSDLQAEFDKIWNTQSAFYPNILTDDFKSSIHGFNKTQTAGAFYGVHQITTAKNAGKEGYAQALSWRTDALNRQLGIEEVAYILADINGAINNSSKRLAMISDRSKELYFNHQTIGQFLMKRLDENPNNSLTNIIFYRQDYMDEFEVIWEKQAQYHPELTSELKKEIRDIIIFYQRDLKSCKNLVSYCELEHTEREITIGSKKKTILTGCKVCPKSSLLFQDFKIWQILNNLQVSVVGRQRKKIKKDNTQPSLFDDVETSALTRFLTQEEKDILYNELSIKDKMSKKEVLKLLFDNHNSLDLNYKEVEGNRTMAALFKAYQDIISLTGNGEYDFAKMPTDEVMNVTTEIFRGLGYKTDFLTFDPLLEGKSLEQQHAYRLWHLLYSYTGDNSATGNEALLNKIKELCGFEKEYAVILSNIPLALDYGSLSAKAIRKILPHMMKGYEYSEACKMAGYNHSARSLTKEELAKKEYKSCLDEIRRNSLRNPVVEKILNQMINVVNEIVKTYGKPEEIRIEMARELKKSQEERELLDAAIRKNTAESEKLRKELEDEFGIQHVTRNDILRYKLYNELKLNGYKTLYSNTYIPREDLFSKRFDIEHIIPQSRLFDDSFSNKTLEVRDINIEKGNMTAYDYVAGKFDEKYLVDYESRIEELYTQKAISKTKRNNLLMKEENIPSDFLERDLRDSQYIARKAREILEELVPFVVTTTGAVTSRLREDWQLVNLMQELNWDKYDALGLTERYTDKNGNIVKRIKDWTKRNDHRHHAMDALTIAFTKRSIVQYLSNLNARSDKSSSIYGIEQKELHRDEKDHKLVFNAPMPLNEFRAEAKKHLESILVSIKAKNKVVTKNINKSKTKDGHQNKIQLTPRGALHNETVYGNIRNYEAEYRKVDGKFTEDIILRVSSQKHREALLKRLAEFDNDPKKAFTGKNSLEKNPIWLNEDHSHAVPLKVKLYKIVDVFTIKKAVDKDLKLDKVIDDKVRTILQQRLDEFGGDAAKAFSNLDENPIWLNKEKGIAIKRVKIRGIANGEPIRVKRDVMGNIIKDENGNPIPNDFVNTGNNHHVAVFRDASGKLQEHVVSFYEATTRAILGYPIVDKEYNRSEGWEFLFSMKQNEFFVFPNEKTGFNPQETDLMDANNWSAISPNLYRVQKFTTGDYFFRHHLETNVENSNNLKDITWKRINSANNLAGIVKVRLNHLGEIVAIGEY

SEQ ID NO: 6516 - protein, 1395 aa, synthetic construct
  REGION 1..1395: note = Synthetic
MSFKKILGLDVGVASIGWAVVRENEENPNFNTITKLGVRVVPITSDEKLNFEKGKSITSNAERTLARSSRRNLQRFRLRRKNLIAILLQNQIITPTTPLTEKGKFTTFETLKIRAKATKEKIELEELARVLLHINKKRGYKSSRKVKNSEDGKAIDGMEAAKILYENKLTPGQYTYQLLEKGSNKIPDFYCSDLQIEWEVIWNFQKQFYPNLLTEDFKKELKGIGQRATAALFLKKYGIYTALNKGKREEKKLQAYKWRSKSVSEKIPVEELAYVIAEINSHITNSSGYLGTISDRSKELYFNQQTIGENLYAQVAKNTHAKLKNQVFLRQDYSAEFEQIWETQAKFHPQLTPELKKKIRDSIIFYQRKLRSQKRLISICEFENREIEIIKNGKKKKKKIGLKAAPKSSPLFQEFKIWQVLNNIVIKQEGKDRLLTWEEKELLFTELNIKGNISGQKALALLKLSPKDTKINVTILEGNHTQEQLYRVYLRILGMEGYDVFDLLKIPENQDEIKPADSKISAAEIKETVKSVFKTCSISPSILDFDPLLPNPEFENQSSYQLWHLLYSYEGDSSPSGNEKLLELLKNKFGFKKEHALLLASISYTYIYGNLSSKAMRKIYPYSKENTYSEACMLAGYRHSKNALPREELVKYQLKDRLEILPKNSLRNPVVEKVLNQLINLVNSLMDEYGAFDEIRLEMARELKKNAKEREKWSKNIADATSRNQKHAEILKKDFKISNPSKNDLIRYRLYLELKANGYNDLYTNTYIDINYLFTHRYDIDHIIPQSKVLDDSFSNKVLVPRQANLEKSNLTAFDYISHQGKEKEEHYLNVITELYKRGSISETKYKNLQKKGNEIGEGFINRDLKNTQYIVRKAREILSLITPNVVTTTGEITAKLRKDWNLINSMKELNMDKFRNARLTELVENSRGEKKEIIIDWNKRNDQRHHAIDALVVAFTTRNHVQYLNYMNAREDESHKQHSHILSIEKKIKYDKFHENGSRQSRFIYPTSNFREEAKKKLKEILVSYKTKNKVVTVNINKPKKKGGYSPKHELTPRGPLHKETIYGMIRILHTKEIKVSSKLNFETVVRIQNPRYRNALLERLKDNFNDPKKAFSGTNSLTKNPVFLTANSTETVPEKVTIQWFEKVYTIRKPINPTNFKNEKNIEKVLDPTIRTLLKKRLQEYNGNAKEAFSDLEKNPIWLNQEKGICIKTVTITGISNVESLHTKKDHFGKELLDINGNPIPVDFVSTGNNHHVAIYEDSEGNLQEKVVSFYEAVERVNQGLPVIDTLYNLDLGWKFLFTMKQNEMFLFPADDFDPNDIDIYDEKNLILISKHLFRVQKLSSKDYCFRHHLETSINFNDPALKGITWRRESPNGLRNLVKVRLNHLGKIVHIGE

SEQ ID NO: 6517 - protein, 1395 aa, synthetic construct
  REGION 1..1395: note = Synthetic
MIRNILGLDLGVSSIGWAFVQEDEKNSENNKIIKLGVRVNPLTVDEQINFEKGKPITTNANRTLARSARRNLQRFKLRRENLIDVLKKNNILKETDLLTEVGKNSTFQTQEIRAISAKERIELSEFARVLILINKKRGYKSSRKAKNEDEGQIVDGMAVAKKLYEENLTPGEYSYQLLEEGKKQLPDFYRSDLQAEFDKVWDFQKQYYPEILTDVLYKALQGKPKTGTWTTLKEPFSLVGIKQVGTMQEKKVEKYFWRSEAVKKQLDLESLAIVLQEINGNLYSSSGYLGAISDRSKELYFNNQTVGEYLYQQLKVNPHTKLKNQVFYRQDYLDEFEKIWETQAKYHKELTKELKEEIRDIVIFYQRKLKSQKGLISICEFENREIEITENGKTKKKTVGLKVAPKSSPLFQEFKIWQVLNNLQFQNVETKEIFPIDLDFKQSIFDEVNIKGRLSAKDVLDIVGYSGKEWKTNFKDIEGNNTNENLYTAFLKIIANEGIQFPKEFKLTIDDEIKVSKIHSSATVIKEFVKEKLSELGIDISILDFNPELDGSDFEKQSSYKLWHLLYSYEGDDSPSGNEKLYELLEKKFGFKKEHSKVLAEIGFSQDYGSLSSKAMRRIFTYIKEHKYSDACNLAGYNHSKNSLTKEQLENRVLKEQLEILPKNSLRNPVVEKILNQMINLVNEICKEYGRPDEIRIELARELKNNAEERANMTSEISKATLLHQKYAEVLQREFGIKSPSRNDLIRYKLYLELEKNLFKDLYTDVQIKRDELFTDKYDIDHIIPQSRFFDDSFSNKVLVPRGANLDKGNFTAFDYLEIKGKERLEKFLNLIKELYDKGGITKAKYEKLQKKGVDIGDGFIERDLRNTQYIAKKAKEILFEITNSVVPTTGRITDKLREDWNLVNTMKELNLEKYKKLGLTETVINSKGEEKQRIIDWTKRNDHRHHAMDALTVAFTTHNHIQYLNHLNARKDESHKQHKVISNIENLITKVFEKKNGSKQRRFVEPIKNFRIDAKKHLDEVLISHKTKNKVVTKNINKIKKKGSVFAKTELTPRGQLHKETIYGSSKFLKTKEEKVSGKFDLETINKVQNEKFRNALLERLEEFDGDSKKAFTGKNVLAKNPVYLDKAKTEQVPESVTLAWYETVYTIRKAVNPDNFKDFKNIEKVTDKRLRDILTERLKAFNGNSKEAFSDLEKNPIWLNKSKGIAVKTVTITGISNAEALHYKKDHFGNEILDEDGNKIAVDFVSTGNNHHVAIYEDDAGNLQERVVSLYEAVERINQGLSVIDKDFNQSLGWKFLFTMKQNEMFLFPSEDFNPKEIDLLDEKNLSLISKNMFRVQKFTIRDYFFRHHLETTVEDNSTLKGITWKREGLNGIRDFLKVRLNHSGKIVHIGEY

SEQ ID NO: 6518 - protein, 1395 aa, synthetic construct
  REGION 1..1395: note = Synthetic
MKKILGLDLGTTSIGWAYVHEKENDNEESSIIKIGVRVIPLSVDEKTNFEKGKSITTNADRRLKRSMHRNLQRFKLRRKNLIDCLKEHRIISDDTPLFECGNNTTFMTYQARAKAVTEEISLEDFARVLLMINKKRGYKSNRKAKDGEEGELIDGMEIAKRLYEENLTPGQLLLDLFKKGKKNRPTFYRSDLQEEFDKIWEVQSAYYPEILTDEFKASLHGFNKTQTSGAFYGIHKISTAKNSGKEGYQQSLLWRTDALVKRLAIEEAAYALADINGAINNSSKRLAMISDRSKELYFNHQTIGQYLMQRLDENPNASLTNIIFYRQDYMDEFEAIWEKQSLYHPELTKELKKDIRDIIIFYQRDLKSCKNLVSYCELEHSEKEIIKDGKKKKIQTGCKVCPKSSPLFQDFKIWQILNNLQVSVVGYQRKKIKKVDPQLSLFPDNAVDFTQRFLNQEEKDILYKELSIKEKMNKKDILKLLFENYRDLDLNYKEVEGNRTMAALFKAYQEIISQTGNGEFDFSKMPADEVLSVTTEIFTGLGYKTDFLTFDPLTKGKELETLPAYRLWHLLYSYTGDKSVTGNESLYSRIKDICGFEKEYATILANISMPIDYGSLSAKAIRKILPFMMKGYEYSEACKMAGYNHSSHSLTREQLEQKEYKSRLEEIKRNSLRNPVVEKILNQMINVINEIVATYGRPDEIRIELARELKKSREEREQLEEYIRKNTDESEKIRKVLESEFGIQHVTKNDILRYKLYNELKQNGYKTLYSNTYIPRDEIFSKRFDIEHIIPKARLFDDSFSNKTLEARDVNIEKGNMTAYDYVAGKHDEQVLSEYESRVEDLFAQKVISRTKRNNLLMKESEIPSDFLERDLRDSQYIARKAREILEEMVPFVVTTTGSVTKRLREDWQLVDIMQELNWDKYNALGLTESYTDKNGNIVRHITNWTKRNDHRHHAMDALTIAFTKRSIVQYLSNLNSRGNKSGSIYGIEQKELHRDEKGNKLVFNAPLPLNVFRAEAKKHLANILVSIKAKNKVVTLNVNKSKTKSGHHEKVQLTPRGALHNETVYGKIHNFEKEYKKVDAKFSEETILRVCNMRYRHALLERLSAFDNDPKKAFTGKNSLEKNPVWIDKNHSHCVPLKVKLFRVIDVFTIKKAVDKDLKIEKVIDKKIREILQQRLDTFDGNAAKAFSNLDENPIWLNQQKGIAIKRVKIRGIANGEPIRLKRDRKGQMIKDEKGTPLPTDYVNTANNHHSAIFVDANGEWQEHVVSFYEATTRAIMGYPIVDKDYNQSEGWHFLFSIKRNEYFVFPNEKTAFIPQEIDLTDKKNLPLISQNLFRVQKFTNGDYVFRHHLETNVEMENALKGTTWKRIRSIKELKGIVKVRVNHIGEIVAVGEY

SEQ ID NO: 6519 - protein, 1394 aa, synthetic construct
  REGION 1..1394: note = Synthetic
MKHILGLDLGTNSIGWALVKERENENEQSSITRLGVREIYLTADEQSNFEKGKSITTNADRTLKRSMRRNLQRYKLRRNSLISLLKDYGFITAETLLNENGNRTTFETYRLRAKAVTEEISLEELARVLLMINKKRGYKSSRKAKSNDESGQLIDGMEVAKKLYDDNLTPGQYVVSLLRKGKNNIPDFYRSDLVAEFDKIWNFQRQFYPDVLTDSLKEELKGKGDKETWAICSKPFAIEGIKRKTKGWEQKKEDYAWRAESLQHKIDLEGLAIVLQKVNGQIKNSSGYLGAISDRSKELFFNKLTVGQYQMAELDKNPNFSLKNQVFYRQDYLDEFERIWETQAKFHKELTPELKHIIRDIVIFYQRPLKSQKGLISLCELESREIEIERNGKKVKKTIGPRVCPKSSPMYQEFRIWQTINNIQVSGMVVADCQVDLFGETVGKKFGKRFLEQEEKEILFKELNFKSKLTKKEILKLLFENYKELDLNYNEVKGNTTMAALLEACSKIIEMSGHGEYDFSKMSADEITGIVFPVFSGLGFSTDIFSFDSSVEGKAFDKQPSYMLWHLLYSYEGDKSKTGNESLISKISECYGFDKEYAAVIAGISFEPDYGSLSVRAMHKILPYMKDGLGYSDACLYAGYRHSKRSLTKEEIEARPLKDKIDLLPRNSLRNPVVEKILNQMINVVNAVVDTYGRPDEIRVEMARELKKTKTQREETVKAIRKTTAENEKYKKELEEEFGLKNVSRNDIVRYRLYLELKDNGFKTLYSNTYIPREKLFSKEFDIEHIIPQAKLFDDSFSNKTLEARSVNLDKADSTAYDYVKVKYGEDGLEKYKEKINQLCEKKIISKTKLKRLLTTEKDIPDGFINRDLSNTQYIARKACEILEEITRRAVPTTGSVTSRLREDWQLVDMMKELNWDKYDKLGLTEIIEDKDGRRIRHIKDWTKRNDQRHHAMDALTIAFTKPAFIQYLNNLNARSDKGGSIYAIERKELYRDNKGKLRFYPPMPLDEFRTEAKRHLENILVSIKAKNKVVTRNVNITKAKKAEKGKRKRIQLTPRGQLHNETIYGRIRQYATKEEKVNASFTEDKIMTVACKRYREALLVRLRQHDGDAKKAFTGKNSLAKTPLYTDSLHTETVPEKVKTVMLAPLYTKREAVSPDLKIEKVIDIGIKRLLQKRLEQYGGDMQKAFSNLDENPIWLDEEKGISIKRVTISSVSNAEALHDKRDNRGQLILDKDGKKQPTDFVQTSGNHHVAIFRDADGNLQEHMVSFYEATARAIQHLPIIDKEYNKDLGWQFLFTMKQNEYFVFPNEETGFNPKEIDLLNPKNYALISPNLFRVQKLSSKDYVFRHHLETKVEYNKELFGVTWKRINTLSKIKDIVKVRINQVGKIEDLGEY

SEQ ID NO: 6520 - protein, 1394 aa, synthetic construct
  REGION 1..1394: note = Synthetic
MKRILGLDLGTTSIGWALVNEKESDNEQSSIVRLGVRVNPLTVDEKSNFEKGKSITTNADRRMKRSMHRNLQRYKLRRKNLIECLIENGIISEDTPLFELGNKSTFNTYKARAKAVEEEISLEDFARVLLMINKKRGYKSSRKIKETEEGELVDGMEIAKKLYQEDITPGQLLLELYQQGKKNRPAFYRSDLQAEFDKIWDVQSKFYPAILSQEFKKTVTGLNKTQTSATFYSIKSISTTKNSGKEAYAQALRWRTEALSKQLDIEEVAYVLADINGAINNSSKRLAMISDRSKELYFNHLTVGQYLMKSLELNPHASLKNIIFYRQDYLDEFETIWEKQAQFHHELTPELKKDIRDIVIFYQRNLKSCKNLVSYCELEHQEKEVVIDGKKKVIFTGCKVCPKSSPLFQDFKIWQVLNNLEVSVAEHKPQKAKEQSQASLFGSAEMSSLRRFLEQEEKEKLFKELSVKDKMNKKEILKLLFDNPQSLDLNYKEVEGNRTNAAFIKAYQDIISFTGNGEYDFSKMKADDILALITEIFQGLGYRTDFLTFNPLLNGKDFEQQPYYRLWHLLYSYAGDNSTTGNEALIKKIGEICGFEKEYAAILASITLPLDYCSLSAKAIRNILPHMMDGYEYSKACEMAGYRHSARSMTKQELDAKAYKDHLDILKRNSLRNPIVEKILNQMINVVNEIIDTYGKPDEIRIELARELKKSQEERALLDEAIRKTTADSEKYRKELETEFGIQHVTKNDILRYRLYLELKPIGFKTPYSNTYIPREELFSKRFDIEHIIPKARLFDDSFSNKTLEVRDVNIEKGNMTAIDFVSGKYDEQGVAEYESRVEELYAHKAISRTKRNKLLMKEADIPADFLERDLRDSQYIAKKAREILEGIVPFVVTTTGTVTSRLREDWQLVNLMQELNWNKYAALGLTESYTDKNGNVVRHIKDWTKRNDHRHHAMDALTIAFTKRSIVQYLSNLNARSDKGSSIYGIEQKELHRDEKGHKLVFNAPMPLDEFRAEARKHLESILVSIKAKNKVVTKNINRAKKKNGHQEKVQLTPRGALHNETVYGKIKNYEAEYRKVDGKFSEETILRVCNLKYRNALLKRLSEFNNDPKKAFTGKNSLEKNPLWLNEDHSHCVPTKVKLYRIVDVFTIKKAVDKDLKIDKVIDKKIRERLQARLDEFNGDAAKAFANLDENPIWLNQEKGIAVKRVKIRGIANGEPIRIKRDVRGNSIKDANGNTIPNDYVNTANNHHVAVFRDAAGNLQEHVVSFYEATTRAIMGYPIVDKDYNSDEGWKFLFSMKQNEYFVFPNPKTGFNPQEIDLLDEKNMPLVSPNLYRVQKFTTGDYVFRHHLETNVESDNVLRDVTWKRIRSIKELESIVKVRVNHIGIIVAVGEY

SEQ ID NO: 6521 - protein, 1393 aa, synthetic construct
  REGION 1..1393: note = Synthetic
MKKILGLDLGTTSIGWALVNEKENDNEQSSIIKLGVRVNPLSVDKNEQSNFEKGKAITTNADRTLKRSARRNLQRFKLRRENLLTLLKEHGFITDETVLCEQGNRTTFETRQLRARAVSEEITLEQLARVLLMINKKRGYKSSRKADSGEDGKLIDGMSVARQLYEQHLTPGQYVLNLLRKGKKYLPDFYPSDLTAELKAVWHAQQAYYPELLTQELFDALKNKNEKQTWAICAQPFGIKGMKRNGTTAEQKAENYRWRSEALDKKIGLEELAIVLQKINGQIHGTSGYLGAISDRSKELYFNHQTVGQYQMQLLEKDPNTSLKNQVFYRQDYLDEFERIWETQATYHPELTAELKHEIRDIVIFYQRQLKSQKSLVGYCELESKPKEVVVDGKKKKTITTGLRVCPKSSPLFQSFKIWQTLNNVQVSGNIIPEKQLDLFGTAATYKYGSRCLTEEEKQTLYKELSLKERMSAAEILKLLFKSGKGLSLNFREVDGNRTMAAFVKACQTIIVMSGHNEYDFAKLSYETVESTINQIFNALGIKSGFLNFDPCLEGKAFEHQPAYQLWHLLYSYAGDNSATGNEKLITRIAETFGMEHNFAAVFAAIMFMPDYGNLSAKAMRRILPYMMDGNEYSVACEYAGYRHSRRSLTKEELDKKPLVDTLPLLPRNSLRNPVVEKILNQMINVVNEVSAQYGKPDEIHIEMARELKKSAKEREQMTADITRATAQQEEYRRILQDEFGMPHVSRNDITRYRLWLELKDNGYKTLYSQTYIPREKLFSKEFDVEHIIPQARLFDDSFSNKTLEARQANLEKSNATAFDYVQSKYGEKGAKEYKERIDYLYADGVISKTKHDKLLMKEADIPEGFINRDLRDSQYIARKAREILESMVRVVVPTTGAVTDRLRDDWQLVDIMKELNWDKYNKLGLTETFKDHDGRQIKRIKDWTKRNDHRHHAMDALTIAFTKHSFIQYLNNLNARSNKAGSIYAIEQTCLYRDAHGKLRFMPPMPLDVFRAEARRQLQDILVSTKAKNKVVTRNINSIKRRGEKKQTVQLTPRCQLHNETVYGSVRCCVVKEEKISSSFTEEKIATVASPRYREALLKRLGEYGGNAKKAFTGRNSLEKNPLYLNDDHTLSVPAKVKTVTYETIFTQRKPIDKDLKVDKVIDEHVKEILEARLKEFGGDAKKAFSNLDENPIWLNRERGIQIKRVTIRGVSNAVALHDKHDVQGKPMCDSEGRRMPSDYVSTSSNHHVAIFRDANGNLQEHVVSYFEATARAIQHLPIVDRDYNKDEGWQFLFTMKRNEYFVFPNEKTGFDPKEFDLLDPKNYAVISDNLFRVQKITTKDYFFRHHLETSVENNKSLCDITWKRITSLNKLQGIVKVRVNNIGQIVAVGEY

SEQ ID NO: 6522 - protein, 1393 aa, synthetic construct
  REGION 1..1393: note = Synthetic
MKKILGLDLGTTSIGWALVNEKEKDNEKSSIIRLGVRVNPLTVDEKSNFEKGKSITTNADRRMKRSMHRNLQRYKLRRQHLIECLKEHGIINDTTPLFELGNHSTFKTYRARAKAVDEEISLEEFARVLLMINKKRGYKSNRKIKDTEEGELVDGMEIAKRLYDENLTPGQLLLDLYQKGKKTRPAFYRSDLQAEFDRIWEVQSVFYPEILNNDFKKHISGFNKTQTSGAFYAIYSISTTKNSGKEAYAQSLRWRCDALKDQLNIETVAYVLCDINGAINNSSKRLAMISDRSKELYFNHQTVGQYLVQCIDHNPNASLKNIIFYRQDYLDEFETIWERQAQYHQELTPELKKEVRDIIIFYQRNLKSCKNLINYCEFEHTEKEILVEGKKKTIMIGCKVCPKSSPLFQCFKIWQVLNNLQVSVVGHQRKRIKKDDFQLALFADTEGEPLQRFLDQEEKDILFKELTIRDKMSKKEILKLLFDNPQKLDLNYKEVEGNNTMATIIKACQEIISLTGNGDFNFSKMPADDVLAVTTEIFSGLGYKTDFLTFNPLLEGKAMEEQPFYQLWHLLYSYAGDNSISGNEALIKKIHDLCGFEKEYATVLANVSMPLDYGNLSAKAIRKILPFMMKGYEYSKACELAGYRHSARSLTRDELSKREYTSHLSELKRNSLRNPVVEKILNQMINVVNEIVATYGKPDEIRIELARELKNSKEEREQMDIAIRKNTADSEKYRKILEEEFGIQHATRNDIIRYKLYNELKQNGYKTLYSNTYIPREELFSKRFDIEHIIPKARIFDDSFSNKTLEVRDINIEKGDMTAYDFVAGKYDEKGVLDYEKRVEELVTNNAISKTKRNNLLMKEADIPSDFLQRDLRDSQYIAKKAREILEQMVPFVVTTTGSITKRLREDWQLVGVMQELNWQKYDSLGLTETYFDKNGNVVRHIKNWTKRNDHRHHAMDALTIAFTKRSIVQYLNNMNARSDKSSSIYGIEQKELNRDNKDHKLVFNAPMPLNEFRAEAKKHLDSILVSIKAKNKVVTKNINRAKTKDGHQHKIQLTPRGALHNETVYGKIKNFEAEYRKVDGKFTEDTVFRVSNRRYREALAQRLAAFGNDPKKAFTGKNSLEKNPIWLNADHSYSVPLKVKLYKIVDVFTIKKAVDKDLKIDKVIDGRIRELLQQRLNEFNGDAAKAFSNLDDNPIWLNKEKGIAIKRVKIRGIASGEPIRVKRDAKGGIMNDEHGNPIPNDYVNTANNHHVAVFRDASGNLHERVVSFYEATTRAMMGYPIIDKDYKQAEGWQFLFSMKQNEYFVFPSDGFNPSEIDLTDPQNYSLISPNLYRVQKFSEGDYFFRHHLETTVETDNSLKNITWKRINSVKSLEGIVKVRVDHIGRIVSVGEY

SEQ ID NO: 6523 - protein, 1393 aa, synthetic construct
  REGION 1..1393: note = Synthetic
MASKRILGLDLGTNSIGWALVEEDLSNSEKSKIVKLGVRVNPLTVDEKINFEKGRPLSTNADRTLKRSARRNLQRYKLRRQNLIEILKQNKIIDDNTILAESGKGTTHETLHSRAKAAKEKIALDDLAKVFLAINKKRGYKSSRKVSSEDEGQAIDGMYVAKKLYEENLTPGQYVLNLLNENKKYIPDFYRSDLQMEFKSVWDVQKVFYPIILTEDLFSKLQEKNKTQTWAICKEPFKIEGIKQQGTSKEKRKERYQWRADGLSEKLDLEHLAIVLQEINNDLNKSSGYLGAISDRSKELFFNKETVGENLYKQILKSPHTSLKNQVFYRQDYLDEFEQIWDTQSKYYPQLTENLKEEIRDVVIFYQRKLKSQKSLISFCQFESWEQDFVEKETGKSKTRIVGRKVIPKSSPLFQEFKVWQNLNSLEFRNSDKNEKIEFIELEDEIKQVVFNELNLRGDLKPNEVLKLLSNYISIGKVSQWKCNFEKIEGNRTNQALYNVYQLIADNEGYGIDWAKKSAREINEELKAVFPEIGVDASILSFDAEDDNFDGQSSYQLWHLLYSAEEDYKISEEDKILYGNSSVALKRKLHTKYGFKPQYASMLANVSLQQDYGNLSTKAIRKIIPYLKEGSIYSRACALAGYNHSNSLTSEEQAKRALKPKLDLLKKNSLRNPVVEKILNQMVNVVNQVIDAYGKPDEIRIELARELKKSAKERSEMTKGIADATKRNEDFKKKIQKDFGIINPTKNDVIRYRLWKELEPRGYKDIFTNTQIKSKDLFSKNIDIEHIIPKALLFDDSFSNKTLAYRKDNLKKANRTAYDFVSQDYNKDIEGFELRVKDLLKNGSITRAKHNKLLMSQSELPDGFIERDLRNSQYIAKKAKYMLFEVFRKVVSTTGSITDKLREDWDLINVMKELNMPKYKSLGLTEVKRRWDSGQEKEKEVEVIKDWSKRNDHRHHAMDALTVAFTTHNHIQYLNYLNARKDESHAIYSNIIAIEKKITKSKNGKRTFTAPMKNFRVEAKSHIESILVSFKNKNKVVTNNINKTKSRGHKFNKKVQLTPRGQLHNETVYGKIKLPQNKPTKISKRFTLDEAKQIIDKQKRELILSHLAKHDNIPELAFDSKKLKKEPLIFNDEPLKEVLCFEDVFTIRKEISSDNFSNEKQLDKVVDNQVRSILKSRVVEFNGNFKEAFSDLDENPIWLNKEKGISIKRTTIRGVSNAEPLHTAKDHFGNNRIDKDQNVIPSDYVSTGNNHHVAIYKDKIGKLQEKVVSFFEAVERVNQKLPIIDKNYNKHLGWEFQFTMKQNEMFVFPNEEQGFEPTEIDLFDKKNQKEISFNLFRIQKIGEKDYWFRHHLETTITNNLEFTYKRLRNPNALAGVIKVRINHIGNIVHVGEY

SEQ ID NO: 6524 - protein, 1392 aa, synthetic construct
  REGION 1..1392: note = Synthetic
MKSILGLDLGTTSIGWALVKESENDNEKSEIVKLGVRLVPLTTDERTDFEKGKSITTNADRTSKRSMRRNLQRYKLRREALVSELKKEHWIDEGYRFSEEGPGSTFSTLRLRAKAAEEEVSLQDLAKVLLQINKKRGYKSSRKLNSAEDGQAIDGMSVAKVLYDRGLTPGEYVYQRMLVGQYVVPEFYKSDLQAEFDKIWNLQKSYYPELTAELYDKLTDKNKSQTWAICRDELGVQGFKSSFTGKERLKEAYFNRQQASRQKVDLEVLTCVLQDINGQKASLSGLLSAISDRSKELYFNRMTVGQMLVRQIQEDPNLSLRNTVFYRQDYIDEFEKIWSVQSRFHPELTPELKKKLKDIIIFYQRPLKSQKGLISLCEFESREVDISVDGVIKKKKIGPRVCPRSSPLFQEFKVYQTVNNILVNGEPLDDNDREKLVGELAFREKMKGQDVLKLLYKTSKGMRINFEEVEGNRTMATILKACEKIVEGLGYDTGDLSKIAASEKVSRIEEIFAKEGFKSDFLHFDSSLPSPEFESQASYSLWHLLYSYENDKSVSGNESLIEKIKKLCSMDEASAKILSGCTFLSDYGSLSARAMRKILPYMKDGLEYSAACTMAGYRHSKRSLTKEELDSRVYVDRLELLPKNCLRNPVVEKILNQMINVVNSVVDTYGKPDEIRIEMARELKKSASEREKAQKDIAAASKVNESIVATLKGSPFFIDSPNRNDIIRYRLWEELKPNGYKTLYSGTYIPKERLFSKDFDIEHIIPQALLFDDSFANKTIESRQCNIEKSNRTAMDYVKSKYDSSGVQAYIDRVKGLTGVSKTKITRLLMESKDIPEDFINRELRDSQYIARKAREILESMVKFVVPTTGSVTARLREDWQLVNVMRELNWDKYEKLGLTSFREDRDGRAIPVIEDWTKRNDHRHHAMDALTIAFTRRQFIQYLNHLNAKIDTVDKTDIDLRDYNLEDISFDGLRDGDKFGIVKALQKKYLYKDDKQKYRFVPPMPLDEFRIEAKRQIEDVLVSFKAKNKVCTKNVNTTKVRGGQQRKIQLTPRGPLHEDTIYGKRLQYVTKEEKVGGSFDEAKIASVCKKSYREALMRRLMECGGDPKKAFTGKNSPEKNPVWVDEFHSGEVPLRVRTVSMASVYTVRKSVGQSLNIEKVLDKHIREILRARLEEYGGNASKAFSNLDENPIWLNKEKGIAVKRVTIDSGKNPIPLRSKLDKDGQIIYGEGQNPQESDFVVPGGNHHAAIYRTPSGKLQDVVVSFYEAVSRKNLGLEVIDRNFKKDEGWEFLFTLKQNEYFVFPNTATGFSPEDYDLTDPANNAVISSNLYRVQTVSVGDYRFRHHLETTVEDNEKLRDIAWKRIGLSGLVGAVKVRIDNLGRILAVGEYD

SEQ ID NO: 6525 - protein, 1392 aa, synthetic construct
  REGION 1..1392: note = Synthetic
MKKVLGLDLGSSSIGWAYVHEAENEAELGSSKIIKLGVRVNPLTVDEQRNFEQGKSITTNASRTLKRCMRRNLQRYKLRRENLIEVLKKHGFISDASILSEQGNYTTFETYRLRAKAAVAEISLEELARVLLMINKKRGYKSSRKNRGGDEGKFIDGISVAKQLYDRGITPGQFSLELLKEGKRHLPDYYRSDLQNELDRIWNFQQSFYPEILTQNFREQIRDKGQKNTSQIFLREYQIYTADNKGADKLSRALQWRVEGLSRKLSVEELAFVMSDLNGSISGSSGYLGAIGDRSKELYLGKQTVGQYLMEKLNTNPNGSLKSKVFYRQDYLDEFERIWETQAGFHKELTLELKKEIRDIIIFYQRSLKSQKGLISFCELESKLVEIEVNGKMRRKVVGSRVCPKSSPLFQEFKIWSILNNICVWSVDKSKSSEARKMDERDKEPNLNQEEKEILFKELSLKEKLSKRDVLELLFEDARKLDMNYEKVEGNRTQATLFKAYQEIIARSGHGEYDFTRMLSSEILEIVSGVFDGLGYNTDILYFNSEGELDQQPLYRLWHLLYSFEGDKSNSGNENLINKITNLYGFDREYAVILADVVFPPDYGNLSAKAIHKILPYLKDGNKYSLACEYAGFRHSKNSLTKEEREKRVLKERLDILPKNTLRNPVVEKILNQMVHVVNGVINKYGKPDEIRIELARELKKNAKEREEWTRAINKSTIENEKLRSVLKKEFGFTQVSRNDIVRYKLYLELESRGFKTLYSNTYIPLEKLFFKEFDIEHIIPQSRLFDDSFSNKTIELRSVNQEKDNQTAYDYVSGKGGEAGLQEYLERVEDLFKGGYINKAKYNKLRMTGKDIPDDFIDRDLRDTQYIARRAKAMLEEVVGNVVSTSGAVTDRLREDWQLVDVMKELNWNKYERLGLTEIVEDRDGRKIRRIKGWTKRNDHRHHAMDALTIAFTKPKYVQYLNNLNARGDKSSSVYGIERDELSRDSKGKLRFNSPMPLKEFRMEAKLHLENVLVSTKAKNKVITPNVNKSKKRGGMNQKVQLTPRGQLHQETIYGSIKQYVTKEVKVGSAFNMEMILKVANKAYREALLKRLNAFDQDAKKAFTGKNSLEKNPIFINDSHTCKVPEKVKVVSFETVYTIRKEIGPDLKVDKVIDKRVRDILETRLVEFGGDSKLAFTNLDENPIWLNKEKGIDIKRVTISGVSNVIALHDKLDKGGKLVLDEHGQPQPVDFVCSGNNHHVVVYRDPEGKIQDDVVSFFEATVRAKEGLPVIDREYKKQEGWEFLFSMKQNEYFVFPNEETGFDPKEVDLMNPDNYALISPNLFRVQTMSRVMYGNQVVRDYKFRHHLETTVKDCKELKDIAYKQYKSLDFASQIVKVRIDHIGQIVHVGEY

SEQ ID NO: 6526 - protein, 1392 aa, synthetic construct
  REGION 1..1392: note = Synthetic
MKRILGLDLGTSSIGWALVNESEDEREQSSIIKLGVRVNPLTVDEQRNFEAGKPITTNAERTLKRSMRRNLQRYKLRRDNLIEILTEHGFITPETILAEQGNKSTFETYRLRAKAVTEEISLEELARVLLMINKKRGYKSSRKLDTNEDGKIIDGMEVAKQLYDEGLTPGQYMLRLMDSGKRYTPDFYRSDLKDEFGRIWDFQKTFYPELLTDELRQELAGKNEKQTWAICAKTFSLVGLKRTAKGEELKRENYKWRVDSLSEKMDLESLTVVLQKINGQINGSSGYLGEMSDRSKELYFKKQTVGQYLMSRLDKNSHYSLKNKVFYRQDYLDEFEMIWENQARYHSELTDSLKHEIRDVVIFYQRSLKSQKGLISFCEFENRQMETVKYGKKRLKTVGLRVCPKSSPLFQEFKIWQILNNIQVSGKVVRKQSVDLFGETVEMANGKRFLYQEEKEKLFRELNIKAKMSKAEVLKLLFKNHKELDLNYKEIEGNRTQAALFAAYQTIIDMSGHGTHDFSKMCADDVMDIVSNVFGGLEFGTDILCFDSSLEGKAFERQPAYRLWHLLYSFAGDNSKTGNEKLISKISELYGFDREYAAIIAGISFQLDYGSLSAKAIRKILPYMKEGNEYSVACGYAGYRHSKNSLTKEELANKLLCNRLKPLPRNSLRNPVVEKILNQMINVVNSVANVYGKPDEIRIEMARELKNSAKEREEMTKAISKATADHEYYRQILKNEFGIENVSRNDIIRYKLYMELKDKGFKTLYSNTYIPREKLFSKEFDIEHIIPQARLFDDSFSNKTIEVRSVNIEKGNMTAYDYVCGKYDADKVSAYKVRVEELFKNGTISKTKRDKLLMSEADIPSGFIERDLRDSQYIARKAREILESLVRTVVPTTGSITSRLREDWQLVDVMKELNWDKYNRLGLTDFVVDKDGRRIRRIKDWTKRNDHRHHAMDALTIAFTKPSYIQYLNNMNARSDKGSSIYAIEKKELYRDNGKLKFQPPMPLDVFRAEAKRHLDGILVSIKAKNKVVTRNTNVSKIKGGTKKKVQLTPRGQLHNETVYGRIKRYVVKEEKVNASFDMQKIDTVANMRYRMALSDRLQQYGGNAKKAFTGSNSLQKNPLYVDDMHIIAVPERVKTVGFEYVYTIRKEVTPDLKIDKVVDSKVRNILKARLEQFGNDAKKAFVNLDENPIWLNKEKGIAIKRVTITGVSNALALHDKRDNSGKPMLDVNGHKMPVDFVSPSNNHHVAIYMDADGKMQDDIVSFYEATMRANQGYPVIDRDKNRSEGWQFLFTMKQNEYFVFPNEETGFDPNEIDLLDPNNYPIISPNLFRVQKLSKTEGRIYMFRHHLETTVDDKKELQEVTWKRINSLDKLKNVVKVRVDHVGRIVSVGEY

SEQ ID NO: 6527 - protein, 1391 aa, synthetic construct
  REGION 1..1391: note = Synthetic
MKKILGLDLGTTSIGWALVNEKENNEELSSIIRLGVRVNPLTVDEKSNFEKGKDITTNADRTKCRSARRNLQRFKLRREALADCLKRHGLMTDETPLCETNNSIIFKTYSNRAKAVCEKIALDDFVRVLFMINKKRGYKSSRKLNTDDEGTLVDGMDVAKLLYNEQITPGEYLLRLFKKGKKTRPDFYLSDLKAELERIWDFQRTFYPEILCNALKEDLKGKSRTQSSAIFYAKYKVSTAKIAGKDKRLQELTWRTDALRKQLTIDEVAYVICSINGEVNGSSQRLSMISDRSKLLYFNHQTIGQYLMQRLEENPNAGLKNIIFYRQDYEDEFNDIWNSQATYHKELTPELKKEVKDIIFYQRGLKSCKWLINYCELEHEEIEVKTPEGKLRKITIGSKTCPKSSPLFQEFKIWQVLNNLQVSPLNSRRKAKRKKDEEPSLFSDEDMNTACRYLNEEEKLTLFKELSIKKELKKKDALKLLFENYKELDLNYKVISGNVTMANLYRAFQDIISLTGNGEFDFQAMPAEEAEKTVEEIFGGLGYKTAFLHFDASLHDKEFERQPAYRLWHLLYSYAGDQSKTGIEALVKRIQELCGFEPEYARILANISFIPDYGNLSSKAMRKILPYMQDGYEYSEACSKAGYRHSASSLTKEEINKKNYKTHLDEIKRNSLRNPIVEKILNQMVNVVNSVIDTYSNIDEIRIEMARELKKSKPEREDMSFAISKATKETERIKGILEQEFKIQHVTRNDIIRYRLYEELKPNGYKTLYSNTYIPREDLFSKKFDIEHIIPKARLFDDSYSNKTLELRDINIEKGNQTAYDFVLSKYGEEGLYKYEQRVEEFKKNNEQAGTKCRKLLMREADIPSDFLNRDLNDSQYIAKKAHELLREIVPTVTATTGSITNRLREDWKLVNVMKELNWEKYDKLGLTEEYKDKDGNTVRHIKDWTKRNDHRHHAMDALTIAFTKPSFIQYLNNLNARSNRGGSIYGIEQKELERENNKLVFIPPIDPKIFRKQAKEHLSNILISIKAKNKVVTKNVNKTKSKSGTNRKVQLTPRGQLHLETVYGKIRTYKTEEIKVGTKLTEELIAKVADKKIREALMQRLSEYGGNIKKAFQNISKHPIWLNGSHTKHVPEKVKIVFFEDVFTIRKAITPDIKIDKVIDSKIRRILQERLNEFGGEASKAFSNLDENPIWFNRDKGIAIKSVKIRGIAKGTAIRVKKDIHGKTIIGNNGYPVANDYVNTGNNHHVAIFRDKDGNLQEHIVSFYEATARAIQNLPIVDRNYNSEKDWKFLFSMKQNEYFVFPNPNTGFNPSEISLKDEKNYALISPNLFRVQKLSHYYYVFRHHLETNVDTNLQLKDITWKRITAVNNLTGAVKVRIDHLGRIVDVGEYK

SEQ ID NO: 6528 - protein, 1391 aa, synthetic construct
  REGION 1..1391: note = Synthetic
MSKKVLGISLGTNSIGWALVKECERDSSEIIKLGVRVNPLTVDEKINFEKGKPQKTNADRIQKRSSRRNLQRFALRRKALIDILLKNKIISKETVLTEHGKSTTHQTLALRAKAARKKISLEELARVLLNINKKRGYKSSRKIKKEEEGNAIDTINVAKELQEMKLTPGEYSLQLLNAGKKMIPDFYRSDLFQEFNSIWEFQKQFHSELLKDDLYADLQGKSKNQTWTICQKPFDIKGLKIKVRGVELKKKLYKLRVRALSRKLNLEQLAIVFQEINGDIVKSSRYLGAISDRSKRLYFNNQTVGENLYQQIKNNRHTSIKNQVFYRSDYLDEFEQIWRTQSAFHPELTNNLKEVLRDVIIFYQRRLKSQKGLLSFCPFESREQNYVNKVLGKIKKRIIGRKVIAKSSPLFQEFKIWQNINNLEFENIESKEKLICKELDKEVRNHLFQTLNIRGDLKPYALLKIVGKYFQMGKLGNWKCNYDIIEGNTTNQALFAVYRNILENEGYLCEWEKKSVFEIKEEATTVFRALGIVTDILDFNANYEGSEFDKQSGYHLWHLLYATEEDSNISVEDTEVYGNTSVGLKKKLIQKFGFAIEQAKMIANISFPLEYGNLSSKAIRKIIPYLQDGYGYSKACVLAGYHNSDNSPTEKKEDRVLVDKLEPLPKNELRNPVVNKILNQMINLVNQIIIEYGKPNELRIELSRELKKNAKERALLVKNITEATKRNQKIKSIIRRDFGIPDPTRGDVIRFKLYQELEPNGYREVFTNRKIDYEDLFTSKINIEHIIPKSALFDDSYSNKTITYRELNFKKANRTAFDFVSHDYKSKLDTYEKRVDNLYDSKGVSGISKAKRNKLLLSQHNLPENFIEKDVRTSQYITKKAINILEAAIENVVPTGSRITDKLKRDWDLVNVIKDLNISKYRDLELTSFEERLDKGKEELIKVEVIKDWNRRNDHRHLALDALTVAFTTENHIHYINSLNLRLNSEGKESDMFREIEEELKGKSLFIPPLPNFRSTTKKCIEDVLVSFKNKNKVVTKNINEVKTGSGVLKKQQLTPRGQLHKETVYGYVKKVEQSPTKISKNFKVEQTELIINEEQKEAVHCHLSKYKNNPSIAFAAKTLRSTPILYKKKPLKEVYCYEHLYTIRKEITPENFRNQKCINKVVDLKIRALLLERLEAYKNNAKEAFSNLEEYPIWLDQERGISIKRVTITGVTNAEPLHCKKDHLGRAILNEDGNQIPADFISTGNNHHIAIYADKEGNLEEKVISFYEAVHRANKGLSVVDKKFNQNLGWKFLFSLKQNEMFVFSDENFNPKEIDLLDEENAKTIGKYLYRVQKIRTKDYFFRHHIEATVDDNPKTKGITWKRVGLLGLKNVVKVRMNHSGKIVQIGEYN

SEQ ID NO: 6529 - protein, 1391 aa, synthetic construct
  REGION 1..1391: note = Synthetic
MKTILGLDLGTNSIGWALVKEAENENEVSDIIKLGVRVNPLTVDELTNFEGGKAYSNNAERTLKRGARRNLQRYKLRRENLIEILLKNGLINKDTALTEVGKETTHQTLKLRSKSANEKVSLEDLAKILLSINKKRGYKSSRKVNAEDDGVAIDGMEVAKLLYDENMTPGEYVLRLLESGKKHLPDFYRSDLQEEFNLVWKKQSEFYPLILTKELFFELHGKNKSQTWAICKEPLGIVGVKLKGSAKEQKFARYRLRKEALTQQIELEHLAIVLQDINNDSNKSSGYLGAISDRSKELFFNKETVGQYQYKQLQKDPNTSLKNQVFYRQDYLDEFEVIWRNQAKFYPQLTNELKQEIRDVVIFYQRKLKSQKNLISFCQFESTQQNYVEKETGKTKIRTIGRRVIPRSSPLFQEFKIWQSLNNLKFVNSESNQIIQFIELEDDVKKVVFDELNLRGDLKPNQVLKILSKYMKIGKLTQWKCNLEEIEGNRTNSALYNVFQMIAEEEGYGFNWGKKSALEIKSELKAIFSSIGINDSILDFDFSKKLDQQLSYQLWHLLYSAEEGNSKITEEDKFTYGNTGVALKKKLHLKFGFKPEYSTLISNLRFTSDYGNLSSKAISKILPFLRDGSDYSKACQYAGYNHSNSLSADELDNRELKPKLELLKKNSLRNPVVEKILNQMVNVVNQVIDNYGKPDEVRIELARELKKSAKERSQMTKNISDATRRNAEIKKYLSKEFGIPNPTKGDVIRYRLWEELASNGYKDLFRDKYIPKEKLFSNEIDIEHIIPKALLFDDSFSNKTLAFKVDNLKKADRTAFDFMSTDFSKDVDSYIGRIETLHKDGKISSSKYKKLMIPKSKLVDGFIERDLRNTQYIAKQARKMLLEVFKTVVPTTGKITDKLREDWDLINVMKELNFPKYKALGLTKKIERFDVGSEKIKSINVIEGWSKRNDHRHHAMDALAVAFTTHNHIQYLNYLNARKDIHHEMHGTIKSIENQIIGKDVMGKRRFIPPISDLRMKAKLQIESILISFKNKNKVVTWSVNKTKLKGKDNYNKRRQLTPRGQLHKETVYGKIKLIDPKPLKLNNKFTLVRASMIVDKVHREIVLQHLSKYDNNSEVAFDSKTIKIDPILIEGIGLKEVVCYEDVFKIRKKISGDNFKNEKHLEKVIDEKVKQILKDRVIKFQGNFKEAFSNLEENPIWLNKSKGIAVKSVAIKGVNNAESLHEGKDHFGDQILDKNKKQIPVDFVSTGNNHHVGIYEDKDGNLQERVVSFFEAVTRVNEGLPIIDKTYNSDIGWKFKFTMKQNEMFVFPSDDFDPNEFDLTDGKNAAKISPNLYRVQKIATKNYMFRHHLETVVTNDLEFTYKSIRSTGWLRNLVKVRINHLGEIVYVGEY

SEQ ID NO: 6530 - protein, 1391 aa, synthetic construct
  REGION 1..1391: note = Synthetic
MKKVLGLDLGTTSIGWALVDEGENEKEESEIIKLGVRVNPLTTDEKTDFEKGRPLSTNADRTLKRSARRNLQRFKLRRKNLIEILTKHHIIDENTKLTEIGNHTTHQTVALRAKAAKHKIEKDEFARVLLAINKKRGYKSSRKVKNEDEGFAIDGMAVAKELYNQQLTPGQYVHQLLKENKKYIPDFYQSDLQQELDTVWKFQQQFYESILTDELYTKLKGQGQQNSRKLFLAIHQIYTAENKGKRNEVRLQHYAWRNEALTKQLSIAEVAYVLVAINNEINKSSGYLGAISDRSKSLYFKNVTVGESLYAQLQKDRHISLKNQVFYRQDYLDEFEKIWETQAQFHPELTTELKTEVRDIIIFYQRKLKSQKHLISDCQFEKGHKAIPKSSPLFQEFKIWQNLNHLEFEHIQTNEKIKFTEFEDEARQFVFEELNLRGTLKSKELKKLLQLKTPKYWKANFEEIEGNRTNEVLYNVYQRIAEIEGYGFDWNKKTAKEIHTELAIIFKEAKINSEILTFDTTIEGNDFDKQKSYQLWHLLYAAEDGKKITEADRLLYGDTNVALKKKLHMTYGFKPNYASLLVHVSFQQDYGNLSSRAIRKIIPFLIDGHNFSEAARLAKYNHSNSLTKEEQKNRVLKEKLSLLKKNELRNPVVEKILNQMVNLVNQVIETYGKPDEIRVELSRELKKSAKERADMTKHINEATTKNQNIRELLQKEFGIQHPTRNDIVKYKLYEELSLNGYKTLFTNTYIPKEKLFSKEIDIEHIIPKAILFDDSFSNKTLAYRNVNLAKADSTALDFITQKYTSDLDSYIARVETLYQSKKISKGKYKKLLMSRNELPEGFIERDLRNSQYIAKKATQMLQEVFGTVHTTSGRITDKLREDWDLINVMKELNLSKYQVLGLTEKQIRKNGNSVEIIKDWTKRNDHRHHAMDALTVAFTTYDHVQYLNNLNAIYGLKDEEIDHKKSNLKGIKNKITKVYVKDGNKKRKFIPPLKNFRTKAKDHLEQILISFKNKNKVVTKNKNKTKTSQKGVLNEKVQLTPRGQLHKETVYSHTKKVIVTKEKVSSKFTIEKIQQVTKPTYREALLKRLAANNNDPKKAFAGKNSLSKNPIYLDEAKTKLLPEIVKTQYFEDNYTIRKEINPDNFKDAKSLLKIIDIGVQNILKLRLQEYNGNAKLAFSDLEKNPIWLDKEKGISIKRVRIDGIKNAEALHSKTDHFGKPILSKDSKSIAVDFVSTGNNHHVAIYKDQQGKLHDVVVSFYEAVARVNLGIPIIDKALNENLGWKFLFTMKQNEMFVFPSENFNPKEIDLEDQKNNTIVSKHLFRVQKFSKLVYGNSAIREYVFRHHLETELIDKKELKEITFHSLKSLSLLDQIVKVRINHIGKIVHVGEY

SEQ ID NO: 6531 - protein, 1391 aa, synthetic construct
  REGION 1..1391: note = Synthetic
MKKILGLDLGTNSIGWALVNEAEHEHEQSSIVKLGVRVNPLSVDEKTNFEKGRPLSINADRTSKRSARRNLQRFKLRRKNLINLLLKHHIISNETILTEVGKNTTHQTLKLRSKATQEKISLEEFARILLSINKKRGYKSSRKEKNEDEGFTIDGMAIAKELYDNQLTPGQYVYNILQDGKNYIPDFYRSDLQAEFDDVWQFQKKFYSSILTDEFYLKLKGQGKENTRKLFLAIHQVYTAENKGKRDAVKLQYYKWRSEAVKKQLSIEEVAYVLVEINNNINKSSGYLGAISDRSKALYFNNETVGEYLYGQLVKNRHNSLRNQVFYRQDYLDEFEKIWETQAKFYDELTNELKQEIRDVVIFYQRKLKSQKHLISDCLFEKHHKAIPKSSPLFQEFKIWQNLNYLEFVHTQSKEKIFFSELDDETRQFVFAELNIRGTLKIKEIKKLIGLETPVYWKSNFDEIEGNRTNQVLYNVYQNIADDLGYGFDWSKKHAFEINAELQAIFKDVGIDTAILNFDASIEENDFDKQKSYQLWHLLYSAEDTDKATEEDKLIYGNINTKLKKQLHQKYGFEAKYGNLLANISLQQDYGNLSAKAIKKILPYLESGNSFYEACTIVGYNPSNSLTKEQQQNRKLKDKLELLPKNSLRNPVVEKILNQKVNLINQLIDEYGKPDEVRIELARELKKSAKQRADLSKHINDATLKNQNIRKTLQKDFGIQNPSKNDVIRYKLYDELKDNGYKTLFTNKYIPKEQLFSKDVDIEHIIPKAILFDDSFSNKTLAYRNVNLAKADATAFDFISSKHLDDLDNYKARVETLFQSKRISKGKYKKLLMTRQNLPEDFIERDLRNSQYIAKKATAMLKEVFRSVVPTSGRITDKLREDWDLVNVMKELNLPKYRTLGLTEFIERKNGNKIEQIIDWTKRNDHRHHAMDALTVAFTTHNHIQYLNNLNVTHGLNGVDTDHEKSRLYAIKQAITKVYIVGKTKKRKFIPPMENFRSHAKNHLEGILISFKNKNKVVTKNKNRTKTKTKGVFNEKIQLTPRGQLHKETIYGHAKKVIVTKEKVSSKFTHEKILQVTKPAYREALLKRLASFKNDPKKAFSGKNALSKNPLYFDITSGKKVPDTVKLSYFENSYVIRKEVNSDNFKNEKSLQKVLDVGIRRILEKRLADYNGNAKEAFSNLEKNPIWKDKEKGVCIKKVRIEALKNAEPLHVKKDHLGKIILDDENKSTPVDFISTGNNHHVAIYEDKDGKLHDKVVSFYEVVSRVNLGLPIIDKSFNSHLDWKFLFSMKQNEMFVFPSEDFNPKEIDIGNPKNNELISKYLFRVQKFSKVTYGNSAVRDYVFRHHLETELIDKKELKGITYYQLKSIGMLEKLVKVRINHIGKIVHIGEY

SEQ ID NO: 6532 - protein, 1391 aa, synthetic construct
  REGION 1..1391: note = Synthetic
MKKILGLDLGTNSIGWALVREAENENEQSEIIKLGVRVNPLTVDEKTNFEKGRPLSTNADRTLKRSARRNLQRFKLRRENLIKILIQNKLIKECSPLTEIGENSTYQTLEIRAKAARERIELEELARVFLAINKKRGYKSSRKVKSEDEGVAIDGMKVAKHLYDNNLTPGEYVYSLLKNGKKYIPDFYRSDLKNEFDKVWNFQKQFYPEILDDELYTALDGQGQQNSRKRFLAIKGIYTAENKGKRDEVKLQHYKWRVEAISQKLSIEEVAYVLVEINNNLNQSSGYLGAISDRSKELYFNKETVGEYLWKSIQENRHKPLKNQVFYRQDYLDEFEQIWETQAKFHPELTDELKEEIRDVIIFYQRKLKSQKSILSFCQFESKEVEAKDKDGNVIINKTTKKPKMQTIGRRVIAKSSPLFQEFKIWQNLNNLEFSKIRKTDDNEEFELDLDTKKELFKELNLRGNLTQKEVLKFLGLSDKIWKTNFANGLEGNRTNEMLFNVYRQIAEYEGYGHDWEKKTNSEIVEELEAVFKEIGIKPEILHFDATKKEGFDKQPSFQLWHLLYSAEEDGNKINEEDKLIYGNSSIKLKKKLVEKFGFKPEHTKWLASLTLPQDYGNLSSKAIRKIIPHLIEGNNYSDACKLAGYNHSHSVTKEENENRELDDKLDILPKNSLRNPVVEKILNQMVNVINEIIDTYGKPDEVRIELARELKKNAKERKELSETINKNTKENEEIRKTIIKEFGIPNPTKNDIIRYRLFLELDSNAEQDIFTNTKIPRERLFSKDIEIEHIIPKALLFDDSFSNKTLAFSSTNKQKDNRTAMNFITEDFKSKVEEYKQRVEMLYEKGSISKTKRNKLLMLEEDLPKDFIERDLRNSQYIAREAKKMLFKVFREVTATSGAITDRLRSDWDLVNVMKELNFPKYKALGLTEIEQRFDTGREELKEVEVITNWTKRNDHRHHAMDALTVAFTTHNHIQYINNLNARKDEAKDNHIIICNIEDKITRVENRKRKFIPPMPHLRSEAKKHIESILISIKAKNKVVTKNLNYTKGGNSTPQVTLTPRGQLHKETVYGKIKLPMDKATKLNKNISLEQIEQIVNPTHKQIVLDHIAKFDNNPSKAFDSKNLKKTPILYKNEPLTDVICFEEIYTIRKDISPDLKIEKVIDPKIREILKNRKKEFGGDAKKAFSDLDTNPIWLNKEKGICIKRVTITGVNNVETLHHKKDHLGKTITNKNGKKLESDFVSTGNNHHIAIYRDKKGNLQEKVTPFFEAVERVNQGLPIIDKTFNQDLGWEFLFTMKQNEMFVFPNDDFDINEIDLLNEDNYQLISKHLYRVQKIATKDYTFRHHLETNVESNIALNNIAYKRIRNLGSIKDILKVRINHIGKIVSVGEY

SEQ ID NO: 6533 - protein, 1390 aa, synthetic construct
  REGION 1..1390: note = Synthetic
MKKILGLDLGTNSIGWALVNEKEHDGEQSSIIKLGVRVNPLTVDEQNNFEKGKPITTNADRTLKRCMRRNLQRYKQRREHLITILKENGLITENTILAEQGNRSTFETYRLRACAATEPISLEQFARVLLMINKKRGYKSSRKISADENGKIIDSMDMAKLLYEEGLTPGQFMLRHIDSGKRYTPDFYRSDLIDEFNRIWERQKVFYPEILTDPLRQELKNKNEKQTWAICSKPFGIVGQKRTTKGDAQKRENYEWRSKSLNEQVDLETLAVVLQKINGQISGSSGYLGEISDRSKELYFKKQTVGQYLMERLDKNPNYSLKNKVFYRQDYLDEFETLWEIQAQSHSELTTDLKNEIRDVIIFYQRPLKSQKDKVSFCEFENKQVETESDGKKKSMTIGLHVCPKSSPLFQEFKIWQILNNLQVSGKVMTKSATDLFGYSIHTEKGRRFLEQEEKERLFHELSIKEKMSKAEVLKLLFKNHKELDLNYSEVEGNRTQAALFNAYQTIIDMSGHGSHDFSKMRADEVYGIVESVFNRLGFNTDILHFDSSLNGKELERQPSYRLWHILYSFTGDDSKSGTDRLVDKISGSYGFDREYAAIIAGISFMPDYGSLSAKAIRKILPHMRDGLKYSDACKYAGYRHSKNSLTKEEIDNKVLCDKLTLLPRNSLRNPVVEKILNQMINVVNSVADKYGKPDEIHIEMARELKSSAKEREETTKAISNVTAEHARYRETLQKEFGIANVSRNDIIRYKLYMELKDNGFKTLYSNTYIPQEKLFSKEFDIEHIIPQAKLFDDSFSNKTIEVRSINIEKSNATAYDFVCNKYDAKQVKDYEARVEDLFNKKIISKTKRDKLMMREADIPSGFVDRDLRDSQYIARKAREILENMVKVVVPTTGSITSRLREDWQLVDVMKELNWDKYDSLGLTETIYDKDGRRIRHIKDWTKRNDHRHHAMDALTIAFTKYSHIQFLNNMNARSDKAGSIYAIEKKELYRDNGKLKFLPPMPLDVFRTEAMRHLSEILVSIKTKNKVVTRNVNTYKVKGGKKSRIQLTPRGQLHNETIYGCIKQYTVKEEKVNGAFDEQKISTVADKRYRMALSERLKQYGSNAKKAFTGSNSLQKHPLFIDETHTLTVPEKVKTVKFENVYTIRKEVSPDLKIDKVVDAHIRKILETRLKQYGNDPKKAFTNLEENPIWLNEEKGISIKRVTITGVSNVVALHDKHDHNGMPILDKNGNKQPADFVCTGNNHHVAIYRDADGNLQDEIVSFYKATILANQGLPIIDKNKNDGRQFLFTMKQNEYFVFPNEKTGFNPKEIDLLDPKNYNEISKNLFRVQKLSKGTSRDYFFRHHLETTVDDKKELQEITWKRISSLDKLKNIVKVRINHIGQIVSVGEY

SEQ ID NO: 6534 - protein, 1389 aa, synthetic construct
  REGION 1..1389: note = Synthetic
MKKILGLDLGTSSIGWAVVNQAENDNEKSNIVKLGVRVNPLTVDEKGNFEKGKSITTTAERTIKRGMRRNLQRYKQRRNNLVTVLRDNNIIGLESKLTEDGTGSTFETLELRAKAVKEEVSLEEFARILISINKKRGYKSNRKANNEDEGELVDGMAVARELYNRGITPGEYVYELLKKQKRYKPPFYRSDLVAELDAVWEKQSSYYPTVLNEETKQIISGKNKTETRKYFYAAHKIEAAEEKDSKLRQVTYYKWRADAVKTRLELGQLVTVLCEINGDITASSGYLGAIGDHSKELELKHQTVGEYLWGLIKQNPHQSLKNIVFYRNDYLHEFNTIWETQAKFHPELTAELKDKVGQHLIFYQRRLKSQKGLISYCELEGKEITLANGKKVMTGPRVCPKSSPLFQEFKIWQDLNNLVLERKEVKRSIKKKIDGMSSLFGDEFCEERFVTLSKEQKDTLYKELYCTKELSAKEMLKILGLSDKEYSLNYKKVQGNITQVTLMNAYKNIVEMTGHDVDKFDKMDAGNKMHLVEVVLETLGASTSFLNFNAGNSHEEMQKNPMFQLWHLLYSYEDDNTATGNGKLVEHISKLTNLPEEYASIIARTTFVQDFGSLSSKAIRKILPFMKNDGKVYYEACELAGYRHSKQSLTKEEIEKRELHDHLEILPKNSLRNPVVEKIINQMIHVVNGCIDEFGTFDEIHIEMARSLKQSQKQREDATTRLNKKTKEVENIKKLLKESPFNISNPTRNDVLRYQLYEELAPNGYKTLYSNTYISKEKLFSRDFEIEHIIPQAKVFDDSYSNKTIESHSANNEKDNMTAIDYVAMKGGEAGVEEYKKRIEFLNKPATGKKYKNLTTVEKDIENGFLNRDLSDSQYIAKKAKELLLQVSRIVVPTTGSITARLREDWQLVDVMKELNWDKYDKLGLTTAERNRDGHEVRRITDWTKRNDHRHHAMDALAIAFTRHSHIQYLNNLNAKDEDESKDSNIYGIEKKELLKNRKFVPPMPLDELRAQAMKHLSKILVSIKAKNKVTTQNINKVKGAKPQLTLTPRGQLHNETVYGKRQRYATREEKVGAAFDKLKISTVCRKDYREALASRLADNGGDPKKAFTGKNSLAKVPLFIDANHTVKVPEKVKTVVLETYYTIRKPISKDIKLEKVVDEGVRRILEQRLAHYDNDQAKAFSNLEENPIWLNKDKGISIKRVTIKGVNVATPLHVKKDKDGNVVLDNQGKEIPVDYVSTSNNHHIAIFEDAEGNLQEHVVSLYEATARKCQDLPVVDREYNKDKGWKFMFTMKQNEYFVFPDAESGFNPADIDLENPMNNSIISPHLFRVQKLTTGDYFFRHHLETNVEENKMLRNTTWIRLRTTNYLRGIIKVRINHLGEIVKVGEYL

SEQ ID NO: 6535 - protein, 1389 aa, synthetic construct
  REGION 1..1389: note = Synthetic
MKRILGLDLGTASVGWAVVDQAENDKEKSQIIKLGVRIVPIDTQEKDDFEKGKSITTTADRNKKHGMRINLQRYKQRRAHLVQLLKREGFIADKSLLYEDGNNTTFETYRLRAKAATDEISLEQLARVLLMINKKRGYKSNRKADKKEEGQLIDGMSIARKLYDDHLTPGQFVYQTLQSGNRYIPTFYQSDLRAEFNAIWDYQVQFYPDILDDELKSKIHGRKKNDSAKVFYQVKHVSTAENKDRKTRLQVAYRWRSEAVNKQLPIEQVAAVLCDINGDISNSSGYLGKISDHSKELYFKKLTVGQYLMQQLDRDPNYRIKNRVFYRQDYLNEFNTIWETQHKFHPELTDELKEEMRDTIIFYQRKLKSKKGLISYCELEGKEITVVVNGKPKKVMTGPRVCPKSSPLFQEFKIWQELNNVVIENKKIKVTKNSEPSLFPIEEKYVPLSAEQKQLLHSELSVNKELSKTEVLKLLGLNSKDYSINFKTLQGNTTQVQLLTAYKQILEWSGHDADQFDKLDYAAKMQFITKVFETLGAKTDFLEFNPEQLDDYLDQPAYRLWHLLYSYETDNSETGDAKLKAHLKELTGLSDEYVSVLASVQFEQDYGSLSAKAIRRIMPHLLSGKKYSDACEAVGYRHSAQSLNREELDTRPLESSLKILSKNSLRNPVVEKILNQMIHVVNAAMEEYGVERDGVKRFDEIHVEMARSLKQTQKQREDASSFIEKRTRENEEIIRVLSEEFHIPHPSRNDIIRYRLFMELKDNGFHTLYSNTYIPREELFSDKFEIEHIIPQAKLFDDSQSNKTLETHEANLEKRDRTAMDYVLDKYGEIGAEQYRQRIAFLYDSKNKNGTNKKHKYLTMTEAEIPVDFLNRDLADTQYIARKAKEILMQVTRTVVPTIGAITARLREDWQLVDMMKELNKPKYKELGCVVEYKTRDGRKNDYIKDWTKRNDHRHHAMDALTVAFTRQEHIQYLNNKNANQEEDGLQLRAKLIREHRFLPPMPLDEFRASALEHMRGILVSIKAKNKVATPSINRISGSKVRQVTMTPRTQLHKETYYGARQRYATAVKKVDAKFDAGTIAMVARKDYREALMQRLDEYGGNAKKAFTGKNSLSKMPLYIDALHTRQVPENVKLVWLEIYYTMRTAVDPKIAIDKVLDKRVQDVLQKRLDEFGGNAQKAFSNLDENPIWLNKEKGIAIKRVTIQARLSEPISLHDKLNRDGSAMTDDAGKTMPVDYVSTGNNHHIAIYEDADGNWHEKIVSYFEAIARINNNMPIVDKHFNESEGWRFMFTMKQNEYFVFPDLEHGFIPTEIDLMDESNHAVVVPHLFRVQSLSQKDYIFRHQFESSVIAGNYLPQGIAYIRIRTENKLKGVVKVRINHIGRIVHVGEY

SEQ ID NO: 6536 - protein, 1389 aa, synthetic construct
  REGION 1..1389: note = Synthetic
MKKILGLDLGTSSIGWAVVNEKEHEGEESSIVKLGVRVTPLTAEEQRDFKAGKQLTTNADRTMKRSMRRNLQRYKLRRNNLIEIMKSNGLIKEDTTLTEQGNKSTFETFHLRAKAATEQISLEEFARVLLMINKKRGYKSSRKIKANEDGRIIDGMDVAIQMYSQNLTPGEFMFQNIKNGKRYTPDFYRSDLITEFDRIWNFQKQFYPEILTDTLRVELYDKNEKQTWAICAKPFSLTGIKRETKGDEQKRENYEWRKDSLSHKMNLERLAIVLQKINGQINNSSGYLGEISDRSKELYFKRQTVGQYLMEKLNANPNYSLKNKVFYRQDYLDEFERIWENQAIYHKELTKDLKREIRDVIIFYQRALKSQKGLISFCEFENKQMEIIVDGKTRQITVGSRVCPKSSPLFQEFKIWHIINNIQVSGKVIPTEYTDLFGTTCQMKHGKRFLDQEEKEILFKELNIKEKMSKNDVLKLLFNKTEELDLNFKEIEGNRTQAALFKAYQTIIDMSGHGKYDFPKMKTDEIMNIVKPVFCDLGFNIDILHFDSSIKGKAYEKQPAYMLWHLLYSFTGDNSKSGNEKLIGKISELYGFDKEYAAIIAKATLQQDYGNLSSKAIRKILPYMKNGQEYSMACESAGYRHSKKSLTKEELDNKMLKDRLEQLPRNSLRNPVVEKILNQMINIVNSIITMYGKPDEIRIEMARELKKSAKEREEMTKAINRTTKEHEDFRNILQEEFGIKNVSRNDIIRYKLYMELEKNGHKTLYSNTYISKEKLFSKEFDIEHIIPQAKLFDDSFSNKTIETRDINIEKSNKTAYDFICEKYNAEEIKDYVSKIDKLFRDGVISKTKRDKLMMKEADIPDGFINRDLRESQYIAKKAREILEEIVREVVPTTGSVTSRLREDWQLVDVMKELNWNKYNKLGLTEIIEDRDGRRIRKITNWTKRNDHRHHAMDALTIAFTKHSHIQYLNNLNAKNDKGGNIYAIEKQELYRDKGKLKFCPPMPLDILRAEAKRHLENVLVSIKSKNKVVTKNKNISKKKNGKNKKIQLTPRGKLHNETIYGKIRQYTVKEEKVNAAFTEEKIATVANLKYRNALFARLKSFDGNAKKAFTGSNSLQKKPLFLNEMHTECVPEKVKIVTLEGIYTQRKEITPDLKLEKVIDVHVREILKARLKEYDNDPKKAFVNLDYNPIWLNKEKGISIKRVTIRGVNNAVALHDKHDNTGKLILDSEGKRQPADFVSTSNNHHVAIYRDAEDNLQENVVSFYEATMRANMNMPIIDKNYRKTDGWQFLFTMKQNEYFVFPNTETGFNPSETDLLNPDNYTEISKNLFRVQKLASKYYVFRHHLETTVDDNNELQEITWKRITSLNGINKIIKVRVNHIGQIVSVGEY

SEQ ID NO: 6537 - protein, 1389 aa, synthetic construct
  REGION 1..1389: note = Synthetic
MKKILGLDLGTNSIGWALVHEAENVKESSEIIKLGVRINPLSSDEVIDFERGRPLSVNKDRTLKRGARRNLQRFKLRRKNLIDILIKAKILRSDSVLTEIGKNSTYETLQLRSKSVKQQVKKEEFARVLLAINKKRGYKSSRKSNNKEEEGNLIDGMFIAKELYNNNLTPGKYVYQLLSENKNYIPDFYQSDLKNEFLAVWTFQKQFYPDILTEQLFINLQQKNKNQTWAICKEPFDIKGIVYKGTAKQKRLEKYKWRSKSLTSKIDLETLAIVLQEINNDLNKSSGYLGAIGDRSKELYFNNITVGQYLYQQIKKNNHTSLKNQVFYRQDYLDEFERIWEKQSKFYPELTNKLKEEIRDVVIFYQRKLKSQKGLISICELEQKTIEIEVKNKTKKKIIGPRVVPKSSPIFQEFKIWQILNNLTFTRKNETNLFEKQNYKVTLENKKNIFNELNIKGTLKISDVFKLLKLNTKDWKCNFDTLEGNVTQQAIYNVLQKISEDQDSSFDWSKKNAFEVKEELRATLPTIGIHPNILDFDVNDDNFEQQPSYQFWHLLYSAEDDTKITEEDEKNYGKNYVNLKKKLHLKFGIPIKYTSLFTNIVLEPNYGNLSAKAIRKIIPHLQEGYDYYDASRLAGYNHSNSITRDENLKRELKDKLELLPKNSLRNPVVEKILNQLVNVVNQIIETYGKPDEIRIELARELKKSRKQREEIYKNISIATKRNEEIKKTLQTPPFNLKSPTKNDVVKYRLYQELKPLGYRTLYTDKYISPQLLFSKEIEVEHIIPKAVLYDDSFSNKTLAFRQVNLKKSKMTSYDYIDKIEHKNLEKYIQRVSDFYNGGKNKISKSKYLNLLTPLDELSDDFIQRDLKNTQYIAKKAKNILLEICREVHPTNGKITDKLRRDWDLLNIMKELNLSKYRALGLTVFEERKHGNNVEKIIDWTKRNDHRHHAMDALVVAFTSKSHIQHINTLNAESAQNSIQSVIISQNQKTKLKNKGLYVLPMSNFRTEAKKHIESILISFKTKNKVVTKNMNFEQKTLTPRGQLHEATIYGKIKSEILKDETIGGTFIIEKINTITKPEYRNLLLKRLEENHNNPKKAFAGKNSLIKKPITLSNGKEMPLKIKTKKYETIYTIRKNINPDNFKNIKAIEKVIDEKHKNILKERLTKFNGNGKEAFSNLEENPIWTNKEKRIALKRVTIKGVSSVVSLHDKKDHLGNVILDSNGKTQSVDFVNTGNNHHIAIYKDENGKLYDKVVSLFDAVTSCNLNQPVIQKNYNKDLGWEFLFSLKQNEMFLIPTNEFNPKDYDLKNTKLYSLLSKHLFYIQSISLNKYGNNIIRDFVFRHHLDSLKTKTNALKNYTYFHVKSLDDIRLIGAVKVRINHIGQIVQVGEY

SEQ ID NO: 6538 - protein, 1388 aa, synthetic construct
  REGION 1..1388: note = Synthetic
LKKILGLDVGITSIGWAFVLEGTPDQSRIVRLGVRVNPLTTDEADNFEKGKPITETAGRTLKRSMRRNLQRYKQRRANLISILKQHHFISADTPLWEEGKGTTHSTHALRAKAAEAPISLQDLARVLLMLNKKRGYRSSRKVKSTEEGQAIDGMAIARQLYEQGLTPGQLAYQLLQSGKRHLPDFYRSDLRTEFDKVWNFQRTIHPEILTPDFKKAIDGKGLRATNAIFWTQYGFNTADVKGSRSEKKNKTYAWRAAAINTPLSREEMALVIAEINGNIANSSGYLGEISDRSKALIFSKQTVGQYQYAQLQQHPHTSLVNQVFYRQDYMDEFEKIWETQAQYHKELTPQLKRDIRDVIIFYQRKLRSQKGLISVCQFENRTIESPGGHEKNVGYKVAPRSSPLVQEFKIWQNLGHLDIWDKSSKIKVELNDAARQMLFDELNIKGKLPKEKVLKLLGLPAKTYEANFTNIEGNTTQKALYNAYLKILEQARHEPYKLLGLDPEKDELSVEDATTSVTVIKKGIAEAFTSLGINTAILEFNAELPGKAFEQQLSYQLWHLLYSYESDNSASGNDTLQALLKTKFGFSPSQASILADVPLLSDYANLSAKAIRKIFPYIKVLNYSEACAKAGYNHSASLTKEENEQRALKSHLRSLPKNSLRNPVVEKILNQLINVVNAIIDNPELGKPDEIRIELARELKKNAAERQLMTADMAAATNENARISRLITEKFGFPNPTRSDVIKYKLYEELKMNGYKTLYSNTFIPEHELFSNKFDIEHIVPKALLFDDSFSNKTICLRKENIDKANRCAIDYIQEAFGTEEVDAYKQRVEMLYQCHQKNKTEGISRSKYKKLLQLPDDLGKGFIDRDLRDSQYIARQAKQMLEKICRTVTATTGSITKQLREDWGLVNIMQEINIDKYRALGLTELIEKKDGSTKERITEWSKRNDHRHHAMDALTVAFTKPKHIKFFNTVNARNSNDGKEVYSSQTQKFIVPMINFRQEATYHLEHLLISHKAKNKVVTKNKNRFKTAAGAMEKIELTPRGQLHKETIYGQIKVPVSREEKVGGKFTADYITRVASKPYRDALLQRLSENGNDSKKAFTGKNSLEKNPLFAADGTPVPLSVKIVEWETDYTIRKDVTPENLKDEKVIAKIIDPVARKVLMERFEAYNRNPKEAFSNLEKNPIWLNQQKGICIKRVTISGITNAEALHFKRDHRGKFILNAQGNPIPVDFISTGNNHHLAVYRDKDGNLQDNVVSFYEVVARAHQGLPAIDKTFNREEGWEFLFSMKQNECFVFPGDGFDPREIDLLNPANNKIIAPNLYRVQKLSKTQKGNSFARDYTFRHIYETEVKDRPELKNIAYKRILSLSALEAIVKVRINHIGQIINIGKI

SEQ ID NO: 6539 - protein, 1388 aa, synthetic construct
  REGION 1..1388: note = Synthetic
MKKILGLDLGTSSIGWAVVNQAENDNEKSNIVKLGVRVNPLTVDEKGNFEKGKSITTTAERTIKRGMRRNLQRYKQRRNNLVTVLRDNNIIGSESKLTEDGTGSTFETLELRAKAVSEEVSLEELARILISINKKRGYKSNRKANNEEEGELVDGMAVARELYSRGITPGEYVYELLKKQKRYKPSFYRSDLAAELDAVWEKQSSYYPTVLNEETKQIISGKNKTETRKYFYAAHKIEASEEKDSKLRQVTYYKWRADAVKTRLELGQLVTVLCEINGDITASSGYLGAIGDHSKELELKHQTVGEYLWGLIKQNPHQSLKNIVFYRNDYLHEFNTIWETQAKFHPELTAELKDKVGQHLIFYQRRLKSQKGLISYCELEGKEITLANGKKVMTGPRVCPKSSPLFQEFKIWQDLNNLVLERKEVKRSIKKKIDGMSSLFGDEFCEERFVTLSKEQKDTLYKELYCTKELSAKEMLKILGLSDKEYSLNYKKVQGNITQVTLMNACKNIVEMTGHDVDKFDKMDAGNKMHLVEVVLETLGASTSFLNFNAGNSHEEMQKNPMFQLWHLLYSYEDDNTATGNGKLVEHISKLTNLPEEYASIIARTTFVQDFGSLSSKAIRKILPFMKNDGKVYSEACELAGYRHSKQSLTKEEIEKRELHDHLEILPKNSLRNPVVEKIINQMIHVVNGCIEEFGTFDEIHIEMARSLKQSQKQREDATTRLNKKTKEIENIKKLLKESPFNISNPTRNDVLRYQLYEELAPNGYKTLYSNTYISKEELFNPVFDIEHIIPQAKVFDDSYSNKTLESRSVNIEKKDMTAIDYVAMKGGEAGVEEYKKRIEFLNKPATGKKYKNLTTVEKDIENGFLNRDLSDSQYIAKKAKELLLQVSRIVVPTTGSITARLREDWQLVDVMKELNWDKYDKLGLTTAERNRDGHEVRRITDWTKRNDHRHHAMDALTIAFTRHSHIQYLNNLNAKDEDESKDSNIYGIEKKELLKNRKFVPPMPLDELRAQAMKHLEGILVSIKAKNKVTTQNINKVKGAKPQLTQTPRGQLHNETVYGKRQRYVTRIEKVDSKFNLEKIGSVCKKSYRDALYRRLTENDNNPKKAFTGKNSFTNNPLFVDCNHLIRVPNEVKIVILESYYCIRKPVNSFLNVDLVVDDGIKKILKNRLAKYNNNADKAFSNLDENPIWLNEEKGICIKRVNIKVNLKEVTPIRFKKDKYGNYITDKSGGRIQTDFVNQSNNHHVAIFKDEMGNLKEHIVSFNDAVKNKLRNNIVIDSEFNKALGWSFCFTLKKNELFVFPDLKENFDPSSINLEDSNNYQLVSPHLYRVRSISHNDYYFMHHLETTVNKPTVLKDVTWKRIRNANGLKGVVKVRINHLGKIVVVHD

SEQ ID NO: 6540 - protein, 1388 aa, synthetic construct
  REGION 1..1388: note = Synthetic
MKKILGLDLGVGSIGWALVNEAEFENEHSSIIKLGIRVNPLTIDETINFEKGKSITTNADRTLKRSMRRNLHRYKLRRENLVQVLKKCGIINDDTILAENSNYSTFETYRLRAKAVNEKISLHEFARVLLMINKKRGYKSSRKAKSTDEGQLLDGMDVAIKLYEENLTPGQLCLQILKSGKKRLPEFYRSDLMNELNKIWDFQSKFYPDILIDDFKKQLEGKGKNDASKNFLGRFGIYTADLKGLNKRTELFQLRSHAPSKQLTLEEVALVISEVNGNIHSSSGYLGDISDRSKELYFKKITVGQYLIQKLDENPHFSLKNKVFYRQDYLDEFERIWETQAKHHPILTPELKSEIRDIIIFYQRRLKSQKGLISFCEFESEIIEIEENGKKRKVTIGNRVCPRSSPLFQEFKIWQTLNNVKISSGKEHWERDLDEDEKLMLAEELKFRDQLVDKDVIKMLFPGRQDISINFKKLDGNKTISALYNVYAKIIEMSGHDEVDFSKTTFSKVHDYVQKVFNGLGFNTQILNFDFEGDQMDPDKHELYRLWHLLYSYEGDSSKTGNEGLINAISRRYGFDKEYAAMIANVVFQDDHGSLSAKAIQKILPFLKSGYAFAGRKEGKLKESACEEAGYKHSIDSLTKHENEQKELLPKLEILPKNSLRNPVVEKILNQMVNVINAIIDEYGKPDEVRIELARELKRSAKERESMTSNINKSNIEHERIRSLLINEFGLRHVSRNDIIRYKLYEELEFTVNKTLYSNTYIPREKLFSHEFDIDHIIPQSRLFDDSFSNKTIELKDVNIKKGNQTAIDFVLQEYGEQELGQYHARLDNMLKNGKISPVKYKKLKMKGSEIPQDFIQRDIRDTQYIAKKAKAMLETIVRSVVSTTGSITDRLRQDWQLIDVMKELNWQKYDKLGLTEVFENEEGHQIRRIKDWTKRNDHRHHAMDALTVAFTKRSHIQYLNNLNARSDKSSSIYGIEAKELDRNEKGKLLFKPPIPVKEFRAEAKSNLESILVSIKAKNKVMTNNVNKIRKHGGHESVVQLTPRGQLHNETIYGSRLEYVTKTEKVNAGFDMEKIQSVANKKYREALMKRLEQFENDPKLAFTGKNSITKNPVWIDDMRTISVPEKVKLATLENMYTIRKEISKDLKIEKVVDKKIRKILQERLDKYQGDANKAFSNLNFDPIWLNEEKGISIKRVTISGVSNAVALRARKDHLGNKIMDEQGLSLPVDFVSTSNNHHVAIFKDGNGNLQEHVVSFFEVVERVRQDLPVIDKHFNEDEGWQFLFSMKQNEYFVFPNEQTGFNPIDKDLLDENNYPAISQNLFRVQKISTKNYMFNHHLETKAVDGEMLKNKKQLVDITFKSIRTPANLEGIVKIRINHIGKIISVGEY

SEQ ID NO: 6541 - protein, 1388 aa, synthetic construct
  REGION 1..1388: note = Synthetic
MKKILGLDLGTTSIGWALVNEAENEYEQSEIIKLGVRVNPLTTDEQTDFEKGNPLSVNADRTLKRGARRNLQRYKLRRKNLMDLLTKSGIITKDTVLTEDGSFTTHETWRLRSLSASDKIEKEEFARVLFAINKKRGYRSSRKAKNEEEGSVIDGMAIAKELYDKRLTPGQYVLSLLNDGRKYIPEFYRSDLKSEFDAIWNYQKQYHPDILTEEFYRKLEGQGQQNTRKLFLAVHKIYTAENKGKREQVKLQHYQWRVDALQQQLPIEVIAYVLVEINNNLNKSSGYLGAISDRSKELYFEKETIGQNLYRQLQENFHGSLKNKVFYRQDYLDEFEKIWETQAQHYRELTPELKEEVRDVVIFYQRKLKSQKHLISNCEFEPKHKAIPKSSPLFQEFKIWCLVNNVELQNQKSKEQRKLDETERQLLFEELNVRGDLSHDQVLKCLELPKKEWKLNYKEGLSGNTTNQQLYEVYQLVAEYEGYGFDWAKKSAREINEELKAIFPEIGLSEDLLRFDADIKGNEFDKQAAYQLWHLIYSVEDDEKISEEDQFVYGNSAVALKKKLHKGFGFQPQYAAMLANLNLQQDYGQLSARAIKKIYPYLKKGFLYSEACNAAGYNHSHSLNAEELASRELKDQLNLLPKNSLRNPVVEKILNQMVNLVNQVIEVYGKPDEVRVELARELKKSADERKRMTQGINDAKKRNEEIVKILRNAPYNLTNPTRNDITKYRLYQELSEIGYKTIFTNRYISPSELFSKNIDIEHIIPKAKLFDDSFTNKTLAYREVNLEKDDSTALDFISEKYHSDLRDYKDRVESLYAAWLKTHNTKQVKGISKAKYEKLLMKEVDLPNDFIERDLRNSQYIAKKAKQMLMEVIRTVNTTSGSVTDRLREDWGLVNVMKELNLPKYKGLGLTEEQERKDNKKVLVIKDWTKRNDHRHHAMDALTVAFTSHSHVQYLNNLHASRNIQSELHGIRKKITELQATKSGNSKRVFKAPIPNFRQEAKNHLEQILISFKAKNKVVTQNVNYYKKSGETYKKVQLTPRGQLHKETVYGRIIEQGVKEEKLGAKMTFETALKVCKPKYKDAILRRLAEFGNDAKKAFTGTNSVAKNPVYTDAVKQEQVPEKVKIHVAEENYTIRKEIGPDLKLDKIIDEGVKRILSARLEEFGGNAKEAFSNLDKNPIWLNEKAGIAMKRVKISGVKNAEALHDQKDRNGNLIMDAEGKTKPVDFVSTGNNHHVAIYRDHKGKLQEQVVSFYEAVARVNAGVSVIDYDYKKKEGWQFLFTMKQNEMFVFPAEGFDPNDVDLLDAKNAKVVSKHLYRVQKIGTKDYWFRHHLETMINDIKELSDIGYKRKRNPESIKDIVKVRINHLGEIVHVGEEVQQKQEVEMSI

SEQ ID NO: 6542 - protein, 1388 aa, synthetic construct
  REGION 1..1388: note = Synthetic
MKRILGLDLGTNSIGWALVNEAENEKEISKIIKLGVRVNPLTIDEKTNFEKGRPLSTNADRTLKRGARRNLQRYKLRRENLIEILIDNHIITKETPLTEIGKGTTYQTLSLRAKAVRERIDLEDFAKVLLAINKKRGYKSSRKASNDEEGQAIDGMAIAKELYERGITPGQYVLELLENDRKYIPDFYRSDLKQEFNKIWNNQKTFYPEILTDELFKELDGKNKSQTWAICQKPFNIKGIKRITKGREKTIENYHWRVKGLSGKLNLEKLAIILQEINNDINQSSGYLGGISDKSKKLYLNKETVGEFLYKQIAKNPHTSLKNQVFYRHDYLDEFEQIWKTQSNFNANLTDELKQEIRDVIIFYQRKIKSQKSLISFCQFESWEQEYFDKETGKTKTRTVGRRVIPKSSPLFQEFKIWQNLNHLVFTNSETDEKIEIKEVEQEIRKELFEELNLRGDLNPNDLLKILRSQFKIGKLSNWKCNFEKIEGNRTNAALFNIYQKISDFEGYGIDWNKSNAKKIRKELKATFPEIGIDASILEFDAYKKQLTNQSSYELWHLLYSAEEDFKISEQDKLIYGNSSVSLKKKLHLKFGFNPEYAKMLANLSLMSDYGNLSAKAIKKILPYLEDGHLYSEACRLAGYNHSKSLTAEELEKFEPKAKLDLLKKNSLRNPVVEKILNQMVNVVNQVIDTYGKPDGVRIELARELKKSAKERAEMTKGIADGTRRNEEIKKIITQKFGIPNPTKSDLVRYRLWQELESRGYKDIFTDKYISPDKIFSSEIDIEHIIPKALLFDDSFSNKTLSFRNVNLKKANRTALDFITQDYQSNVEAYKERVETWNKDNHISKGKRNKLLMSLKDIPDGFIERDLRNSQYIARKAKRMLYEVFPNEVLATSGSITDKLRSDWDLINVMKELNLPKYKALGLTEYEERLDKGTEELFKHEVIKDWTKRNDHRHHAMDALAVAFTTHNHIQYINNLNARKDITQDNHPIIKNIENLITEVNSKGKRVFKAPMSSFRESAKEQIEAILVSFKNKNKVVTKNINQTKKEGGFNYQNAKTPRGQLHKETIYGKSKQPLEKPVKINNRFCKKQVGLIINFKEQEAVLHHLKKYDNNEKIAFSNKTLKSDPIQVNGSPLREVKIFEEIFTIRKDINPDNFKTQKHLDKIIDKGIKEVMKKRLEEYNGDFKTAFSDLDKNPIWLNQSKGITIKRATISGVTNAEPLHQAKDHLGNIILDDNGKEIPIDYVSTGNNHHVAIYQDESGNLQEEVVSFYEAVIRKNQDQPIIKKRHPKGWKFLFTMKQNEMFVFSSENFNPSEIDLLDEKNAAIISPNLFRVQKIATKNYMFRHHLETEVTNNLDFTYRHFQATEWLRNLCKVRIDHIGRIVQIGEY

SEQ ID NO: 6543 - protein, 1388 aa, synthetic construct
  REGION 1..1388: note = Synthetic
MKKILGLDLGTSSIGWALVNEAENDDESSEIVKLGVRVNPLTVDEKTNFEKGRPLTTNADRTLKRGARRNLQRYKQRRKNLIEILKREGFIDNDSSLTEVGKKTTHETLKLRANAARKKIELEDLAKVLLAINKKRGYKSSRKVNNDGDGQAIDGMAVAKALYDQNLTPGAYALKLLREDRKYLPDFYRSDLKDELKAVWEAQKNFYPEILTDALYVELQEKNKSQTWAICQKPFDIVGIKQKGNAIEKRLERYKWRVDALTNKLDLEHLAIVLQDINNEINKSSGYLGAISDRSKELYFNKETVGENLYRQILKNPHTSLKNQVFYRQDYLDEFEQIWETQSKYYSELTDELKEEVRDVVIFYQRKLKSQKGLISFCQFESWEQIYVEQNTGKQKSRLVGRRVVPKSSPLFQEFKIWQNLNHLEFTNKVKQLNIVFKDLDDEVKQEVFEELNLRGDLKFKDLLKVLSKHLDVGKVSEWQCNFDKIEGNRTNEKLFNIYQVIAENEGYGFDWSKKTAREIVEELHAVFQQLEIDASILNFDTDKHEFDKQASYQLWQLLYSAEEDDKVLEADKLVYGNSSVAIKKRLHLKYGFKPQYAKMLASITLQPDYGNLSSKAIRKVLPYLREGHTFSEACGMAGYNHSNSLTAEELANRELQPKLELLKKNSLRNPVVEKILNQMVNVVNQIIAVYGKPDEVRIELARELKKSAKERADMTKGIADATRLNNDIKKTITKDFGVPNPTRNDVIRYRLWLELESRGYKDLFTDTQIKPQDLFSSKIDIEHIIPKALLFDDSFSNKTLAFKKDNLKKANRTAYDFIYQDYASNIEAFVERVESLYSDGKISRGKRNKLLMPQSKLPDGFIERDLRNSQYIAKKAKQMLFEVFRTVTATSGSITDKLRSDWDLINVMKELSMPKYKALGLTETITRWDSGQEKEKEIEVIEDWSKRNDHRHHAMDALTVAFTTYSHIQYLNHLNARRDESHKKHSNIMAIENTITERNSNGKRKFSPPMPRFRTQAKDHIESILVSFKNKNKVVTNNINKTKRKGNVKFNTKIQLTPRGQLHKETVYGKIKQPQTKPTKLNKRFTIEQAELIIDKSQRDLVLSHLAQFNNNGEQAFDSKVLKKQPLFFNDEPLKDVLCFEEIYTIRKEVSPDLKIDKVIDERIKAVLYERLRAFNNKPKEAFSDLEKNPIWLNKSKGIQIKRVTIKGVSNAEPLHVAKNHLGENILDNKDKVVPVDYVSTGNNHHVAIYEDKQGKLQEHVVSFYEAVARVNEGLTIVDKDFNSELDWTFKFTMKQNEMFVFPDEESGFNPSELDLLDQNNFKTISRNLFRVQKIGNKDYWFRHHLETTVTNDIEFTYKRLRNPNALSNATKVRLNHIGQIVQVGEY

SEQ ID NO: 6544 - protein, 1387 aa, synthetic construct
  REGION 1..1387: note = Synthetic
MKRILGVDLGTTSIGWAYVHEAETKQEQSCIIKLGVRVNPLTTDEKDDFSKGKPVSVNADRTLKRTARRNLQRYKLRRQNLIELLLQAGLIQPGTPLAETDEGSTHQTYALRARAATERIEKEELARVLLMINKKRGYKSSRKAKNEDEGQLIDGMEIAKRLYHENLTPGQLAYRLLQEGKKSLPDFYRSDLMAEFDKVWRLQATFYPEIFTNEFRKDIEGKGQRATSAAFWTRYGFNTAENKGNWHERKLRAYQWRAAATGTRLTEAEAAYVIAEINNNISNSSGYLGEISDRSKELYFNNQTVGQYLYHQLQQNPHANTKNKVFYRQYYLNEFETIWQTQAVYHSELTPELKNEVRDVVIFYQRKLKSQKDLVNFCEFESKIVEYEKDGKKVKYQMGAKAIPKSSPLFQEFKIWQNLGNLQVQHKKLRQPEFLSTEAKELLFAELNIKGNLPKEEILKLLELNPKEWELNFTTVEGNRTNLAFYAAFFKAMENEGHDETDWLKLPAAEIKNSITDFFNSQGIDARILDFDGLQLNTPAEQQPAYLFWHLLYAYEGDDSPTGNEKLYQLLQSKFGFKRDFAQILARVGLQADYASLSAKAIKKIFPYIRENKYSEACMLAGYNHSHSQTAEENANRPLKEQLDLLPRNSLRNPVVEKILNQMVNVVNAIIADPELGRPDEIRIELARDLKKNAKERAAATLQINKTKAEHDAIRALLIKEFGLKNPTRNDIIRYKLYEELKFNGYKDIYTNDYISREELFTHKYDIEHIIPQSRLFDDSFSNKTVVLRSINLRKGNATAIDFIKDTYGEAALSEYKTRLDAYIKFYPERKAKYNKLQLHGAAIGEGFIERDIRDTQYIAKKAKAMLQQIVRNVVTTTGSITDRLRDDWGLVNIMQELSLEKYRMRGLTEMQETKDGNLKERIIDWSKRHDHRHHAMDALTIAFTRHSYIQYLNHLNARSHEDEFTETVLRIQAKETKVGTDGKRRFNLPVPHFREQARQHLEATLVSIKAKNKVVTKNKNKIKTATGEKVQIALTPRGQMHKETVYGKVRRQVTAEEKVSTKFTAEVIAQVTNPAYRAALLNRLNQNGNDPLKAFGGKNALTKNPLYIDESKKIPIPEKVKLSWLEDDYTIRKDITPDNFKDKKSIEKVLDGAARNIMLQRLEEFNNNAKDAFSNLDKNPIWLNREKGISIKRVTISGVKNAEALHFKKDHLGKLILQNGKPVPADFISTGNNHHAAIFRDEDGNLQDEVVSLHKVITERVNVGLPIIDRTYNQHLGWRFLFSIKQNEYFVFPSADFDPSEIDLFDPANYALISKHLYRVQKFSKLTYGNSAVREYVFRHHLETSVDDKKELKDLTYKSVKSLPYLENIVKVRINHLGKIVKVGEY

SEQ ID NO: 6545 - protein, 1386 aa, synthetic construct
  REGION 1..1386: note = Synthetic
MKRILGLDLGTTSIGWALVEESKNKEESNIIKLGVRVNPLTVDEKINFEGGKPITTNADRTLKRGARRNLDRYQLRRDFLIHELKKQNFITENTPLTEIGKDTTHQTIALRALAARKKVSLEDLSKILLGINKKRGYKSSRKSKDENDGVAIDGMVVAKILYDNKLMPGQYVFNLLTQEKKHIPDFYPSDLKTEFDAIWTKQKEYYPEILTQILYQDLKGKNKGQTWTICSKPFQIEGIKLEGNRNEQKIKRYELRKDGLSKKLSLEHLAIVFQEINNDIKGTSGYLGKISDRSKELYIDKLTVGEYLYNQIKKNPHTSLKNQVFYRQDYLDEFEQIWNTQAEFHPELSDELKAKIRDIIIFYQRPLKSQKGLLSFCLFESWQQEYFDEVKQTKRKRTIGQRVIPKSSPLFQEFKIWQNINNLEFKYFGNPKDGSDKDAASFKLDEEDRKLLFLEANLRGDLNETSVLKLLGLSTKEWKTNFKEGIKGNTTNEKLFNVYQEIATREGYGIDWKENSATEILEELKAVFPSIGIDASLLEFDGTLQGNTYSKQTSYELWHLLYSAGDDTVISEEDKLIYGNSDVSLKKKLHQKYGFEPVYAAMLANISFPNDYGNLSARAIRKILPYLQDGFNYYEACDKAGYNHSNSITSEENKKRELKERLEILGKNSLRNPVVEKILNQMIHVVNQICDTYGKPDEIRIELARDLKKSAKERLETTKYINSATKINLDIAKTIQQQFGFTPTKNDIVKYKLWNELAPRGHKSLFSDEQIKLQDLFSSKIDIEHILPKALIYDDSFSNKTLAYRHVNLKKANRTAIDFITQDKNTELENYIERVEGLYDKGKGPISRGKRDRLLKSAKDIKEGFIERDLRNSQYIAKKSRTMLLEVFKEVTPTTGRITDRLREDWGIINVLKELNLPKYRAIGLIEIEERKNDKKIEKIKDWTKRNDHRHHAMDALAVAFTTHNHIQYINNLNARRDETHDKHKTIQNIETLITQKFEDDKGNYKRKFIKPMPKFRSEAKRHLEDILVSFKTKNKVVTRNLNKTKKDGGFNTALELTPRGQLHEATIYGKSKAPKQKPTKINKNFSIGEVQQIIHFGQRELVLKHLSQFENDPKKAFDTKTLKNQPLAWNDEPLNEVLCFEDIFTIRKDVSPGLNIDKVVDLGIREILKQRKAKHNGNEKEAFSDLDKKPIWQNKGKGIAIKRVTITGVSNAEPLHYKNDHVGEVLLDELDKKIPVDYVSLGNNHHVAIYEDDKGKLQEKVVSLYEAVERVNQNLPIIAKGYNAHLNWKFKFTMKQNEMFIFPSKEFNLNEIDLINGINSSMISQCLFRVQSISTKDYRFRHHLETSSDNNLDFTYQRIRSPERLRDLIKVRLNHLGQIVQIGEY

SEQ ID NO: 6546 - protein, 1385 aa, synthetic construct
  REGION 1..1385: note = Synthetic
MKKILGLDLGTTSIGWAIVNEAETTNENSEIIKLGVRVNPLTVDEQTNFEKGRPITTNADRTLKRGARRNLQRFKLRRENLIEILTKSKIISKNTALTEVGESTTHQTLSLRAKSASEKIEIEEFARVLLAINKKRGYKSSRKAKNEEEGTLIDGMAIAKELYDNNLTVGQYIYNLLEKGKKFIPDFYRSDLKIEFDKVWNFQKQFYSDILDDELYQKLEDQGQQNSRKRFLAIKGIYTAENKGKRDKTKKQHYKWRSEAISKQLKIEEVAYVLVEINNNLNNSSGYLGAISDRSKELYFNNETVGQNLYSQIKENKHTSLRNQVFYRQDYLDEFEKIWETQAEFHQELTSELKEEIRDIVIFYQRKLKSQKHLISNCQFEKYHKAVPKSSLLFQESKIWAILNILEFENKETKEKQILGDEIRQELFDELNISKKLSEKELLKFVGLSNKVWKSNFPEGIEGNKTNEKLYEVYHKIAENEGYGENWDKKTASEIKEELKAVFSSIGVQSEILYFDTNLDGNDFDKQKSYQFWHLLYSAQDDDKISQEDKIIYGNSNVSLKKKLHFKYGFQPVYANMLANVSLQQDYGGLSARAIKKIIPFLAEGHNYPEACKLAKYNHSNSLTREEQGNRILKDKLELLQKNSLRNPVVEKILNQMINVINQIVDEYGKPDEIRIELARELKKSAKERASATEYINKATLDNEKVRTILKTEFKIKNPTRNDVVRYKLYKELENNGYRTLFTDTYIPAEKLFSKEIDIEHIIPKAKLFDDSFSNKTLAFRNVNLAKADSLAIDFISNTYNSGLEDYKQRVESLYKSGSIKTGKYKKLLLSEKDLPDGFIDRDLRNSQYIAKKAKQLLEEVFRKVTPTIGNITDKLREDWDLINVMKELNLPKYKALGLTKWEERKYDKKVEQIIDWTKRNDHRHHAMDALTVAFTKISHIQYLNNLAAINSSFKDKKNLDKSYLLGIKEKVTKIYKDKKGRRKRKFTPPSENFRAEAKEHIENILISFKAKNKVVTKNKNKTKIGGKDNYLIKQQLTPRGQLHKETIYGRIKEDIIKVEKVNAKFTREKILEVTRPAYREALLKRLEEFNDDAKKAFSGNNTLLKNPLYTDSDKLVPEQVKTKTQNYIYTIRKEVNPDNFSNLKSLQKVIDVGVRRILEKRLEDFKGKAKEAFSDLDKKPIWLNREKGISIKRVLISGIKNAENLHVKKDHFGNDILDEKGKEQKSDFVSTGNNHHVAIYKDKNDKLQEKVVSFYEAVARVNANLTIIDKEYNSNIGWLFLFTMKQNEMFLFPSKEFNPLETDLLNENNNNLISKHLFRVQKIATKNYMFSHHLETQVVGSESLKNKKQLSEVTYRSVRSTEPLRNIIKIRINHIGKIVHVGEY

SEQ ID NO: 6547 - protein, 1385 aa, synthetic construct
  REGION 1..1385: note = Synthetic
MKKILGLDLGTTSIGWAFVEEAENENEESSIIRTGVRVVPLSTEEQNSFEKGQSITTNADRTDKRQARRNKFRYQLRRQQLKGILKQIGFIDDESVLAEDTSHSTFETHRLRAKGVSEKLEKEEFARVLLAINKKRGYKSSRKTNNAEDDGNLVDGMKVAKHLQNNDLTPGQYGFEVLQKESSTLPEFYQSDIRAELEKIWKYQAQYYPEKFTDENFEEIQDKNRNDTAKLFKFKLGIERVEQKGRRSEKLLQNYAWRSEALDKKLDLDILAHIITELNNEISQSSGYLNAISDRSKELYFNNETVGQYQFRLLQEDRHNSLKNRVFYRSDYEHEFDKVFDKQREFYPELTDEIKSKLKDYTIFYQRRLRSQKGLISICELERVEREVTLKNGRTKKKLIGPRVVPKSSPIFQMFKIWQKINDIKVTKKYNLKKEKELGEETKHLLFQELNWKGKMSKTDFLKWLFKDSDENYKDWTIKFEELPWNKTNEKLLAGLRQILEQEGGFEKINWNADAVELIANLKEALEHLGISSDILEFDYSLDNFTEQKSYQLWHLLYSYESDKSDTGNVSLLEKLQNNFGFSENQAKIISHITYNQDYGNLSTRAIRKLLPHLEDGRLYSEASSLVGYNHSNAVTKEENQTRDLEDTIEILKKNSLRNPVVEKILNQMIHVVNSIIENPELGRPDEIRIELARELKQSADQRSEATKSIEKATKEHEKYRQYLKDEIGLHYVSRNDLIKYKLYLELEPIGFKTLYSGTKVDLKGMFFDKTFDVEHIIPKAKLFDDSFSNKTIETRGDNIKKGNETALQYVEREYGAEGVEGFKNRIEELWRAGKISFSKRKKLLMMSGDIPSDFINRDLANTAYIGRKAMELLLKVSRKVTPTGGKITNRLREDWELINVLKELNWDKYDAQGLTYIQKNKEGKELKRIKDWTKRNDHRHHAMDAIAVAFTKRGIIQYLNTLNAKGKENEKSQMVYQLENKYTYKSEKSGKRKFKKPFKNIRKSTKEHLESILISYKAKNKVTTTNYNRIKIGNGKILEQKVETPRGQLHEATIYGKSLKYETKFEKIGGKFDRAKIETVANNSYRKALLKRLEKFGTPKKAFTGANSLSKNPIYLENGEDTVPEKVKLVNLVEQFTIRKDISPDNFANVKKIDKVIDVGVRNILKKRLADYEGKAKEAFSNLEENPIWLNKKKGISIKRVTISGVNNVEVLHDKKDHKGTVLEKDAVDFVSTGNNHHVAIYRDEKGNLQEEVVSFYEAVIRKNQGLPIIKKNHEKGWEFLFTMKQNEMFIFPSDEFDPYEIDLLDSKNLKMISKCLFRVQSISSKYYIFNHHLETKAVGGNEFKNKKMLSGITYQFIRTPSNLENIVKVRLNHLGEIVQIGEY

SEQ ID NO: 6548 - protein, 1384 aa, synthetic construct
  REGION 1..1384: note = Synthetic
MKRILGLDLGTNSIGWALVNEAENTSEQSEIIKLGVRVNPLTVDEKTDFEKGRPLSVNADRTLKRGARRNLQRFKLRRKNLIEILLKSKIIFDDTFLTEIGKNTTHQTLGLRAKAANEKIELLDFAKVLLAINKKRGYKSSRKSINEDEGVAIDGMSVAKTLYENNLTPGQYVLNLLENNKKYIPEFYRSDLQSEFDMVWNNQKTYYPEILTETLYKELQGKNKGATWAICQKPFNIAGEKLEGKAQEQKLKKYQLRVQALTEKLDLEHLAIALQEINNDANKSSGYLGAISDRSKELYFDKITVGQYLHSQIKINPHTSLKNQVFYRQDYLDEFEQVWETQAKHHPILTNALKEEVRDVIIFYQRKLKSQKHLISNCQFEKYHKAIPKSSPLFQEFKIWQNLNNLQFKQTNKKTSGIPTQEQGADYELDEETKTLLFNELNVRGDLKANEILKFLGKKPKEWKCNFEKIEGNRTNQALYAIYKEIADIEGYGFDWSKKSALEIKEELKAIFTEIGIKPEILDFNVNKESTDFDKQSSYQLWHLLYSAEDDHKINEDDKLVYGNSSVALKKKLHNKYGFKPEYTKWLANIKLQQDYGSLSSRAIRKVLPFLQSGNEFSEASKLAGYNHSNSLTKDDLEKRVLKDTLELLPKNSLRNPVVEKILNQMVNLVNQVIKTYGKPDEVRIELARELKKSASERKDATSFITKRTKENEDIRKLISKEFGIPNPTKNDVVRYRLYEELKGLGYKTVFTNEYIPKEKLFSKEIDIEHIIPKAMLFDDSFSNKTLAYRKINLQKRDRTALDFIENDFNADLENYKNRVEALYNKGNGISKGKYKKLLMSQQNLPDGFIARDLRNSQYIAKKAKTMLFEVCKNVVSTTGSITDKLREDWDLINVMKELNLPKYKALGLTEIQVRKGNKKIEVIKDWTKRNDHRHHAMDALTVAFTTHNHIQYLNNLNARKDDNHKKHSNIIAIEKVITHKNTEGKKKFVAPMPNFRTQAKQHIESILISFKAKNKVVTKNINKTKLKGKDNFKSKVQLTPRGQLHKETVYGRSKQPMDKTIKISKKITLEQICNIINPQIKQCLLDHLAKNNNDLLQAFDSKTLKKDLLIYNNEPIKEVHCYENVYTIRKEVSADNFKNEKSLDKVIDRQLKELLKKRLKAYKGNAKLAFSDLDKNPIWLNKEKGIAVKRVTISGVSNVETLHEKRDHVGNLILDKKGKTIQNDFVSTGNNHHVAIYKDEKGKLQDKVVSFYEVVQRVNSGLSIIDRDFNQHLGWQFLFSMKQNELFIFPSEGFNPIEINLLNIENSKMISKHLYRVQKFSRVEYGNSVVRDYVFRHHLETQINDQKELRNTAYKIFKSISEFEFLIKVRTNHLGQIVQVGEY

SEQ ID NO: 6549 - protein, 1382 aa, synthetic construct
  REGION 1..1382: note = Synthetic
MKHILGLDLGTTSIGWAFVNEAEDSKEQSSIIKTGVRVIPLSTDEQNDFKKGNSITINADRTSKRGARRNLQRYKQRRKALLQILKEIKFLDQEKFLSEDGALTHSTYALRAKAPLQKISKEDFAKVLLMINKKRGYKSSRKAINPEEGQLIDGMAVAKELYNNNLTPGQYSYKLLVGGKKQLPEYYRSDLQNEFDTIWKTQKKFYPDLLTEQHKENLKGKNKTQTENYFKKTLGIEKAENKGKNKKLEQYQWRNIGVSEKIEIRELVFALIEINNQINQSSGYLGAISDRSKALFFNNITVGQYQYNFLKENPHGSLKNQVFYRQDYMDEFDAIWKEQSKYYPELTAAVKKSVRDITIFYQRNLKSQKGLISICEFEGKEKNVTVDRVTKKKNIGPRVAPKSSPVFQQAKVLQNINNIRITRKESNEEYTIDEDTKALLFQELNMTEFWSSAQLLKWIFQGSPEKPKDWEVNLKKIEGNRTQASLFKIYRQILAIEGYDNIDFERAEAATILENLQACFQQIGIHKDILTLDMYATGNQFSKQPAYQLWHLLYSYEDDNSSTGIESLKQKLQTNYGFKESHTRLLTSVVFQQDYGNLSVRALRKIYPFLENGNHYDQACKLAGYNHSHSLTTAENENRSLDNTLTLLKKNSLRNPVVEKILNQMINVVNAILAHPQMGRPDEIRVELARELKKTAAQRKEMTSVIAKTTKEHQKYREKIKEEFGLPYVSRKDLIKYKLYLELKSIGFKTLYSGTYIRPEELFTNKFDIEHIIPQSVLFDDSFSNKTLELRDINLEKGNETAFDYCKRKGWQNDFESRIQEIFSKKDIKYGKRKKLLMTKSDIPDDFLNRDLGNSAYIAKKATELLKKISRTVTTTSGTITAKLRSDWELINVLQELAWDKYSALGLTYYQKNKHGKELPRIKDWTKRNDHRHHAMDAITVAFTKPAYIQYLNNMNAKGEKNSVIYGIEQKYTYRNGEGGRKFEKPFENIREESKKHLQSILISHKAKNKVVTLNKNKIKVKGKGNFIHKTELTPRGQLHKETIYGRSGFYEIKEEKVNGKFDEHKIQTITNPDYKEALFNRLLSFDKDPKKAFTGKNSLSKNPVVIKNTNKTIPEVIKTKTLRSQFTIRKNITPDNFKDLKSINKVVDLGIRKILNDRLVEFGGNAKEAFSNLEDYPIWFNKEKGIVIKSAKITGVSNAEPLHYAKDHHGKDIADDQGKPIPVDYVSTGNNHHVAIYHDSKGNLDDEIVTFFEAVERKSQRVPIVNSNSEKGFPLLCTLKQNEVFVFPSKDFDPLQVDLLDPSNNGIISKHLYRVQKFSKVSYGNSSIRDYVFRHHLETELRDNKELKDITWKPIKSLGHLHGIVKVRLNHLGEIVQTGEY

SEQ ID NO: 6550 - protein, 1382 aa, synthetic construct
  REGION 1..1382: note = Synthetic
MGKKVLGLDLGTTSIGWALVNEVKDGNSEIIKLGVRVNPLTVDEQTDFEKGRPLSTNADRTLKRGARRNLQRFKQRREHLIELLIFNKLIADDALLTEVGKNTTHNTLQLRAQAATQKVSLEDFAKILLTINKKRGYKSSRKAKNDEEGSLIDGMAIAKELYEANLTPGEYVYNLLKEEKKFIPDFYRSDLQSEFHKVWNVQKQFYPNLLTDKLLIELEGKGSNATWAICKDPFSIEGIKLEGKREEIKLKKYELRTIALQEKINLEHLAIVLQEINNNLNNSSGYLGAISDRSKALYFNNETVGENLYRQIQENFHTSLKNQVFYRQDYLDEFEQIWETQAKYHTELTEKLKAEIRDVIIFYQRKLKSQKHLIAECEFEKYHKAIPKSSFLFQEFKIWQNINNLVFTNKLTKEQKTLSEDDRELLFAELNIRGNLKETEVLKFFGYGPKEWKSNYTEGVEGNRTNESLYNIYQHILTEEGYGFDWNKRSALEIKEEVRQVFKQIGIEPKILDFDVNLNKVDKQESYQLWHLLYSAEDDHKIDEADKFKYGNSNVAIKKILERKYGIEPKYGNLFANMSLQQDYGSLSAKAIKKIIPFLQSGNDYAEACRLAEYNHSSSLTKEELKNRQLKEKLELVPKNSLRNPVVEKILNQMINVINEIVNTYGKPDEIRIELARELKKSAKQRAEMTSYINKATKANDDFRKLITKEFGIPNPTKNDVVRYKLYEELKRNGYKTIFSNQYIEKKDLFSKKIDIEHIIPKALLFDDSFSNKTLAFREVNLKKGARTGIDFITDDYNSELESYNRRIENLYDKGKGSISKGKFEKLKTSREKLPEGFIERDLKNSQYIAKKAKEMLFEVFENVITTNGNITSKLREDWDLINVMKELNLAKYQLAGLTEIEERKEGKKVEIIKDWTKRNDHRHHAMDALTVAFTTHNHIQYLNNLNAIANQDKRFENLKNSVTSVIKTKSGKTKRIFTPPITNFRTVAKKHIASILISFKAKNKVVTKNVNKTRIKGKDKYKFTTQLTPRGQLHKETVYGKSKRELQKKIKLSKKFTFQQLNLVVDLNIKNLLQNHLAKFDNNFEKAFDAKTLKKEPILYKGEPIFEVRCFEEIYTIRKDITPDLKIEKVVDEGVRNILQNRLDEYNNNKKEAFSNLDKNPIWLKTPLEKSEWKNKNQPLPHEIGIAIKRVKISGVSNAEALHVKKDHFGNEIVAKDGLKKPVDFVSTGNNHHVAIYKDETGKLHESVVSFYEAVARVNAEQPIIDKTLNSDLGWTFLFTMKQNEMFLFPPEDFNFDKKDLLDEKNRNEISKYLFRVQKISTKNYLFTHHLETMATTGDDLKKLKLLIGEKYHFIQTPSNLGNCIKIRINHIGQIVQIGEY

SEQ ID NO: 6551 - protein, 1381 aa, synthetic construct
  REGION 1..1381: note = Synthetic
MKKIIGLDLGTTSIGWAYVHEAESAQERSEIVRLGARVVPLTTDEQDEFKKGKSITTNAARLSKRSLRRNADRFQLRRDELAGVMKEAGWIDETTVLAEQGPRSTFETLRLRAKAASEEVTLAEFARILLQINRKRGYKSNRKTDGDEEGALIDGMDVSKQLNASGQTPGEWVLARMQEGNAVIPAFYCSDLSEELDRIWRKQQASHQAWMTEELHTVLRHADGRSAIRLMDKAGVVPDSVNVKERRRVMYEWRAAAVRDCLPAGRVAAALMQVSKEIGRADSYLGRIGDRSKELYFHRQTVGQYLWRLICDNPNQSLKNLVFYRQDYQHEFETLWSTQAKYHVELTEDLRKRVGRIIFFQRPLKSKKGLVNRCELVHYSVCENSGDDLMEKVDVGPKVCPKSSPLFQEFKVWQVLNNVEVIHPSTQEARRLEMEEKELLASELLFRDRMKKIDVLKLLFSNWRDLDLNYKELEGNRTMAAFYRVYEQVIAQTGHGDYDFAKMRAAKVKELAEGVFAGLGFEVGLLTFDAELDSPAYEQQPCYRLWHLLYSYEGDKSATGNKCLLKKLCRLTGMNAELVGLFMQIRFSGDYGSLSTKAMRRILPYLKAGNTYDVACEYAGFRHSARSLTREELAQKEYKDYLDLLPRNSLRNPVVEKILNQMIHVVNGLSSTYGKPDEIRVEMARELKKSAREREEMTSAISKTTKENAEITAILQRDFGLRYVSRNDILRYKLYCELRIKGNGCRTLYSNTYINPNELFSREFDIEHIIPKSRLFDDSFSNKTLESRTANLEKGDRTAWDYVNEKYGAERADEYRAQVEALYRDGTISKAKRDKLLMPGDKIPEDFIDRDIRNTQYIAKKALEIFEDFVPSVVATSGNVTARLREDWGLVDVMKELNWSKYESQGMVHIEYDRDGRPIRRIVDWTKRNDHRHHAMDALAVAFTKRSYIQYLNHLNARKEATSVAYAIQHKEMELDGSNRWRFKCPFGDRSAFRREAKAQLERILVSIKSKNKVLTPSVNRTKKRGGFNKKVEWTPRGALHNETVYGRIRRYDVKELRVGSSFTAEVIGKVADSRYRAALMHRLAEFGGDPKKAFTGKNSLEKNPLYTDEAHTACVPSSVKVVSFVEIGTIRKGVDPNLNVDKVVDTHIKNILLARLSAYGGDAKKAFSNLDADPIWLNKEKGIAIKRVTISDNSEVRPIHVKRDMRGRLVCDEHGRPVPSDYVQLRNNHHVAIFRDANGELKERVVTFFEAVERVRQLRSEGRAVEVIDKNYKCEEGWTFLFSMKINEYFVFPDAASGFDPREIDLTDPANYALISPHLFRVQKLSSKDYYFRHHLETTVNDVKQLRDITWKRISSLQDLAGTVKVRVNHIGQIVAVGEY

SEQ ID NO: 6552 - protein, 1380 aa, synthetic construct
  REGION 1..1380: note = Synthetic
MKRILGLDLGTTSIGWALVNEAENNNETSSIVRLGVRVNPLTADEKSNFEKGKAITTNAERQKGHTARINLQRYKLRRQNLYNCLKEYGWFGNNALFEEGKASTFETYKLRAKAAEEEISLHELARVLFMLNKKRGYKSNRKANNKEDGQLFDGMTIAKKLYEEHLTPAEYSLQLLNKGKRFTQGYYRSDLNAELERIWNEQKKYYPEILTDEFKQQLKGKTKVNTNKIFLAKHHIYSADLKGSDKKMQSLKWRVEALRQQVDKEILVYVISDLNGQIANTSGLLGAISDRSKELYFNKQTVGQYLWASLEENPHISIKNKPFYRQDYLDEFEKIWETQAAFHKQLTPELKQKIRDIIIFYQRPLKSKKGLISVCELEQRKVKTVIDGKEKEITIGPKVAPKSSPVFQEFRIWQNINNLLLINNDTNEKRSLNEEERNLLYQELSIKAKLSKTDALKVLNKNGKQWELNYKEIEGNRTQAILFDCYNRIITLTGHEECNFKKLKASEIRHYVTTIFKNLGFNTDILDFNPLLEKHELEKQPMYMLWHLLYSYESDNSRTGNNSLLRKLETTFGFPEEYATVLCDVTFEDDYSNLSVKAMRNILPYLQAGDDYSQACAHAGYNHSRRSLTKDELEEKVYKDKLELLPKNSLRNPVVEKILNQMINVINTIVAEYGKPDEIRIEMARELKSSAAEREKITRAISQANTENQRIRDILEKDFALSYISRNDIIKYKLYEELEANGFKTLYSGTYIPKEKLFSKDFDVEHIIPKARLFDDSFSNKTLEARNINIAKSNKTAFDFIKGEYGDEGAEVYKKKLDMLLSKDVISKAKYNKLLMSEADIPSEFIERDLRNTQYIAKKAYEILSELVRTVTPTTGEITNRLREDWQLVDVMKELNFEKYQKLGLAEVVEDRDGRKIKRIKDWTKRNDHRHHAMDALTIAFTKPAFIQYLNNLNARSNKSSSIYAIENKELHRDDNKLKFNAPIPINEFRVAAKQHLSSILISIKAKNKVMTQNVNKIKTKHGIIKKIQLTPRGALHNDTIYGTKKRPIIKKVKVGAALDELTINKISSQAIREALLKRLSEYSGDAKKAFTGKNTLEKNPIYLNAGRTKTVPSLVKTVEWESFHPTRKLIDKDLNVDKVVDKCIRNILKTRLEEFNGDAKKAFSNLEENPIYIDEAKKIALKRVSIEGVLSAIPLHTLKDQAGKLIIGKDGKPVLGNYVQTSNNHHIAFYTDEKGNLQDKAVSFFEAAERKSQGLPIVDKNYNHDKGWRFLFTMKQNEYFVFPNEATGFIPTEVNLMDEANYDMISPNLYRVQKVSRIEKGASTSRDYWFRHHLETILNDDSRLKNSAFKRINSLKPLEGIIKVRINSIGKIVAVGEYD

SEQ ID NO: 6553 - protein, 1380 aa, synthetic construct
  REGION 1..1380: note = Synthetic
MKKILGLDLGTTSIGWALVNEAETESEKSSIIRLGVRVNPLTIDEKGNFEKGKAITTNSDRQQRHSARINLQRYKLRRQNLCDCLQIGGLLGSESMYEEGKESTFETYKLRAKAATEKVALHEFARILFMLNKKRGYKSNRKANSKEDGQAFDGMTIAKKLYEENLTPAEYSLQLLNKGKKFSPSYYRSDLESELNRIWEEQKKYYPEILTDDFYQQLEGKTKVNTTKIFLAKYGIYTADLKGLDKKMQPLKWRIEALNKQVDKEVLTFVVSDLKGQIEKTSGLLGEISDRSKELYFNKQTVGQYVWASLKENPHVSIKNKPFYRQDYLDEFEKIWETQAAFHKELTPELKKEIRDIIIFYQRPLKSKKGLISICELEQKKEKVIIEGKEKEILIGSKVAPKSSPMYQEFRIWQNLNNVLLIDTEINESRPLDEEEKALLYNELSVRAKLSETEALKTINKKGKHWDLNFKELEGNRTQAVLFECYNRIITQTGHEECNFKKISAEDIRHYVATIFKNLGFNTDILDFNPSLEKHELEKQPMYQLWHLLYSYESDKSRTGNESLLNKLEANFGFPQEYASVLADATFEDDYGNISVKAIRKILPHLHDGYDYSEACERAGYNHSVRSLTKEELAQKVYKDRLDLLPKNSLRNPVVEKILNQMINVINAIIVEYGKPDEIRIEMARELKSSAAKREERTKSINQNAAENKRITEILQTEFGLSYISRNDIVKYKLYQELEANGFKTLYSNTYIPKEKLFSKDFDIEHIVPKARLFDDSFGNKTIEARDVNLAKSNKTAFDFVKEKYGEQGIEEYKKKLDTLLKENAISSGKYKKLMMSEADIPSDFINRDLRNTQYIARKAYEILGELVKTITPTTGKITDRLREDWQLIDVMKELNFEKYDRLGLTEVIEDRDGRKIKRIKDWTKRNDHRHHAMDALTIAFTKPSYIQYLNNLNARSDKSGSIYAIETKELHRENNTLRFNAPMPLNEFRKEAKRHLSAILVSIKAKNKVMTQNVNKIKTKNGIIKKVQLTPRGALHNETIYGTKMRPIIKMVKIGAALDEATINKVSSPTIREALLKRLNEYSGDAKKAFAGKNAITKNPIYLNAEHTKTAPAMVKIVEWEMYYPIRKLITPDLKIEKVIDNGIKEILKKRLKEFGGDAKKAFSNLDECPIYLDEEKNITLKRVSIEGVLSAIPVHTLKNHAGKEIKDEDGKAVLGDYVQTSNNHHVAIYQDAKGNLQDNVISFFEAAERKSQNVPIVDKNLNRDKGWHFLYTMKQNEYFVFPNEETGFVPSEIDLMDENNYEMISPNLFRVQTMSRVDYGKTIIREYVFRNHLETILNDNLKLKGLVFKKIKSLKALEGIVKVRVNAIGKIVAVGEYD

SEQ ID NO: 6554 - protein, 1380 aa, synthetic construct
  REGION 1..1380: note = Synthetic
MKKILGLDLGTNSIGWALVNEAEKEIETSSIIKLGVRVNPLTVDEQNNFQQGKSITTNADRTSKRSARRNLQRYKLRRENLIELLKENNVINDNTILAETSNFSTFETYKLRAKAANDKISLEEFARVLLMINKKRGYKSSRKLKGQDEGELVDGMDIAKELYNNDMTPGEYMLGLLSRGKKNKPEFYTSDLKQELQRIWETQKQYYPEILTDEFKNQIIGKSKTNTSKIFLAKYGIYTAENKGKDKKVEAYQWRVEALSKKVEKDVLVFVISDLNGIINNTSGYLGAISDRSKELYFNKLTVGQYLMNGFNDNPHFSVKNKVFYRQDYLDEFEKIWETQKTYHKELTNELKKEIRDIIIFYQRRLKSQKGLISYCEFENEKIAIEVEGKKKNITIGSKVCPKSSPLFQEFKIWQILNNLIVKDDKKNGRGLYQEEKEILFKELNLKNKLSKSEALKLLFENHNKLDLNYKDIEGNRTFNSLFNAFAQIVEMSGHGEYDFNKMNTDQILDIVRTVFTSLGIRVDILNFNTDLEGDEFEKQPIMKLWHLLYSFEGDNSKTGTENLLKKLNKEYGFEKDYGKVIANISFQDDYGSLSSKAIKKILPHLKEGNGFDTACLLAGYRHSKSSLTKEELDKKELKDKLDILPKNSLRNPVVEKILNQMVNVVNQVIDTYGKPTEIRIELARDLKNNAEERKNMTEAISKTTKEHEEYRDIIKKEFGFSSVSKNDLIRYKLYLELKENGFKTLYSNTYIPREKIFDKNFDIEHIIPKAKLFDDSFSNKTLELRTANIEKSEMTAYDYVKNKYSEEGLKDYLNRIDLLYKLKAISRTKYNKLKMQASEIPSDFIDRDLRDSQYIAKKARQILLEISKEVVSTSGQITDRLRKDWQLVDIMKELNWDKYDKLGMTEIVENKDSERIYRIKDWTKRNDHRHHAMDALTIAFTKHNYINYLNNLNARADKSSNAYAIEQKELYRDSHGNLKFIPPMPLNDFRVQAKQQLEDILVSIKAKNKVVTRNINTTKQKGGTNKKLQLTPRGQLHLETIYGELKQYVTKEEKIGSSFNEEKINMVAKKSYREALLRRLRENDNDTKKAFTGKNSLDKNPLFIDALQTFKVPEKVKLVEFETGYTIRKEISPDLKIDKVIDVGIRRKLEERLKKYDSNPKKAFTNLDEDPIWLNEEKGIQIKSVKIRGISNAVALRSKKNHKGELILDKEGNPQKVDFVNTGNNHHVAIYKDEKDNLQENVISFFEATARANAGIPIIDKSYNHDKGWQFLFTMKQNEYFVFPNEKTGFNPKEIDLLNPINYSLISPNLFRVQTMSKVMYGNNAVRDYKFRHHLETQLVDSKELKDITYQSIKSLSIFEHIVKVRVNHIGQIVSVGEY

SEQ ID NO: 6555 - protein, 1380 aa, synthetic construct
  REGION 1..1380: note = Synthetic
MKRILGLDLGTTSIGWALVNEAESNNEASSIVRLGVRVNPLTVDEKSNFEKGKAITTNADRQLRHGARINLQRYKLRRQNLHDCLQKQGWLGTEAMYEEGKASTFETYKLRAKAAEEEISLHEFARVLFMLNKKRGYKSNRKANNKEDGQLFDGMTIAKKLYEEHLTPAEYSLQLLNKGKKFTQGYYRSDLNAELERIWNEQKKYYPEILTDEFKQQLEGKTKTNTSKIFLGKYGIYSADLKGLDRKLQPLKWRVEALQQQVDKEVLAFVISDLKGQIANTSGLLGAISDRSKELYFNKQTVGQYLWASLEENPHISIKNKPFYRQDYLDEFEKIWETQAAFHKQLTPELKQEIRDIIIFYQRPLKSKKSLISVCELEQRKVKATIDGKEKEITIGPKVAPKSSPVFQEFRIWQNLNNVLLIDNDTNEKRPLDEVERNLLYEELSIKAKLSKTEALKILNKKGKQWDLNYKELEGNRTQAILFDCYNRIITLTGHEECDFKKIKASEIRRRVSTIFKNLGFSTEILDFDPSLEKHELEKQPMYQLWHLLYSYESDNSRTGNESLLRKLETTFGFPEEYATVLCDVVFEEDYGNLSVKAMRKILPYLQAGNDYSQACAYAGYNHSRHSLTKEELDKKVYKERLELLPKNSLRNPVVEKILNQMINVINAIIDEYGKPDEIRIEMARELKSSAIERENRTRAISQGNAENQRIREILEKEFALSYISRNDIIKYKLYEELKPNGFKTLYSDTYIPKDKLFSKDFDIEHIIPKARLFDDSFSNKTLEARDINLAKSSKTAFDFIKEKYGEEGAEAYKKKLDMLLDNDVISKAKYNKLLMAEADIPSGFIERDLRNTQYIAKKACEILGELVRTVTPTTGEITNRLREDWQLVDVMKELNFEKYEKLGLTEIVEDRDGRKIKRIKDWTKRNDHRHHAMDALAIAFTKPSFIQYLNNLNARSNKGDSIYAIENKELHYEEGKLRFNAPIPVNEFRAEAKRHLSAILVSIKAKNKVMTQNVNKIKTKHGIIKKIQLTPRGPLHNETIYGTKMRPIIKMVKVGAALDEATINKVSSLAIREALLKRLNEYSENAKKAFTGKNTLEKNPIYLNVERTKVVPALVKTVEWENYHPIRKPITPDFKVDKVIDKGIRDILKARLEEFNGDAKKAFSNLEENPIYLDEAKKIALKRASIEGVLSAIPLHTLKNQAGKPITGKDGKPVLGNYVQTSNNHHIAFYYDEDGNLQDNAVSFFEAAERKSQSVPVIDKDYNRDKGWRFLFTMKQNEYFVFPNEATGFIPSEVDLTDEANYGIISPNLYRVQKMSRIEYGKTIVRDYAFRHHLETTVETNANLKGIAYKQLKSLPHFKGIVKVRVNSIGKIVAIGEYD

SEQ ID NO: 6556 - protein, 1380 aa, synthetic construct
  REGION 1..1380: note = Synthetic
MKKILGLDLGVASIGWALVSEAEKDNEVSSIIKLGVRVNPLTVDESSNFEKGKSITTNADRTLKRSMRRNLQRYKLRRENLIEILKQHGFISDDSILSEYGNNTTFQTYHFRAKAATEQVTLHQLAQILLMINKKRGYKSSRKAKSQDEGQLIDGMEVARRIYEENLTPGQFTYMLLKEGKKFIPEFYRSDLQAEFERIWDFQKQFYPDMLTEDFNKKIEGKGKQNTAKVFLAIYGLYTAENKDKDKHLQAAQWRIDGLSKELTAEEVAFVISEVNGAINNSSGYLGAISDRSKELFFNKQTVGQYLMEQLAKNPHTRLKNQVFYRQDYLNEFETIWETQAKYYDILTPELKSEIRDVVIFYQRKLKSQKGLISFCEFESRKVEIIEDGKKKIKINGMRVCPKSSPIFQEFKIWQVLNDIVITDKQNILAKRLLNQEEKESLFEELSFKKELKGTDALKLLYKNSKEFEINFETIEGNRTQLALFEAYQKIIEQTGHDKYDFQKMKPKDVLDKVKSIFSGLGYNTAILTFDSALENDAFEKQAFYQLWHLLYSFEGDQSNTGNEKLIQKLSDLYGFEKEYAHILANVSFQDDYGSLSTKAIRKILPHMKEGNKYDVACGYAGYRHSKSSLTTEEKENKAYKDRLDILPKNSLRNPVVEKILNQMVNVINSIIDTYGKPDEIRIELARELKKNAKQREKMTAAINKATADHEEYRKILKTQFGLLRVSRNDIIRYKLYDELKNNGYRTLYSNIYISPDKLFSKEFDIEHIIPQARLFDDSFSNKTLELSSINRDKGNDTAYDYVSTKYGAESLDEYEKRIEALYKQGIISKTKYTKLMMKLADIPEDFINRDLNDTQYIVKRAKEMLEELVKDVVSTTGSITDRLREDWQLIDVMQELNWDKYDKLGLTEIIENREGHKIKRITDWTKRNDHRHHAMDALTVAFTKRSHIQYLNNLNARSDKTGDIYGIERKVLERDHRNKLRFIPPMPLNDFRTEAKRQLENILVSIKAKNKVVTINVNKTKKPGGVNKKKQLTPRGQLHNETIYGSIQCPTVKEEKVGGGFDETQIVKVTSKRYREALLARLAAFGNDPKKAFTGKNALAKNPIYLDKLQTECVPEKVKIVEMETIYTIRKEISPDLKLDKVIDSGIRTILETRLKEYDNDPKKAFSNLDENPIWLNKDKGISIKRVTIRGINNADSLHDKKDKDGNLILDKNGKKQPVDFINTGNNHHVAIYRDNEGNLQEVVVSFYEATMRANQELPTVDKTYKQSEGWEFLFTMKQNEYFVFPNPKTGFDPHEIDLKNHDKYAEISPNLFRVQKIATKNYVFNHHLETSAVTGEILKDKKQLSEITYYSIRSLPPIKDIIKVRVNHIGQIVDVGEY

SEQ ID NO: 6557 - protein, 1380 aa, synthetic construct
  REGION 1..1380: note = Synthetic
MRKILGLDLGTTSIGWALVNEADNDNESSSIIRLGVRVNPLTVDEKSNFEKGKAITTNSDRQQRHGARINLQRYKLRRQNLRNLLQDQGWLCNEALYEEGKGTTFETYKLRAKAAEEKISLHEFAHVLFMLNKKRGYKSNRKANNKEEGQLFDGMTIAKKLYEEHLTPAEYSFQLLSKGKKFAQDYYRSDLIAELERIWNEQKKYYPEILTDEFKQQLEGKTKVNTNKIFLAKYGIYSADLKGLDKKLQPLKWRIEALKQQVSKEILAFVISDLKGHIANTSGYLGAISDRSKELFFNKQTVGQYLWASLKENPHISIKSKPFYRQDYLDEFEKLWETQAAFHKQLTPELKHEIRDIIIFYQRPLKSKKGLISVCELEQRKVKVTIDGKEKEITIGPKVAPKSSPVFQEFRIWQNINNILLINNDTNEKHSLNEKERNLLYQELSVKVKLSKTDVLKILNKKGKQWDLNYKEVEGNRTQAILFDCYNKIISLTGREECDFKKLQASEIRHHVTTISKNLGFNTDILDFNPSLVKHELEEQPMYMLWHLLYSYESDNSRTGNEALLRKLAIAFGFPKEYATVLCDVVFEDDYSNLSVKAMRKILPYLEVGNDYSQACAYAGYKHSRRSLTKEELDQKVYKERLELLPKNSLRNPVVEKILNQMINVINTIIDEYGKPDEIRIEMARELKSSAAEREKATRAISQANAENQRIREILERDFALSYISRNDIIKYKLYQELEANGFKTLYSDTYISKEKLFSKDFDVEHIIPKARLFDDSFSNKTLEARDINLAKSNKTAFDFVQEKYGTEGAEAYKKKLDILLSKEVISRAKYNKLLMKEADIPSEFIERDLRNTQYIAKKACEILGEIVKTVTPTTGEVTSRLREDWQLVDVMKELNFEKYQKLGLAEIVEDRDGRKIKRIKDWTKRNDHRHHAMDALTIAFTKPAFIQYLNNLNARSNKSNSIYAIENKELHREDNKLKFNAPIPIHEFRAEAKRHLSAILISIKAKNKVMTQNVNKIKTKQGVIKKIQLTPRGALHNETIYGTKKRPIITMVKVGAALDEATINKISNLTIREALLKRLAEYNGDAKKAFAGKNSLEKNPIYLNEEKTKVLPALVKTVEWETYHPIRKPITPDLKIEKVIDKGIRKILKARLAKFNGDAKKAFSNLDENPIYIDEAKKIALKRVSIEGVLSAIPLHTLKDQAGKPIIGKDGKPVLGNYVQTSNNHHIAFYYDENGNLQDNAVSFFEAAERKSQGIPIVDKNYNHDKGWRFLFTMKQNEYFVFPNEATGFIPTEVNLMDEANYDMISPNLYRVQTISKIIYDKSIIRDYLFRHHLETTVERIPNLKGITYKQLKSLPHLKGIVKVRINAIGKIVAIGEYD

SEQ ID NO: 6558 - protein, 1380 aa, synthetic construct
  REGION 1..1380: note = Synthetic
MKKILGLDLGTTSIGWALVYESENTDEKSSIVRLGVRVNPLSVDEKGNFEKGKAITTNADRQQTHGARINLQRYKLRRENLKDCLQKQGWIGTEALCEEGKASTFETYMLRAKAAEEEISLHELCRVLFMLNKKRGYKSNRKANNKEDGKLFDGMTVAKKLYEEHLTPAEYSLKLLSSGKKFKQEYYRSDLKEEFDRIWNEQQKYYPEILTDDFKQQLQGKSKGNTSKIFLGKYGIYSADLKGLDRKLQPLKWRVEALKQQVDKEVLAFVISDLNGQIASTSGLLGAISDRSKELYFNKHTVGQYLWTSLKETPYVSIKNKPFYRQDYLDEFEKIWETQATYHKELTPELKQEIRDIIIFYQRPLKSKKGLISVCELEQRKVKVTIDGKEKEISIGPKVAPKSSPMFQEFRIWQNLNNILLIDKGNNSIHPLYEEEKNLLYEELSVKEKLSKAEALKVLNKNSKQWDLNYKEIEGNRTQAVLYDCYNRIIAMTGHEECNFKKLKASEIRSYVKTIFTGLGFNTDILEFDSSLTGHELEKQPMYQLWHLLYSYESDNSRTGNDALLRKLEIAFGFLKEYAAVLSDVVFEDSYGNLSVKAMRKILPHLQAGLDYSQACEEAGYKHSRRSLTKNELDQKEYKEKLELLPKNSLHNPVVEKILNQMINVINAVIDEYGKPDEIRIELARELKIGAAERENMTRSISQGNAENKRIREILQKEFALSYISRNDIIKYKLYEELKSNGFKTLYSDTYISKDKLFSKDFDIEHIIPKARLFDDSLSNKTIEARDVNIAKSNKTAFDFIFGKYGQQGIEAYKKKLDILLQDGSISKAKYNRLLMKEADIPSGFIDRDLRDTQYIAKKAYEILSDLVRNVTPTTGAVTSRLREDWQLVDVMKELNFEKYQKLGLAEVIEDRDGRKIKRIKDWTKRNDHRHHAMDALTIAFTKPSYIQYLNNLNARSDKSSSIYGIENKELHREDNKLRFNAPLSINEFRAEARRHLKSILVSVKAKNKVMTQNVNVIKTKHGVIKKVQLTPRGELHNATFYGTKKRSIIKMIKVGAALDEATIKKVSSSFIREALLDRLHEYNGDAKKAFTGRNSIDKNPIYIDEEHKKTVPSLVKTIEWEMYHPTRKMISPDLKIDKVIDKGIREILRTRLAKFNGDAQKAFSNLDENPIYKDEAKKITLKRVSLEGVSSVIPLHKLKDMGGKPVVGKDGKPVWGDYVQTSNNHHIAFYMDENGNLQDDVVTFFKAARRKSQGVPVIDKNYNHDKGWHFLFTMKQNEYFVFPNEATGFIPTEVDLMDEANYDMISPNLYRVQKMSKTKQGITDKRDYWFRHHLETVLNNDLKVRNSIFKQINSLKPLEGIVKVRINAIGKIVAIGEYD

SEQ ID NO: 6559 - protein, 1380 aa, synthetic construct
  REGION 1..1380: note = Synthetic
MAKKVLGLDLGTTSIGWAFVLEDESNTEKSEILKLGVRVNPLTTDEQLNFEKGKPVSINAERTLKRSMRRNLQRYKLRRNNLIAILKEHNIITDTSVLAENDKHTTHSTYALRAKAATEQLELEEFARVLLMINKKRGYKSSRKAKNQDEGQLIDGMAIAKRLYEENLTPGQLCYQLLKDGKKILPDFYSSDLQVEFNKVWDLQAKHYPAILTDDFKKEIQGKGQRATAAIFSKVHGMYTAENKGSFLNKKLQAYKWRSEAVTMQLDIREVAYVLAEINNNLSSSSGYLGAISDRSKELYFNNLTIGEYLYNHLKNNPHARTKNQVFYRQDYMDEFEKIWTVQAQHYSQLTDALKAEIRDVIIFYQRKLKSQKGLVSFCEFENKIIEVTGEDGKIKKKTVGAKVSPKSSPLFQEFKIWQTLGYIKAKNKITGVELTFDDSAKQTLFNELNVKNELSANQAFKLLGYKAEEWELNYKELDGNKTNKVLYDAYLKMMASEDDEESAISFSSTDLKDNVAAFFEKEGIDTSILFFDAELDGKDFEKQPSYQLWHLLYSYQEDSSPTGTEALYMLLNKKFGFKKEYATILANITLSGDYGSLSAKAMRKIYPYIKENTFSTACELAGYNHSKSLTKEELQNRPLSDKLEILSKNSLRNPVVEKILNQMVNVVNAIIAEPSLGKPDEIRIELARELKKNASERAEMTDSINKAKAEHDAIRIKLNNDFNIKNPTKNDIIRYKLYEELKNNGYHTLYTNMYIPPEILFTKDIDIDHIIPQAVLFDDSFSNKTLCFRNDNLKKANRTAYDYISTEYGEEALTAYEQRVKMIYEAKDGNGIKKAKYNKLLKKGSEIGSGFIERDLRNTQYIAKKAKQMLEDVCRTVVPTTGSITDRLREDWGLTNVMQELNIEKYRRLGLTEKVERRDGSFKEKIIDWTKRNDHRHHAMDALTVAFTKHSHIQYLNNLHARGDKSGSVYGIEQKETYKDKEGNRKFNLPIPSFREEAKKHLDSILISYKAKNKVVTKNKNKTSLKTGTHIKIELTPRGQLHKETIYGKIYQYATKEEKVGARFDESTILQVANKIHRDALLKRLVANSNDPKKAFTGKNSLNKNPIYLDEHLKIKMPEKVKLVCQEPDYTIRKDITPENFKDAKTIEKVIDVGVKKILLERLKKSNSNPKEAFSNLDKNPIWLNESKGIAIKRVTISGVKNAEPLHDKKDHLGDVIKDVDGNKIPVDFVSTGNNHHVAIYRDANGELQEKIVSFYEAVHKASISMPIIDKTYNQSEGWQFLFTMKQNEYFVFPSQDFDPSEVDLLNPANNKLISPNLFRVQKIATKNYFFRHHLETELVDKKEVKDIVYKNIQSLKPLEKMVKVRVNHIGQIVRVGEY

SEQ ID NO: 6560 - protein, 1379 aa, synthetic construct
  REGION 1..1379: note = Synthetic
MKKILGLDLGTNSIGWALVNEAEDKNEQSKIIKLGVRVNPLTTDEKTDFEKGRPLSVNADRTLKRGARRNLQRFKLRRKYLINILKEHNIIDGATFFTEVGKGTTHQTLKLRAKSAKERIELEDFAKVLLAINKKRGYKSSRKAVNEEDGVAIDGMAVAKEMFESNLTPGQYVLQLLKTDKKNIPDFYRSDLSAEFNTVWQKQQTFYPDILNDELYKALAGKNKSQTWAICQKPFNIVGIKLEGKAKEQKLKRYELRSLGITAQLDLEHLAIVLQEINNDLNKSSGYLGGISDRSKELYFNKITVGQYLYGQINKDPHSSLRNQVFYRQDYLDEFEQIWNTQAKYHSILTNTLKEEIRDVIIFYQRRLKSQKHLISNCPFEKYHKAVPKSSPLFQEFKIWQSLNNLEFKNDNTKEIIKVSLLEEEIRQNLFNELNIRGELKPKEILTNLKRYLELGTLTAWKCNFEKIEGNRTNQVLYDVYRDIIEAEGYGFDWSKKSSPEIKEELKAVFSEIGIKPDILDFDPNKEGVVFDKQESYQLWHLLYSAEDDHKISEEDKLVYGNSNVALKKKIKAKYGFKPDYAKWLANVKLQQEYGSLSSRAIRKILPFLQSGNTYSEACAMAGYNHSNFLTREELNNRALKAKLELLPKNSLRNPVVEKILNQMVNLVNQVITTYGKPDEVRIELARELKKSATERKDEFLFISKRTRENNDIKKLIVNEFGIPNPTKTDVTRYRLYEELKDLGYKTVFTNTYIPKEKLFSKEIDIEHIIPKAMLFDDSFSNKTLAFKKINLQKRDRTAIDFIESDFNKDLENYQNRVESLYNKGKGLIGKGKYKKLLMSQQNLTEGFIERDLRNSQYIAKKAKLMLQELVREPIVSTSGKITDKLREDWDLINVMKELNLSKYRALGLTEIEERKDNKKIEVIKDWTKRNDHRHHAMDALTVAFTTHNHIQYLNNLNARKDQSHDKYSNIVAIEKLITYRNKEGKKRFVSPMSNFRMEAKEHIESILISFKTKNKVVTKNVNKTKLRGKDNYTVKTQLTPRGQLHKETVYGRSKQPMDKPIKLNKRTTIEQVNTIINPKIKQYIKDHLNKFDNNVDIAFDTKTLKKTPLLFNNEPLKEIWCFEDVYTIRKEIGPDLKVDKVIDKGIKDTLKNRLEAFGNNAKEAFSNLDKNPIWLNKEKGISIKRVTISGVSNVEALHEKRDHFGNLILDKKGAPIQNDFVSTGNNHHVAIYIDYEGKIQDRVVSFFEAVQRVNSGLTVIDKDYNSHLGWRFLFSMKQNELFVFPSKEFNPFEIDLMEKNNAKLISPHLFRVQKFSKVEYGNSAVRDYVFRHHLETMINDNKELRDTSYKVFKSISEFEFIVKVRTNHLGQIVQVGEY

SEQ ID NO: 6561 - protein, 1378 aa, synthetic construct
  REGION 1..1378: note = Synthetic
MRRILGLDLGTTSIGWAFVQEAENNQEESKIIQTGVRVVPLNTDEQTSFEKGQSITINADRTLKRGARRNLHRYKMRREAVINLFKKINFINDSSTFSEEGKQTHSTYALRAKATGEKLEKEDLTRVFLMLNKKRGYKSSRKANNQEEGQLIDGMAIAKRLHKEHLTPGELSYKLLLEGKKNIPDYYRSDLQTEFDKIWQLQKTFHPEIFTDDHYEAIETLNKTKTGQYFEKSIGTPRAECKGKRNEKKLQFYRWRNDAVHKELELSKIAFVLTEIKGEINSSSGYLGAISDRSKELYFNDETVGQNLYKQLQKDPNASLKNQVFYRQDYMDEFDAIWQEQSKHYKELTEQVRKELRDITIFYQRRLKSQKGLINICELESRELEILENGIKKRKLIGPKVAPKSSPVFQQAKVWQSINNIVLTNEITKEIKYLDDELRQLLFEELNWLFYFSKAQLLNFLKKHSDIKGKNWKVNLEKIEGNKTNATLLAIYNQILQIEGYEALDSKISISQNMEQLKYCFETIGINSKILSIDYSLKGDEFVQQPSYKLWHLLYSYEDDSSSTGIESLIKRLQEHFNFKEEHANLLCGVAFTQDYGSLSVRALRKLMPYLEEGKIYNEASELAGYKHSNYMTAEENKDRQLLDKLEVLKKNSLRNPVVEKILNQMINVINAIIENPELGKPDEIRIEMARELKKTAKQRKEMTAAIVKATDQHKKYRERIQKEFGLSYVSRKDLIKYKLYLELKATGFKTLYSGTYVKPEELFTNKFDVEHIIPQSILFDDSFSNKTIELRSVNLEKGKETAFDFCERKGCLNDFKNRLEECYSDGKGELRYGKRSKLLMSFKNIPENFLNRDLGNTAYIARKAIQILQPLVRQKIVSTSGNITSKLRSDWELINVLQELNWKKYEVLGYTYYDYNKDGKALPRIKDWSKRNDHRHHAMDAIAVAFTRPAFIQYLNTMHAKSGKSGEVIGIEKKYTYRDAIGGRKFKKPYDTIREDAKEHMDKILISHKAKNKVVTSNKNKIKISGKNNYKTKIELTPRGQLHKETIYGQSLVYLVKEEKISASFDEEKIMTVTKAKYRDALLKRLNDNENDPKKAFTGKNSITRNPVFISINQNVPDKVKTQSLVPRFTIRKNITPDIKLDKVVDLGVKRILETRLKQYNGKPKVAFADLDNNPIWLNKEKGITIKNVTITGVSNAEPLHTAKDHNGKQIIDPSGKPIPIDYVSTGNNHHVAVYRDRNGNLQEEVVSFYEAVIRKNLEQSIIKKNHEKGWKFLFTLKQNEIFVFPSLDFEPSEVDLFDTNNKKIISENLFRVQKISSKNYVFNHHLETKAAGSDTFKNKKELSELTYKFYQSEKYLEGIIKVRLNHLGDIVHIGEY

SEQ ID NO: 6562 - protein, 1376 aa, synthetic construct
  REGION 1..1376: note = Synthetic
MKRILGLDLGVSSIGWALVNEAESENEKSSIVKLGVRVNPLTVDEQTNFEKGKSITTNAERTLKRGMRRSLQRYKLRRNELIRILKEHALISNDTLLYENGNRTTFETYRLRAKAATEEISLEELARVLIMINKKRGYKSNRKAKGDDEGNLIDGMEVAKKLYDEGLTPGQYSLSLVKQGKKFLPEYYQSDLQSELKRIWETQKRFNPEILTDDFWKILQGKSKTNTNKIFIARYQVFSPTLKRDESRKQLLQWRVEGLSQKLPIEVVSAVISELNGQINGTSGYLGKISDRSKELYFRHQTVGQYMMAVLEANPNASLRNMVFYRQDYLDEFERIWETQAKFHPELTPQLKHDIGNITIFYQRPLRSQKGLIAICELEQKKIEIIVDGKTKNITIGPKVCPKSSPLFQDFRIWQRLNDLRLKSDNLFDNRNLELEEKQALAFELSTHAKLTKAQALKVLFGKAPKGVDLNFKEIDGDTTQTALFGAYQKIIEMSGHGEYDFSNSNCSAGEALDIVENVFKALGYNTAPLHFDATLEGKALEQQPYYQLWHLLYSYEGDNSKTGDEKLVQKIRQIFNFDNDDYAKVIAQISFKPDYASLSAKAIRNLLPFMHQGFDYSEACEKAGYRHSARSLTKKELANKELKTSLELLPHNSLRNPVVEKILNQMINVVNGVVSTYGTLDEIRIELARDLKMSAKDREEKTKGINEAQKKHEKFIKELQEDFHIPHPSRNDIIRYKLYLELKNNGFKTLYSNTFIEKQRLFTNDFDIEHIIPQASAFDDSFSNKTLELKTINLKKGNKTAFDFIRDEYGEETLSEYKARVEDLAKSADGISQTKRNNLLKTAADIKGGFINRDLGETQYISRKAREILEQMVRVVTPTTGKITDQLREDWGLIDIMKQLNFDKYSAAGLIETKIVNGKEKLVPKDWTKRNDHRHHAMDALTIAFTKHSIVQYYNNMNARTDKTSDIYGIEQKDMERHNGHLRFKVPVEGMREEAKRQLEQILVSIKSKNKVATQHTNRSRTKKTASGENRRIQLTPRAGLHNETIYGYRQQYVTSMEKVGSSFDEAKIQTVASKELREALYRRLAECGNDPKKAFTGKNSLEKNPIWLNADHSRAVPLRVKCVVFGDIYTVRKPISKDLVLDKVLDPRIRAILQKRLEEFGGDANKAFSNLEENPIWLNERKGISIKRVTINAGLSAPEPIHEKRDRHGNVILDSEGHPIPTDFVQTGNNHHVAIFEDADGKLQEHIVSYYEAMARLTQGLPVINHNYNAELGWRFRFTMKQNEYFVFPSEDFNPAEVDLINPDNYALISPHLFRVQKLTSKDYFFRHHLETKVEDKNELRDITWIRIRNCEGLRNIVKVRVNHIGQIVAVGEY

SEQ ID NO: 6563 - protein, 1376 aa, synthetic construct
  REGION 1..1376: note = Synthetic
MKKILGLDLGTTSIGWAVVNEATNNEEKSSIVKLGVRVNPLTVDEQTNFEKGRPITTNADRTLKRSMRRNLQRYKLRRENLINCLKEHGFINNDSILCENGNRTTFETYRLRAKAATEKISLQELARVLLMINKKRGYKSSRKAKSTDEGELVDGMTVAKTLYEENLTPGQYSLLLLRNGKKYLPDYYQSDLHAEMLKIWHKQQTFYPGILTPDFMKALEGKSKTNTSKIFYARFGIHTADNKSKDKKLQAYEWRVDALNRQLTIEEVAYVISDLNGLINGSSGYLGRISDRSKNLYFNKQTVGQYLMQELDKNPNYSLKNSVFYRQDYLDEFEAIWNTQSQYHPELTPELKKELGNIIIFYQRPLKSQKGLVAICELENEKREVEVDGAKKQITIGCKVCPKSSPLFQEFRMWQRLNDIVIYDSNAMPDLFGNGRATKRRLTEEEMNTLAFELSIKGKMTKQQMLKCLFGKTAGLDMNFKDIDGNETQAKLFEAYLKIVEMSGHEGYDLAKLNASQILDVVEKVFTGLGFNTAPLYFDVSIEGKQFDKQPMYQLWHLLYSYESDNSKTGDASLVKKIRDIFNFDNDDYAKVIAAVSFKPDYGSLSAKAIRNLLPIMKKGIEYSEACKSKYGTHSKRSLTKEELDQKELKGYLDLLPKNSLRNPVVEKILNQMINVVNEVVTTYGPIDEIRIEMARDLKQSAKKREDKTNDINAMNAYHEQIKKILQAAPFNIEHVSRNDIIRYKLYEELKENGYKTLYSNKYIPKEKLFSREIDIEHIIPQARLFDDSFSNKTLEWRSINQEKSNATAFDYVKGKYGEAGAKEYKQRVDELLKQKVISKAKHAYLLMSVEGIPSNILNRELNDTQYIARKAREILEQVAKVVVPTTGKITKRLREDWQLVNVMQELNYPKYQQLGLAETFEKEWTKRNDHRHHAMDALTIAFTKLSIIQYLNNLNARSDKSSSIYGIEQNELYRDKHGSLRFLPPIPLDEFRAEAKQHLEQILVSIKSKTKVVTRNTNKSKSKKVEKGYNKRVQLTPRGQLHNETIYGSSQRYVTKEEKVGSSFDVAKISTVANKAYREALQRRLDTYNGDVKKAFTGKNSLEKTPIWLDDLHTRAVPIKVKCVTMETIYTIRKLISKDLRIDKVIDKHIQDILRTRLEEYEGDANKAFSNLDENPIWLNEEKGICIKSVAINAGLSKPEAIHEKRDHRGQLIFNKKGNKQAADFVQTANNHHVAIFRDAEGKLQEHIVSFYEAAMRANQGLPIIDKEYNKAEGWEFLFTMKQNEYFVFPDKNFCPSEYDLMNPENNAIISPHLFRVQKLTTKDYFFRHHLETTVEDKNELREMTWKRIRNCDGLKGIIKVRVNHIGQIVAVGEY

SEQ ID NO: 6564 - protein, 1375 aa, synthetic construct
  REGION 1..1375: note = Synthetic
MKRILGLDLGVSSIGWALVNEAENDNEKSSIVKLGVRVNPLTVDEQTNFEKGKSITTNAERTLKRGMRRSLQRYKLRRDELIRILKEHDIINDDTILYENGNHTTFETYRLRAKAATEQITLGELARVLIMINKKRGYKSMRKSKGEDEGNLVDGMEVAKKLYDEGLTPGQYSLALVEQGKKYLPEYYQSDLQNELQRIWDTQKPFYPEVLTDEFWKTLQGKSKTNTNKIFIARYQIFSPTLKRDEARKQLLQWRVEGLTEQLPVEVVSAVVSELNGQVNGTSGYLGKISDRSKELYFRHQTVGQYMMAVLDKNPNASLRNMVFYRQDYLDEFERIWETQAKFHPELTQELKHDIGNVTIFYQRPLRSQKGLISVCELEQKRVEALVDGKKKTITIGPKVCPKSSPLFQEFRIWQRLNDLRIVSDDLFSNRSLDLDEKQALAHELSIHEKLTKPQALKLLFGKAPKGIDLNFKEFEGNTTQAALFKAYQTIIEMSGHGEYDFSKMKTDEAMDIVQSVFKALEFNTEPLYFDATLKGKDLEKQPHYQLWHLLYSYEGDNSVTGDAKLIGKIRELFHFDNDDYAKVIAQISFKPDYGSLSAKAIRNLLPYMYQGLNYSDACEAVGYRHSARSLTKEEIENKELKPSLDLLPRNSLRNPVVEKILNQMINVVNAVIETYGPLDEVRIELARELKKSAKERENDTSAINKATKDHEEYRKTLQGAPFFIAHPSRNDIIRYKLYLELEKNGYHTLYSNTYIPKEILFTNDFDIEHIIPQATAFDDSFSNKTLELKSVNLKKGDKTAYDFIKDEYGDEAAEEYKARVDDLLKQGKISKTKHDNLLKTASDVVGGFINRDLRDTQYISRKAREILEELVRVVTPTTGTITDQLREDWGLVDVMQQLNWDKYDAAGQTETWQNREGKTIRRIKDWTKRNDHRHHAMDALTIAFTKHNIVQYYNNMNARADKTSDIYGIECKDMERHNGHLRFKLPVENMREEAKRQLEAILVSIKSKTKVATQNINRTKSKNAEGGVKRKVQLTPRAQLHKETVYGRNQRYRTWEEKVGSSFDEQRIASVASKEIREALQQRLAEFGGDANKAFTGKNSLEKNPIWLNTDHSRAVPLKVKCVAFEDIFTIRKAVDKDLVLDKVVDPKVKAILKKRLEEFGGDANKAFSNLDENPIWLNEERGIAIKRVTINAGLSEPEPIHEKRNRQGNVILDEDGNPIASDYVQTGNNHHVAIFEDANGKLQEHIVSYYEAMARLNQGLPIIDYNYNAELGWKFRFTMKQNEYFVFPSKDFNPSEVNLMDPENYAFISPHLFRVQKLSTKNYMFRHHLETTVEDKKELRDMTWINIRNCEGLRNIIKVRVNHIGQIVAVGEY

SEQ ID NO: 6565 - protein, 1375 aa, synthetic construct
  REGION 1..1375: note = Synthetic
MKRVLGLDLGTNSIGWAVVNQAENNNEESSIVKIGVRITPLSADEKDNFEKGKAITTTADRTLKRGMRRNLQRYKLRREHLLHVLKRENWIDDETLLGEEGNATTFETYRLRAKAAQEQITLPELARVLLMINKKRGYKSNRRARNQEEGTLIDGMEIARRLYDDNLTPGQLSYQLIQQGKKHLPDFYASDLRHELQCIWQEQQKHYSDILTDELFEQLHGKNQRGTEATFATMGWKSAELKDRKTRTATLLRWRAEALNTRLEPEQIVSIIANVNSAIGNSSGYLGAISDRSKELYFKKQTVGQHLMSLLDDNPNTRLKNRVFYRQDYLNEFETIWECQRQFYPSQLTDELKHELRDVVIFYQRRLKSMKGLVSFCEFESREITVNVNGQERKVMTGCRVCPKSSPLFQQFKIWSTVNNLMIEDRTRRGRKADNQTALTLEQKQLVVDELNGREKMTDSEILKLLGYNDNDYKLNFKQLQGNTTLVAILEACKKVVEWSGHDVEKFDKLDSRSKFMMVDQVLKGALGADTSFLTFDCVDADTMQAEKLFKLWHLLYSYEGDDSATGNDRLIAHISALTGLSLEYAAAFTTVNLVDDYGSLSTKAILKIMPFLKQGYIYSEACEMAGYRHSKASLTKEENETRELVDTLPLLQKGALRNPVVEKILNQMIHVVNGCNSEYGPFNEIHVEMARTLKQTQEQREKATTRLRARTDETEKIKKILQESPFNIPRPTRKDVIRYRLYQELAPNGYKTLYSQTYIPKDRLFSRDFDIEHIIPQALLFDDSLNNKTIESRAVNIEKSKMTAMDYVRSKEGEAGVKEYEKRIAFLYDKNNRNGTNRKHAYLLMTEKDIPSDFLNRDLSDSQYIARKAKELLQQLCRVVVPTTGAITARLREDWQLVDVMKELNWDKYNSLGLTTIEQNKEGHQVRIINGWTKRNDHRHHAMDALTIAFTRLQHIQLLNNLNAASGDEPSDNALALIKNEITEKGKFLPPMPLDELRREALRQLDAVLVSIKAKNKVVTRGVNKMKGGPVQATLTPRGQLHNETIYGSKRFYQTKEETVNATFDAAKIATVARKDYREALMRRLNENGGDPKKAFTGKNSLKKNPLFTTDSHATQVPEKVKTVQLCQQFTIRKPISKDIKIEKVIDKGVQRILWQRLSEFGNDYAKAFSNLDENPIWINKEQGIAIKRVTITGVREAVALHEKRDNQGRVILDENAQHIPTDYVSTSNNHHVAIFEDADGNLQEHIVSMMEATAAANCGLPIVDKNYRHDQGWKFLFTMKQNEYFVFPGDGFNPEEVDLTDPSLASEISKHLFRVQKLTSKDYFFRHHLETTVSDDKTLKGITWKRITALNNLKGVVKVRVNHLGQIQQVGEY

SEQ ID NO: 6566 - protein, 1375 aa, synthetic construct
  REGION 1..1375: note = Synthetic
MKKRILGLDLGTTSIGWALVEESEKETSKIIKLGVRVNPLTTDEKTDFEKGRPLSTNADRTLKRSARRNLQRFKLRRANLIAILKKHTIITNDSILAETGKNTTHETLQIRAKAAKQQITLEELARVLLAINKKRGYKSSRKTKGEENEGVAIDGMAIAKTLYENNLTPGKYVYEQLKKGKKYVPDFYRSDLEKEFAKVWQYQQQFYPSVLDDELLNALKDQGQQNSRKRFLAIKGIYTAENKGKREEKKLQHYTWRSKAIEQQLAIEEVAYVLVEINNNLHKSSGYLGAISDRSKALYFNKITVGEYLWQQIIKNSHVSLKKQVFYRQDYLDEFEQIWETQAKYYSELTPELKGEIRDVVIFYQRKLKSQKGQISFCQFESREQRYVDTKTNKEKTRIVGRKVAAKSSPLFQEFKVWQYVNNVKCILKETEEAFVLKEEDKTLLFETLNIKGNLKESEVLKVLGLKAKDWKTNYPEGLEGNTTNKALYAVYEQIAINEGYGHDWNKKTAKQIKDELHVVFCELQIDTSILNFNATKEGEDFDKQPAYELWHLLHATEDDDTVSKEDAVLYGNASVTLKKKLVEKFGFSVLHAKLLATVTLPNDYGNLSTKAIRKIIPYLKTGSVFSDACKLAKYNHSNSETKEAKELKTLAKQLTLLPKNSLRNPVVEKILNQMINLVNQIITTYGTIDEVRIELARELKKSAKERELMTKGINEATRRNDSIKALLSKDFKIPNPTKNDVIRYRLWQELAANGYKDVFTNKKIAKEALFSKEIEIEHIIPKALVFDDSFSNKTLAFSAINKQKSNRTALDFITNDFNNELPLYKARVDGLYDKGKGAFSKAKRNKLLLAQQELSDGFIERDLRNSQYIAKKAKEILGNVVKDVVSTTGSITDTLRLDWGLVNMMKELNLPKYKALGLTVEEERLNVGTGKLKKVEVIKDWTKRNDHRHHAMDALTVAFTTRKHVQYFNFLNARKNEQHRFYAEIIGIEKKIKKGQKFIAPIPNFRSEAQKHIQNVLVSFKNKNKVVTKNSNIYKTSKGLQQKVQLTPRGQLHNETIYGKAKRLMSTPTKLGKNFTIAKANLIANKHQKELILAHLKQFNNNAVEAFNTKTLKKHPITFKNEPLKEVYCYEIIYTIRKPVSPDLKIEKVIDGKVKQILEERLKAYNGDKKKAFSNLETNPIWLHKEKGIAIKRVTITGVSNAVSLHNKKNHLGKEILLNEVSIPTSYVSTSNNHHIAIYKDDKGVLQESVVSFFEAVTRANQGLPIVDRGFNEQLGWEFLFSIKQNEMFLIPDTAILLENIDLLNDKNATLLSNYLFRVQKTSSKDYWFRHHLETTVTNNIDFTYRRITSPKNLKNIIKVRLNHLGNIVTVGEY

SEQ ID NO: 6567 - protein, 1375 aa, synthetic construct
  REGION 1..1375: note = Synthetic
MKKILGLDLGTTSIGWALVNESENKDEQSSIVRLGVRVIPLTVDEKGNFEKGKAITTNADRQQVHAARINLQRYKLRRENLRDCLQKQGWIGSEPMCEDGKSSTFETYKLRAKAAVEEVSLHEFARVLFMLNKKRGYKSNRKANDKEDGKLFDGMTIAKKLYEERLTPAEYSLRLLYKGKKFTPEYYRSDLIEEFEKIWNEQQKYYPEILTDEFKQQLEGKAKSNTSKLFLGKYGIYSADTKGLDRRLQPLKWRVEAMKQQVDKDVLAFVISDLKGQIANTSGLLGAISDRSKELYFSKQTIGQYLWTSLQENPHISIKNQPFYRQDYLDEFEKIWETQATFHKELTSELKQEIRDIIIFYQRPLKSKKNLIAVCELEQRKVKVTVDGKEKEITIGPKVAPKSSPMFQEFRIWQNLNNILLLDHGTNSKRPLYEEERNLLYEELSVKEKLSKTEALKVLGKKSKQWDLNYKELEGNRTQAVLYDCYNRIIVMSGHEECNFKKLKASDIRHYVKMIFKNLAFNTDILCFDSSLKGHELERQPMYRLWHLLYSYEGDNSRTGNDALLRKLEIAFGFPKEYAAVLADVVFEDSYGNLSVKAMRNIFPHLQAGKDYSQACEEAGYKHSRRSLTKEELNQKVYKEKLELLPKNSLHNPVVEKILNQMVNVINAVIEEYGKPDEIRIELARDLKIGAAERENMTRSINQGNAENKRIREILEKEFALSYISRNDIIKYKLYEELKPNGFKTLYSDTYIPKDKLFSKDFDIEHIIPKARLFDDSLSNKTLEARDVNIAKSNKTAFDFILERYGEQGVKAYKTKLLRLLEDGAISNKKYNNLLKTEADIPSGFIDRDLRNTQYIAKKAYEILSELVKIVTPTTGSVTNRLREDWQLVDVMKELNFEKYLKLGLADVIEDRDGRKVKRIKDWTKRNDHRHHAMDALTIAFTKPSYIQYLNNLNARSDKSGSIYGIEVKELHREEGKLRFNAPLPINEFRAEAKRHLKSILVSIKAKKKVMTQNVNKIKTKHGIIKKEQLTPRGELHNATYYGTKKRPLVRMVKVGAALDEATINRVCSPAIRAALLKRLNAYNGDAKKAFTGRNSIDKNPIYLDIEQTKLVPVLVKIIEWGMYHPIRKRITPDLKIDKVIDKGIREKLKARLAEFNGDAQKAFSNLDENPIYMDEAKQITLKRVSIEGVLSVIPLHTLKDKAGKPIIGSDGRPVFGDYVQTSNNHHIAFYKDDKGNLQDNPVSFFEAAERKSQGVPVIDKRYNCDKGWHFVFTMKQNEYFVFPNEATDFIPSEVDLLDEANYDIISPNLYRVQKLSKASGRDYWFRHHLETMLNDDLRLKNSTFKRIKSLKGLEDIVKVRINSIGKIVAVGEYD

SEQ ID NO: 6568 - protein, 1374 aa, synthetic construct
  REGION 1..1374: note = Synthetic
MKQILGLDLGTTSIGWAFVNEAEDSTEKSSIIKTGVRVIPLSTDEQQDFKKGDSITINADRTLKRGARRNLQRYKQRRKAVLQILKQVKFLDQIKFLSEDGDSTHSTYALRAKAPVQKISKQDFARVLLMINKKRGYKSSRKANNAEDGQIIDGMTVAKELHNKSLTPGQYSYQLLVDGKQQLPDYYRSDLQNELDSIWKFQKEFYPEILNEEHKENLTGKNKTQTESYIKKTLGIDKAENKGKNKKLEQYEWRNKGVSEKIELRELAFVLIEINNQIHQSSGYLGAISDRSKELFFDNLTVGQYQYNFLKENPGKPLKNQVFYRQDYMDEFDAIWKEQSKHYPELTEEIRKSLRDITIFYQRKLKSQKGLINICELEGKEKEIWVDGMRKKKYIGPRVAPKSSPVFQQAKVWQNINAIRITKKDNPTEEFILEEDTKQLLFKELNIKDSWSSAQLLKWIFEGSSNAPKDWQVNFEKIEGNRTQATLLKIYLQILEIEGYNNIGHEKTEAPILLKDIQTCFKEIGITPDILTLDMYISGNEFSKQQAYELWHLLYSYEEDKSQTGVESLKEKLQTNFGFKETHTKLLTSVVFQQDYGNLSVRALRKIYPFLESGHTYDQACSLAKYNHSHSLTAEENENRSLSDSIEILKKNSLRNPVVEKILNQMINVVNAIIAHPDMGRPDEIRVELARELKKTAAQRKDMTISIARATREHEAYRNTIKKEFGLSYVSRKDLIKYKLYLELKSIGFKTLYSGTYIKPEELFTNKFDVEHIIPQSVLFDDSFSNKTLELRDVNLEKGNETAFDYCERKGWLNDFESRIQEIFSKKDITYGKRQKLLMTKADIPDDFLNRDLGNSAYIARKASEILRQITRNVHATSGSITAKLRSDWELIHVLQELTWDKYEALGLTYYEKNKKGKELPRIKDWTKRNDHRHHAMDAITVAFTKPAYIQYLNNMNAKGNKDGIIYSIEQKYTYRNGDGGRKFKKPFENIREESKKHLETILISHKAKNKVVTLNKNKIKVKGKGNFITKTELTPRGQLHKETIYGRSNFYEIKEEKINATFDTHKIQAVTNPDYKEALQKRLKDHENDPKKAFAGKNSPIKNPVYIANTTNKVPEIVKTKTIQSQFTIRKDITPDNFKDTKAIHKVVDLGIRKILLERLAHFNGNGKEAFSNLEDHPIWFNKEKGIVIKSVKITGVANAEPLHHAKDHHGKEIVDANNKPIAVDYVSTGNNHHVAIYRDEKNNLHEEVVSFYEAVARKNLGESIIKNTHEKGWNLLFTMKQNEMFVFPSEDFNPLEVDLLDPDNIHIIGSNLFRVQKISTKNYVFRHHLETQLVDSKELKDITYYSIRSLDKLNTIQKIRLNHLGEIVQVGE

SEQ ID NO: 6569 - protein, 1374 aa, synthetic construct
  REGION 1..1374: note = Synthetic
MMKKILGLDLGTTSVGWAMVNSADNTNEQSSILGCGSRVVPISVEEKDNFEKGKASTTNADRTLKRGMRRNLQRRKQRRDNLISILKDEGWIDDSTSLSENGKGSTHETLRLRAKAATEEISLEDFARVLLSINKKRGYKSSRKANSSEEGQLIDGMQIAKELHSSGITPAQYSLKSIEAGKPARFDFYRSDLEKELNLIWSIQRDYYPDILTEEFKKQISNQGKTGTSKVFLGKYHIFTADNKGKDRKAQAISWRVEALSKKLEPEVLAYVIADLRGEISNSNGYLGAISDRSKELYFKGETVGQYLYRSITEDPSYSTKNRVFYRQDYIDEFNRLWDTQASYHNGLTKSLKQRISDTIIFFQRPLKSQKGLISFCEFESHPIKVIIDGKEKTKITGSRVAPRSSLMFQEFKIWQVLNNLTILDKESGVNVPISIEEKQLIAKELSIKATLRQGEVLKIIGKNTRRYKLNYESVEGNSTLSSLFSKYLEIVDLSGHGAYDLDKIRFDDLLNLIKDVFSMLGCDSNIFTFDTSLPKEQFEQQPLFKLWHLLYSYEGDNSATGTKSLIEKISSITGLDHEYSKVISNLTFKDDYSSLSHKAIKKILPFLKQGYRYDEACLQAGYNHSNSLTKEQQENRVLVEKLELLPKGELRNPVVEKILNQMINVVNAASEAYGKPDEIHIELARELKQSAKEREKATNDNLAYSKRNEEIIKILQTQFGIPNVRKADIIRYRLYDELKENGYKTLYSNKYVSPTQLFSKEIDIEHIIPQALLFDDSFANKTIEFKDVNIEKGRKTANDFVKEKFGNQGYEEYRLRVDDLANRGIISERKRKYLLMPETDIPIGFIERDLRNSQYIAKKSMEILSQYVKDVLPTTGEVTSRLREEWQLVDVLKELNFNKYDKVGKTYVVEYSDGRKVPKIKDWTKRNDHRHHAMDAITIAFTRREHINILNNLNAKSDKDSVFYGLYQKNTVQTGSKRIFTPPMPLDELRQECKRSLDSTLVSIKAKNKVVTRNINKIKTSNGEVRRIELTPRGALHKEQVYGKRKQYETFEVAVGSKMTEDVITSVSSKRIREALLARLKEFGGDPKKAFTGKNSIDKNPIYLDDAHSSTVPDKVKCVRFKTVFSIRKNVAPDLSVEKVLDAQARKKIQDRITECGGNVREALSNLEQNPIWLDEAKTIPIKRVTIGENFDLSAIHDKRDKNGKLMLDSEGNTIPNDYVNLRNNHHVALYMDNKGQIQESVVPMFEALNRINLGLPVVDKSFNRTNGWSFLYSLKVNEMFVFPDETSGFDPNEIDLLDPANAAKISPHLFRVQKLSSKYYVFRHHLETSVSDEDKALRNITWKRITNIQIMNQVIKVRTDHLGHIVAIGEYD

SEQ ID NO: 6570 - protein, 1374 aa, synthetic construct
  REGION 1..1374: note = Synthetic
MKRILGLDLGTTSIGWAYVNEAEREDELSSIINAGVRVVPLSTDEQNDFKRGRSITINADRTLKRGARRNLQRYKLRRKVLIKILNEIGFINDSTKLAEDSKDSTHSTYDFRAKATSQKLTKEEFARVLLMINKKRGYKSSRKANNEEEGQLIDGMAIAKRLENENLTPGQLSFQLLKEGKRMLPDYYRSDLQAEFDLIWNFQKQFYPASLMPHHKEALEGLGQQASGKYFEKTIGTERAENKGAEKKLRLYEWRAKAISEKMDLKEVAYVLTEVNNKINQSSGYLGAISDRSKELYFDNLTVGQFLYNQLKENPNTSLKNQVFYRQDYMNEFDAIWTEQSKHYPELTEKIKDDIRNITIFYQRPLKSQKGLINICELEGTEREVLIDGVKKTKEIGPKVIPKSSPLFQHFKIWQNINSIQVSAKDKTLEVYHIEEDTKKDLFEKLNCVESVSDKDFLEWLFENSEEKAENFKVNFKKLEGNRTQSALLKIYEKIVDLEGHPIEFKEMNGLELVDALKSIFHTVGITYEILEFNPTLQGNGFAKQPSYELWHLLYSYTDDTSETGIKSLIEKLQNKFGFKEQHARLLVNVTFQQDYGSLSARAIKKIYPYLEDGKRYDEACALAGYNHSNSITKEDKKNWKSQELKILQKNSLRNPVVEKILNQMIHVVNGIIESPEMGRPEEIRVELARELKKTAEQRGEMTKAIERATKDHDNLREKIKKEFGIPYVSRKDLIKYKLYRELKVTGYKTLYSGTYIKPEDLFTNKFDVEHIIPQSVLFDDSFSNKTLELRDNNLEKGNETALDYCERKGWLSDFKDRVEEVFKDNDGIGYMKRKKLLMTKEEIPEGFLNRDLGNSAYIAKKAIQLLQVVSKDIVSTSGTITAKLRSDWELINVLQELNWEKYEALGLTYYQTNKNGKKLPRIQDWTKRNDHRHHAMDAIAVAFTKRAFIQYLNNDSGKSSKGFTIEKIKEKYTFRDKEGGRKFIKPFPTIREESKKHLERILISHKAKNKVVTNNKNKIKVEGGHLLKKELTPRGQLHKETIYGKSIEYKTKLEKIGGAFDEEKIATVAKKKYRELLLKRLQEFDGDAKKAFTGKNSLSKNPILLNENGAVLTDKVKTVVFEDRFTIRKEITPDLKIDKVVDVGLRKILQKRLDDFNGKPKEAFVNLDENPIWLNEEKGIKFKRITITGVSNAEPLHLSKDHLGNELKDSYGNEIPVDYISTGNNHHVSIYRDENGNLNEEVVSFYEAVIRKNLGQPIINKNHENGWEFLFTMKQNEMFLFPNDDFNPSEIDLKDLNNRKIISSNLFRVQKLSTKNYVFNHHLETEAVGADTFKNKKELSEITYKFYQSEKYLEGIIKVRLNHLGTIVQIGEY

SEQ ID NO: 6571 - protein, 1373 aa, synthetic construct
  REGION 1..1373: note = Synthetic
MKKILGLDLGTTSIGWALVNEADNKSEVSEILKLGVRVNPLSSDEIKTFEEGKALTVNLERTLARGARRNLQRFKQRRKFLIKELIDLGFITKDTSLAETGKHTTHDTLKARANAVTHKIEKQDFARVLLAINKKRGYKSSRKAKSSDEGELIDGMAIAKILHDKNITPGQFVNDLINKGGKYVPTFYKSDLRTEFDKIWNLHKIEYANVLTSEFYEKLEGQGKVVTTKLFLKEHTIYTAENKTKDKKKQHYIWRAKAVNEILSLPELAYVLVEINNNINGSSAYLGEIGDRSKELYFNNKTVGQYQYEQIEANKHTSLRNQVFYRQDYLDEFEVIWDKQAEFYSEMTEEIKKNIRDIVIFYQRRLKSQKHLVSDCTFEKYKKAAPKSSPLFQVSKVWQSINKLEFREKKTGTPYGFGEEDKEFIFEELNIKGNLKLKDIFKSINLNIKDYDTKDVKELEGNSTNQSLYKAYQKIAIIEGYGEDWDKKTASEIKEEMKAVFTQIGVNIDILEFDSSTELDKQESYKLWHLLYSAEDDTSVSKEDKVIYGDIDVSLKKVLHNKYGFKPEYAAIMSNVHLQPDYGSLSSKALNKIIPYLEQGQMYDEACSSAKYRHSKWKTKEEKENRELKGELALLEKNSLRNPVVEKILNQMVNVVNELQSEYGKVDEVRIEMARELKKSAKERKEATEGIASSQKINDSARDVLRKYPFNLANPTRNDIIKYRLYEELSFNGYKTLYTNKKVDKEMLFSKNIEIEHIIPKARLFDDSFSNKTLAFSDVNGEKADTTAIDFIENKRTSTINEYKARIEDAIKGKHISKTKYTKLLMKESEIPDGFIDRELRNTQYIAKKAKEMLEEVVRTVNTTTGIITDRLRNDWDIINVMKEISIPRYRAIDPNMIIRQERKKDKYVDIIEGWTKRNDHRHHAMDALIVAFTSYNHVNILNFLNSKKDADKNDLSFYIKEMMKRYGKNGTGSKKFIPPMGSFREEAKKHIEEILISFKAKNKVVTKNKNKTKLKGKDKYNIQKCLTPRGQLHKETIYGKMIVPVNKIEKIGTKFDADKISQVTKPLYKQLLLERLEQNGGNSKKAFGGINTLAKKPIYTNEAKTKTIPEKVNIQFYETKYTIRKDITHELKVDKVIDKGIQQILKERLKEYNNKPKEAFVDLDKNPIWLDKEKGISIKRVTIQGIAKAESLHDKKDNNGELILDNEGKTQAVDFVSTGNNHHVAIYEDEKGKYQEKVVSLFEAVARVNGGLGIIDKEYNKDKGWKFLFTMKQNEMFLFPSDGFEPKDISLDNYKTMKAQISKNLFRVQKITYSDYMFAHHLETKVITNDDMKNKKQLKGNLYHRIKSTNPLKGIVKIRINNIGEIVNIGEY

SEQ ID NO: 6572 - protein, 1373 aa, synthetic construct
  REGION 1..1373: note = Synthetic
LGTKSIGWALVNEAENNDEKSSIIRLGVRVISYDNFVSTDTRKESKEPEKDFAGGKGISPNAGRTLKRCMRRNLQRYKLRRENLIEILTEHAFISDESILSENGNHTTFETCRLRAKAATEEISLEQFARVLLMINKKRGYKSSRKAKNQDDGQIIDGMEVAQKLYNEELTPGQLCLQLLEKGQKTLPDFYRSDLQSEFDRIWTKQKDFYPEILTNELKGDLVGKNKKQTWAVFAKPFQLVGIKRETKYEDQKKENYAWRVNALSVKMGPEELAIILQEINAQISNSSGYLGKISDRSKELFFYKQTVGQYQMAVLDKNPNASLKNMVFYRQDYLDEFNKIWDVQSKFHKELDETLKQEIRDVVIFYQRKLKSQNGLIGFCEFESRKKEFEVDGKKKVKIIGSRVIPRSSPLFQEFKIWQILNNIELTNKNTGEINLLSPEQKVSLFQKLQNVERLSDKEALNVLFDKSAKNYKLNYEKIEGNKTRSAISNILGDSDLLSFDFEKEQDSQPLYKLWHLLYSYEDDNSASGNDRLIEILGQTFKLSTEIAKKLANISFQDDYGSLSAKAIRKILPFLKEGHQYDVACEYAGYKHSASSLTKEEIEHKTLKNKLEILPKNALRNPVVEKILNQMANVTNAIIETYGKPDEIRIELARELKKSAKEREQMTLAISENTKDREEIVKKLKNEFGLHNPSGKDIIRYKLYRELAANGYKTLYSDTYIAQEELFSKNFDIEHIIPQARLFDDSFANKTLEKRDVNIKKGSTTAYDFVRNEYGEDKAKEYLLKVEKLMKDKKISKTKYKHLIWSEKDIPDSFIDRDIRETQYIAKYAKSMLNDLVKYVVSTTGSITDRLREDWQLIDVMKELNWDKYQNLGLTEEYTNEEGHKIRKIKDWTKRNDHRHHAMDALTVAFSKRSIIQYLNNLSARITRKCGCGYEKYGLNTEEYTDWTCPECGKRYFTRKDTNIIYAIERNELYRNDKGKLIFKPPFALNEFRAEAKKQLENTLISIKARNKVVTQNINTSRKKSGTNKKIQQTPRGQLHNETIYGSQKIYVANEEAVNAKFDETKISTVSRPVYREALLKRLRENGNDPKKAFTGKNSLAKNPIYLDGTHTKQVPEKVKTVSLETIYTIRKEISPDMKLDKVIDEKIKLILKKRLEEFNGDAKKAFTNLDEKPIWQNEEKGIAIKCVTIKGISNAEPLHTKKDKDGNDIPDKNGNKQPIDFISTANNHHVAIYRDSDGNLKEKMVSFLEAVRRANAGLPIIDRGYKQSEGWTFLFTMKQNEYFVFPNEQTGFNPKEIDLMNPEIYHLISPNLFRVQKIATKDYCFRHHLETSVANDLKDITFKRLASLSFTENVVKVRINHIGQIIHVGEY

SEQ ID NO: 6573 - protein, 1373 aa, synthetic construct
  REGION 1..1373: note = Synthetic
MRTILGLDLGVSSIGWALVREGDNENETSSIIKLGVRVNPLTVDETSNFERGKSITTNADRTLKRSMRRNLQRYKLRRNNLIEILKRNGFISEDSILSETGNKTTFETHHLRAKAVTERVTLDQLARVLLMINKKRGYKSSRKSKSQDEGQLIDGLEVAKRLYEDNLTPGQLIYLFLKEGKKNIPDFYRSDLQIEFDKVWNFQSQFYPEILTDDLKTKSEGKSKLNTAKLFLALHGVYTAENKNKDKRLQAAKWRVDGLKKQLTVEEVAFVISEINGEISNSSGYLGDISDRSKELFFHKQTVGQFLMMQLKNNPNTSLKNKVFYRQDYLNEFEAIWENQAKYHDVLTPELKQEIRDVVIFYQRRLKSQKGLISFCEFESKEIEIIVDGKKKIKKNGFRVCPKSSPIFQEFKIWQILNDIVVKNEGGGFEKRFLTQEEKETLFKELNIKKEMKASEVIKLLFKKTSKIELNIDRIEGNRTQAALFEVYQDIIELSGHGKYVFQKMNSSEVLELVSSVFCALGYNVGLLNFDSTLEGSSIEKQPLFQLWHLLYSFEGDKSNTGNEKLIQKITDLFGFEKSFSTLFAKITFQNDYGSLSAKAIRRILPYLREGMKYSDACFKAGYQHSAKSMTVEEKEQKQYKERLENFSKNSLRNPVVEKILNQMINVINLIIDTYGKPDEIRIELARELRKNAKQRALMTQNINQTAINNEEVKNILKNKFGLSHISRNDIIRYKLYEELKHNGYHTLYSKTYISPEKLFSKEFDIEHIIPQSRLFDDSFSNKTLELSSINREKGNDTAWDYIFKKKGDEGVEDYEQRLDSLFKQSAISKAKYVKLKIKGDAIPDGFINRDLNDTQYIAKKAKEILEELVKNVVSTTGAITDRLREDWQLVDVMKELNWDKYDKLGLTEVFENRDGHIVKRITDWTKRNDHRHHAMDALTVAFTKHVYIQYLNNLNSRIDKTSDIYGIEQKYLSRDSKNKLKFKPPMQLHEFRKEARMHLENLFVSIKAKNKVATTNVNTIDKKEGVSKKKQLTPRGQLHNETIYGRIQQYVTKTEKVGASFDEIKIAKVVPECHKKALLKRLALFDNDPRKAFSGKNSISKSPLFLDENHTEMLPEKVKLVNLEYIYTIRKEIAPDLKLDKVIDHKIRKILQARLNEFGGDNKKAFSNLEENPIWLNEKKGICIKRVTIRGVSNANALHDKKDKDGRFILDKEGRKIPVDFVNTGNNHHVAIYKDKAGNLQETVVSFFEATMRATLHQPIIDKSYNASEGWEFLFTMKQNEYFVFPNPHTGFDPNEIDLKNPDNYSTISPNLFRVQKIATRDYFFRHHLETNVDDNNALKGITWLRIGLGGLTDIVKVRVNHIGQIVNIEQD

SEQ ID NO: 6574 - protein, 1373 aa, synthetic construct
  REGION 1..1373: note = Synthetic
MKKILGLDLGTTSIGWALVNEAESSEEQSSIIKLGVRVNPLSVDEQRSFEQGKSIATNTDRTLKRSMRRNLQRYKLRRENLIDCFKENGLITDETLLCENGNQTTFQTYRLRAKAVTEEISLDELARVFLMINKKRGYKSSRKVKSVEEGQKIDGMSVAMQLYDEDITPGQLVLSLFNQGKKYVPDFYRSDLQKELDRIWMCQQQFYPEILTDEFKELLKGKSKSNTIKIFLGKYKLYTADNKGKDKRLQVYQWRVDALTKQLSIEEVALVISELNGAIDSSSGYLGAISDRSKELYFNKLTVGQFLLRELERDSNWSLKNKVFYRHDYLDEFEAIWEKQATFHPELTSELKKEIRDIIIFYQRPLKSQKGLVGFCEFESRQMAICIDGKQKMKTVGCKVCPQSSPLFQEFKIWHTLNNLRVIEKSSNLSRFLEQEEKETLFMELSVKDKLNKKDALKLLYRNYKDLDLNYEDLEGDCTQSILFKAYQKIIAMTGNGEYDFSRMPSDEIKEKVKVIFDGLGYNTDILFFDSSKEGHTFDKQPMYQLWHLLYSYEGDKSNTGNDSLIRKITELCGFEKEYANIIANITFQSDYGSLSTKAIRKILPYMKEGSCYNQACEFAGYRHSQRSLTKEELDKKEYKDHLDLLPKNSLRNPVVEKILNQMINVVNHVVDTFGKPDEIRIELARELKKSAKERKVMTENINKATIDHDKYRQILQKEFGLVNVSRNDIIRYKLYLELKDNGYKTLYSNMYIPQEKLFSKEFDIEHIIPQAKLFDDSFSNKTIESRKVNIEKSNLTAYDYVLNKYDIEGVRDYEVRIENMYKNGALRKTKYNKLLMKEADIPNDFIERDLRDSQYIAKKAREILEDLVKFVVPTVGSITDRLREDWQLVDVMQELNWDKYDKLALTEIVEDKDGRKIRRIKDWTKRNDHRHHAMDALTIAFTKRCIIQYLNNLNARSDKSSSIYGIERKELYRDKHEKLRFIPPMPLDVFRTEAKRHLESVLISIKAKNRVVTPNINRTKAQNGYNKKEQLTPRGQLHNETIYGSIKQYVTKIETVGGGFGAMQIAKVANKKYRDALLARLVAFDNDPKKAFTGKNSLEKNPIYLDELHTQRVPIKIKTVTLDTIYTIRKSISPDLKIDKVVDVKIRRLLEKRLVDYGGDARKAFSNLEDNPIWLNEEKGISIKRVTITGVNNAEPLHCKKDHNGELILDSEGKKQPVDYVNTGNNHHVAIYRDEKGELQENVVSFYEATARAILGEAIVNKAYNDSEGWSFLFSMKQNEYFVFPNENTGFDPNEIDLLDPDNYALISPNLYRVQKITSKDYVFRHHLETTVENKKELQNITWKRVTSLTNFDKIVKVRINHIGQIVFVGEY

SEQ ID NO: 6575 - protein, 1373 aa, synthetic construct
  REGION 1..1373: note = Synthetic
MKKVLGLDLGTTSIGWAMVNQAENNEEKSSIIRAGVRVNPLTTDEKDAFEKGKAVTTNTDRRLKRSMRRNLQRYKLRRNELVSILKELGWIDDSTILAEHGNRSTFETYELRSKACTESVSLTELARVLLMINKKRGYKSNRKANAEEDGQPVDGMSVAKLLYEKGKTPGQYCYSLVKKGNKVLPEFYASDLKSEFRRVWETQRLYYPEYLTEEFWNQIDGKTRSSLTKLFFAKYKITTADNKGKDKRVKAYEWRAAAVESRLPIDQVAYVLCDIAGNLGSSSGYLGKISDRSKELYFNKQTVGQYLYSNIQKDPHFSTKNKVFYRQDYLDEFEAIWESQASFHPELTDELKKEIRDVVIFYQRRLKSQKGLISYCEFESRKVDVEINGRIVQKIRGCKVAPVSSPLFQEFRMWQKINNIIVTNKETGEQGTLEQDDKVRLAECLRVKDKLSDKEILKLLFKKPKDLEMNFKSIEGNETLGKLYSKFLEVVSLAGNSDYEYSKLRQEELMNILRTEFARNGFNTAVLEYDPSLPKEEYERQPLFRLWHLLYSYEGDKSQTGNASLINKIAEICGMPENLAKIIASVSFKQDYASLSHKAMRKILPYMMDGNEYSLACEYAGYRHSKQSLTKEEIENKVLKDRLDQIPKNSLRNPVVEKILNQMVNVINTVGDRYGKPDEIHIELARELKSSQEERARATESIASNNKENDRIRMILENEFHLAYVSRNDIVKYKLYEELKNNGYKTLYSNQYIPADKLFSREIDIEHIIPQAVLFNDSLSNKTLEFRDINLEKGKDTAFDYVKNKYGESGLEDYKLRVNHLFESGGISRTKRDNLLRDSKNIPEGFVERDLKDTQYIAKKAREILLEYVRVVVSTSGSITDKLREDWGLVNLMKELNMPKFEAAGFVETITTSDGKDIRKIKDWTKRNDHRHHAMDAITIAFTKLAHIQYLNNLNAKGDKSSSIYAILQKETYLSGSKRLIIPPLPLDQMRREVRRQLESILVSIKAKNKVMTENINRIRIKDGVKNVKCLTPRGLLHKEQVYGQRKRYETYDVAVNGKMTEDVIATVASSETKAALALRLAQFKGDPKKAFTGANSLDKNPVWLDANHSRKVPAKVKCVRFVNVYSIRKNIDPSLSVEKVMDGRVRRILKDRLAEFGNDPKKAFVNLDENPIWFNKEKGIILKSVTIAENFDLGPIRIKRDNLGRVICDAEGNHIPSDYVNFRNNHHAAIFEDADGNIQEHIVSFYEAVRRRSAGLPVVDKEYNADKGWKFLFTMKSNEMFVFPNERTGFDPRAVDLMDPENYSAIGPNLFRVQKMASKDYWFRHHLETTLGDDLKLKDITWKRITALNNLKGIVKVRINHIGEIVSVGEYD

SEQ ID NO: 6576 - protein, 1372 aa, synthetic construct
  REGION 1..1372: note = Synthetic
MKRILGLDLGANSIGWAVVNEAENSDETSSIIRLGVRVNPLTVDEKDNYEKGKAVTTNADRRTSRSARRNLQRYKLRRECLREVLIEGGVITPETVCAEQGKGSTHETYRLRAKAVTEPVTLEEFARILFAINKKRGYKSNRKANKEDGVAIDSMSVAKELYDREITPGHYCYELLQKGKKKLPDFYRSDLQVELDKIWSYQRCFYPDIFTDQLQEQLVGKSQQQSVAIMTKCGINLAENKGKEKKLQYYKWRSEAISNKLDIGEVALVICMLNGEINASSGYLGNIGDRSKKLYFNQQTIGQYLYNLLCRSRHNSLKNLVFYRQDYLDEFEAVWQEQSKYHPELTYALKKKVRDTIIFYQRPLKSAKGLVSICELEGHIQEIDKEGKKVQRTVGPKVSPKSSPIFQEFKIRQRLNDTRLTEIVRHPITHRIERIVRELSIEEKNILCTELSIVGGLEKEDVLKLLFGTAENYDLNFKEYDGNKTFSALFAKYRQIAELAGCNMSKCKTAQEKIEAVEKVFDTCNYETQLLHFDSSLPSHDCYLQPAYMLWHLLYSYEGDNSKSGIEGLIRKIMELTRMEREYAAMIAGVSFESDYGSLSNKAMLKILPFMKDGNDYSVACCYAGYRHSRNSLTKEENENRPLKAHLDILPRNALHNPVVEKILNQMVHVVNAVIDRYGPLDEIRVEMAREIKSSAQEREDKYKAMNDAAHKHEAIRKVLREEFHIEHPSRNDIIRYKLYEELEANGYKTLYTDTYIPRESIFSKEYDIEHIIPKARLFDDSFSNKTLEVRKANIEKGNMTAYDYVASLGADALAAYEERVDYLYKKKKISQGKWKKLKMKQADIPDDFIDRDLRNTQYIARYAIGMLRDVVRVVVPTVGAVTSRLREDWQLVDVMKELNRDKYEQLGLVEYYRDRDGRLLWQIKDWSKRNDHRHHAMDALTVAFTKMSYVQYLNNLNARSDKSSSIYAIEKAELSRSGNGGQLRFNPPIPDFRREALRHLQTVLVSIKAKNKVVTLNLNKTKCRGSNKGRIQLTPRGSLHKETVYGMRRQVSVITKTIGAAFTADVIQRVTNRRYREALLQRLAQFDGDAKKAFTGKNRLDKNPVYCDEAHRQAVPMVVKIFTYEVIYTVRKSVADKLNIEKVVDSGIRKKLQEHIDKYGEASFSDLETHPIYLDEEKGITIKKVTVKGLNNAVPLHDKCDYAGRYITDAAGRRIPTDYVSTGNNHHVAIFRDADGKLQEHIVSFMEAVARCVQGLPVVDKAYNREVGWTFLFTMKQNEYFLFPDEKSGFNPQEIDLSDPENYARISPHLFRVQKLASKNYMFRHHLETTVNEEKQLKNITWRLIQNTAALEGIVKVRINHIGEIVHVGEE

SEQ ID NO: 6577 - protein, 1372 aa, synthetic construct
  REGION 1..1372: note = Synthetic
MKKILGLDLGTASIGWAVIERAEKTDESTRIVACGSRVVPLSSDEKDNFEKGKSITTNADRRLKRSMRRNLQRRNSRRDALIALLRSEGWIHADDVLSEEGKGTTHETLRLRAKAAQEKISLLQLARVLLSINGKRGYKSSRKVDTGEEGQLIDGMSIAKELQLLQITPSEYRQRHILDGKPKRFDFYRSDLENEYEKIWTFQQHFYPDILTEELHKQLQRQGKQGTSSIFLAKHGIYTADNKGKDKDKTAVTWRVAALTEKLEPDVLAYVISDIRKDIQNSSGYLGQISDRSKELFFNNETVGQYLFRHLQEDPLYSTRNKVFYRQDYIDEFNRIWTVQAGYYPELNDSLRRKIADQILFYQRPLKSQKGLVSFCEFESHPIEVLVDGKKQVKTTGSRCAPKASLLFQEFKIWQILNNLRIKDRVNDGERILSLDEKNLLSQELSIKRSMRQTEVLKHLGLAPRRYELNYSEIEGNTTLSALFSAYLSIVDLSGHGEHDINKLNYNQVLSVVQTVLPILGCTNDIFHFQPDLPKQEYEQQPLFKLWHLLYSYEGDNSHTGKESLFRRISDLTGLDREYAKVLGAITFKDDYASLSHKAISKILPYLKEGDTYDKACTRAGYNHSHFETAEERGQKQLLDHLEQLPKGCLRNPVVEKILNQMVNVVNASTQAYGKPDEIHIELARELKQSAREREKATSDIEGNKKRNLEIVKILQEDFHITNVRKTDILRYRLYEELKENGFKTLYSDKYVPRDKLFSKEIDIEHIIPQARLFDDSFSNKTIEYKDINIEKGRRTAADFVKEKYGEEGYTRFRLRVDDLRNRGALSDKKRKNLLMTESDIPSGFVDRDIRNSQYISKKAQELLKDYVRIVLPTSGSVTARLREEWQLVDVMKELNFAKYEKAGKTAITEDIDGRIIRKIQDWTKRNDHRHHAMDAITIALTKPEHIQILNNLNARSDKDSVFFQMLQKETVVIGNKRIFTPPMPLDILRGEVKRSLNDTLISIKAKNKVVTNNINKTKTKNGYQRTTELTPRGPLHKEQVYGQRFRYETFEVTVNAKMTKEVIANVASKRLREALFIRLNEFDGDPKKAFTGRNALDKNPIYLDSLHTEKVPQKVKCTRLAPYYCIRKDIGPDLSIDKIIDTKVRSRIEERISEYGGNAKAALSNLDTNPIWLNDAKTIPIKRVTIGENFDLCAIHNKRDKNGQIILDADGNTIPSDFVNLRNNHHVALYLDAEGKVQESIVPFFEALNRVNQGLPVVDRMFHSDLGWEFLYSMKVNEMFVFPDEANGFYPQEIDLLNPANASLISPHLYRVQKLSSKDYYFRLHQETSIEDDKALRDITWKRVQSIQAMKDVVKVRIDHLGRIVTIGEYD

SEQ ID NO: 6578 - protein, 1372 aa, synthetic construct
  REGION 1..1372: note = Synthetic
MKKILGLDLGTNSIGWALINEAENKEEISSIVKLGVRVNPLTVDEQKKFEQGKSITTNADRSLKKSMRRNLQRYKLRRQNLIEVLCNNGFITNNTILSEKGNYTTFQTYRLRSKAITEKITLEEFSRVLLMINKKRGYKSSRKVQSNDEGELIDSMSIALQLYENDQTPGQFSLSLLRQGKKRLPAFYRSDLQLELNKIWNFQKQFYPDILTNEFREQIKDKSKLNTSKIFLGKYKIYTADNKEKNKQLQAYLWRSEALSKQLSLEEIAFVVSDVNGAIYNSSGYLGNICNRSKELYFNKQTVGQYLMAELDKNHNYSLKNKIFYRQDYLDEFEKLWETQALYHPELTSKLKKEIRDIIIFYQRPLKSKKGLIDFCEFESKNIEITCDGKKNLKTVGLRVCPKSSPLFQEFKIWQILNNIIVTEGRNHKRFLEQEEKERLFAELNWKEKLSKAEILQLLYVKPIGIDLNFKEIEGNRTQAALLNIYLSIIEASGHDRSNLSQMSMPEVVDVIKSIFNGLGYNTGILSFDSSLEGKKFEEQPMYRLWHLLYSFEGDDSKTGNEKLVNKLIELYGFEKEYAILLANITFQPDYGSLSTKAIRKILSFMKAGHEYSLACEYAKYQYSKRALTKEELNKKVYKDRLSLLPRNSLRNPVVEKILNQMINVVNSIVETYGKPDEIRIELARELKKNAKEREKMTNSIRKATSEKEEYKTILQKEFGLTNVSRNDIIRYKLYLELKENGYKTLYSNTYIPREELFSKKFDIEHIIPQAKLFDDSFSNKTLESRNVNIAKSNTTAYDFVKNKYSEQELSDYEERIHRLFKNNSISKAKHDKLLMEEANIPSGFIERDLRDSQYIAKKAREILEDLVKFVVPTIGSITDRLREDWQLVNIMQELNWEKYNKLGLTEIYEDKDGRKIRRIKDWTKRNDHRHHAMDALTIAFTKQSIIQYLNNMNAKSDKSGSIYGIEQKELYRDEHNKSRFIPPMPLNTFRAEAKRQLESILVSIKAKNKVVTQNTNKTKKKNGLNTKVQLTPRGQLHNETIYGSIKQYVINMEKVGSNFNSEKILQVANKEYREALLHRLTIFDNNPQKAFTRKNSLDKNPIYLNKLQTKQVPSIVKTVSLETIYTIRKEVSPDLKIEKVIDAQIRRILEARLYEYKGNTKQAFSNLEENPIWLNKEKNIAIKRVTISGVSNAVALHDKRDHNGHPILDGKGKKQPVDFVSTNNNHHVAIYRDANNHLQENVISFFEATTRASLGLPIVDKEYKKSEGWIFLFSMKQNEYFVFSNKEAGFDPSEIDLMDPDNYTRISPNLFRVQKITTKDYVFRHHLETTVNDVKELQNITWVRFQSLTDIDKLIKVRINHIGQIISVGEY

SEQ ID NO: 6579 - protein, 1371 aa, synthetic construct
  REGION 1..1371: note = Synthetic
VNEAEHKNEESSIVKLGVRVNPLTVDEKTDFEKGRPLSTNANRTLKRGARRNLQRYKMRREELIKILKENRFISEETPLTEIGKNTTHQTMSLRAKAASEKIALEDFAKVLLAINKKRGYKSSRKATNEEEGQAIDGMGVAKVLYDENLTPGQYVLRILQRDGKYIPDFYKSDLLEEFKRIWNAQKQFYPEVLTSILYNELEGKNKSQTWAICQNPFGIVGIKRVGTAKVKRFENYQWRVHGLSKQLELEHLATVLQEINNNINQSSGYLGAISDRSKQLYLNKETVGQYLYKQLVRNPHTSLKNQVFYRQDYLDEFETIWNTQANYHHELTEDLKRTIRDVIIFYQRKLKSQKSLISFCQFESWEQEYVEKETGKHKKRTVGRRVLPKSSPLFQEFKIWQNLNHLVFTNAEAKTRIEVKELDSEIRHTLFEELNLRGDLNPNVLLKVVSRFMVIGKSSLWKCNFEKIEGNRTNQAIYNVYQAISEREGYGIDWSKASASVIKEELKSTFPTIGIDRNIFDFNADADHFDKQPCYQLWHLLYATEEDEKISEADRLVYGNSSVALKKKLQEKFGFKPEYASLLANISFTQDYGNLSAKAIRKILPYLEDGHLYSEACHLAGYNHSNSLDREALDNRELKPKLEILKKNSLRNPVVEKILNQMVNVVNQIIDYYGKPDIIRIELARELKKSAKERAAMTKGIADATRRNEEIRKIIRQKFRIPNPTKNDVIRYRLYQELAPRKHNDLFTNKYISPDILFSKDIDIEHIIPKSLLFDDSFSNKTLAFKKDNLKKGNRTAYDFICQDYNSDLEAFVERIEGMHNDGHINKAKRNKFLMPLSKIPDGFIERDLRNSQYIARKAKEMLFEVFEDVIVTSGSITDKLREDWGLINVMKELNLPKYRALGLTAFEVRLDKSTGKFKKHEVIKDWSKRNDHRHHAMDALAVAYTTRNHIQYINNLSARKDTSRDNHPIIKNIEARITERSEKGKRIYKSPMPHFRENAKEQIEQILVSFKNKNKVVTKNINKTKRKNGALHTRVQLTPRGQLHKETIYGKAKQPMDKLTKINNRLSVSQVFLIINIKERKAVLNHLKKYRNNPDKAFDTKTLKNDPILVNGELLKEIRTFEEIFTIRKDINPNNFKTHKHLDKVVDKGVRETLKKRLVEYGDFKTAFSDLEKNPIWLNRSKGISIKRATITGVSNAEPLHYASNHLGNTILDEHEKQIPVDYVSTGNNHHVAIYEDENGNMREEVVSFYEAVIRKNQGHPIVQKEHSNGWRFLFTMKQNEMFVFPSEDFDPCQVDLLDENLYSIISKNLFRVQKFTTKDYFFRHHLETTVENNNNLQEYSWKRIGISGLNGIKKIRLNHIGKIVQIGEF

SEQ ID NO: 6580 - protein, 1371 aa, synthetic construct
  REGION 1..1371: note = Synthetic
MKRILGLDLGTTSIGWAFVNEAEKDNEESSIIKTGVRVVPLSTDEENDFKKGNSITINADRTLKRGARRNKFRYQLRRKALINQLKNIGFIDKNSKLTETGNNSTHELLRLRNQAVTEKVEKDEFARILLSINKKRGYKSSRKANSSEEGELIDAMGITKKLYEKNLTPGEFSYQLLKKGKKAIPDYYRSDLENEFDKVWKRQKTFYPDILNKILRKELVGKNKNQTWKICEKPFDIVGIKLEGNRDEKKIEKFRLRKIALTEQIDLEHLAIVLQEINNEINKSSGYLSEISDRSKELHFNNLTVGQYLYNQIAQNPHKSLKNQVFYRQDYLIEFQKIWDKQAEFYPALTEKLKDKIQNEIIFYQRRLKSQKGLISYCEFESWEQNVTVDGQVKHKTVGHRVIPKSSPLFQEFKVWQNLNSIRIIHIKTNEVFHIEEDSNTELFQKLNWTDKLTNKQVLKEFNLKPEDWKINFQQIEGNRTNYNLLAAYKEILKIEGYDNINFSNIEPDELQEILEKCFGEIGIDKQILEFNATLDGNEFSKQKSYELWHLLYSYEDDFSRTGTEALENKLKNNFGFKDEHLPYLINIRFQDDYGNLSARAIRKIMPYLQDGKIYSDACELAGYNHSNSVTKKQNERRVLKPKLEILKKNSLRNPVVEKILNQCINVINTIIEDEKMGRPDEIRIELARELKNTKEQRDRMTKAIGRATREHEKYREEIKSKFGLPHVSRNDLIRYKLYKELESNGYRTLYTDEYIKPEDLFSKKYDIEHIIPKSRLFDDSFSNKTLETRESNLDKGDETALDFVERKFGKEGLDNYRNRVEELYKAGKIKGSKHQKLLMSLKDIPADFLNRDLGNSAYIAKKAAEILLDVTKRVSLTSGKITSKLRDDWGLIQIMQELNWDKYDKVGLTYYKENKEGKKLPRIKDWSKRNDHRHHAMDAITVAFTKPGMIQYLNNLNAKTNKEIYKLENTYTYKDDRGKRKFKAPFPKIRKASKKQLSQILISHKAKNKVTTKNKNKINVKGKNTFVYQTVETPRGQLHKETVYGKSKYYETKFEKVGGKFDEERIELVANRSHKNALLKRLEEFENNPKKAFTGKNSLAKNPVYLNGTQETLPEKVKLAWLEDRFTIRKEITPDLKIDKILDQGVKKIIEERLKEFNNKPKEAFADLDKNPIWLNEEKGIKIKRVKITGVSNAEALHHSKNHLGKQVLDDKNSPIPNDYVSTGNNHHVAIYEDEKGNLQEEVVSFYEAVARKKEGLPIINKKHEKGWMFLFTMKQNEMFVFPNEEKGFNPSEIDLLNPNNKVLISENLFRVQKIATKNYFFRHHLETQLIDHKKTRTITWENIRSCNGLKNLVKIRLNHLGEIVQVGEY

SEQ ID NO: 6581 - protein, 1370 aa, synthetic construct
  REGION 1..1370: note = Synthetic
MKRILGLDLGTNSIGWALVNEAENTDEKSSIVKLGVRVNPLTVDEQKNFEIGKSIPTNAARTLKRNARRNLQRYKLRRDYLIKCLREYGWIDSDTMLYEWGNHTTFETYRLRAKAVTEEISLEELGRVLLMINKKRGYKSCRKVKSSDEGQLIDSMEIAMDLYHNDMTPGEYVYSLLSKGKKYVPAFYRSDLLNEFDRIWNCQSVYYPDILTPQFKELVRGKNAQGTSKLFKQQYNLFTADNKEKDKRLQAYRRRIDALKKRLDIEDVAAALCDVNKDVNASSGYLGAISDRSKKLFFNKQTVGQFLMSELDKDSHFSVKNEVFYRQDYLNEFEAIWERQALYHPELTKDRKKMLRDVIIFYQRPLKSQKELVACCELEKHCIEVIKDGKTRSIEIGAKVCPKSSPLFQEFKIWHVLNNLKVKDKTTGDERFLELDEKETLFSELTIKSKLSKTEALKLLYQKPKGLDLNYDSIEGNVTQATLFTAFQTIIAMTGHGEYVFSKMPSSEVMSIVEGLFEGLGFNTSVLHFDSGLEGKALEKQDAYRLWHLLYSYEGDNSVTGTDGLVSKIANLLHCEKEYAKVLSGITFQPDYGNLSAKAIRRILPHMRAGNEYSLSCEYAGYKHSRRSLTKEELEQKIFKNHLELLPRNSLRNPVVEKILNQMINVVNAVINEYGKPDEIRIEMARELKKSAKEREEMTAAINKATSEHERIKEILNKEFGIQHVSRNDIVRYKLYCELKNNGYKTLYSDTYIPREKLFSKEVDIEHILPQARLFDDSFSNKTLEYRSINIEKSNQTAWDYVVTKRGENGAAQYKKRVDELLIVGAISKSKHDKLLMKQEDIPKDFINRDLRDTQYIARKAREILEDIVPIVVSTTGAVTDRLREDWQLVDVMQELNWNKYAQQGLTEEWNDKDGRKIRRIKEWTKRNDHRHHAMDALTIAFTKHSFIQYLNNLNARSDKSGSIYAIEQKELYRDSHGKLRFVMPFEGFRNEAKRQLENILVSIKAKNKVVTRNVNKARRGSGHQAKVQLTPRGQLHNETIYGSIHRYVTKLEKVGGNFNSEQIAKVANLRYREALQARLEAFGGDAKKAFTGKNALDKNPLYLKNTRTEVPLKVKTVVTETLYTIRKAVAPDLNVDKVIDAKVRKVLEKRLQEYGGDPKKAFVNLDENPIYLNKVKGITIKRVAITGVSNAIALHDKKNVGGHIMLDASGRKQPVDFVNTGNNHHVAIYRDTEGNLQEVVVSFYEAVARTSLGLPVIDREYRKEDGWQFLFTMKQNEYFVFPNPVTGFNPEEIDLTDESNYALISPNLFRVQKFTIKDYFFRHHLETTVEDAASLRDITWKRIRATNYLNNIIKVRVNHIGRIVSVGEY

SEQ ID NO: 6582 - protein, 1370 aa, synthetic construct
  REGION 1..1370: note = Synthetic
MKKILGLDLGTTSIGWAYVNEAENENEESSIIKSGVRVVPLSTDEENDFKKGNSITINADRTLKRGARRNKFRYQLRRKALINELKSIGFIDDKTKLTETGNGSTHELLKLRNKAVSDKVEKEEFARILLSINKKRGYKSSRKANNNEEGELIDSMGITKKLYENNLTPGEFSYQLLKSGKKSLPDYYRSDLENEFSRIWKKQKEFYSEILDENLFTELADKNKNQTWKICEQPFKIQGIKLEGNRDEKKLEKFRLRKIALTEKIDLEYLAIVLQEINNEINQSSGYLSEISDRSKELHFKDLTVGQYLYDQISKNPHTSLKNQVFYRQDYLNEFQKIWNKQVEFYPELTNKVKDKIQNEIIFYQRRLKSQKGLISYCEFESWEQEVSIDREKKRKTVGHRVIPKSSPLFQEFKVWQNLNSIRVTNIKTNEVFHIEEDSNVELFQKLNWTAQLTDKQVLKEFGLKPEDWKINFQKIEGNKTNHNLLETYKEILKIEGYDNINFSKIEPDVLQQTLEQCFNEIGIDKNILEFDATLSGNKFAKQKSYELWHLLYSYEDDFSRTGTKSLENKLKSNFGFKDEHLPYLINIRFQDDYGNLSARAIRKIMPHLQEGKIYSDACELAGYNHSNSVTKKQNEDRKLKPKLDILKKNSLRNPVVEKILNQCINVVNAIIEDPKMGRPDEIRIELARELKNTKEQRDQITKAIGKATRDHEKYRDEIKSKFGLPHVSRNDLIRYKLYKELESNGHRTLYTNTYIKPEDLFSKKYDIEHIIPKSRLFDDSYSNKTLETKESNLDKGDETALDFIERKFGKEDLEKYINRVEELYKAGKIKGSKHRKLLMSIKDIPEDFLNRDLGTSAYIAKKAAEILLDVTKRVSLTSGKITSKLRDDWGLIKVMQELNWDKYEKVGLTYYKENKEGKRLPRIKNWTKRNDHRHHAMDAITVAFTKPGMIQYLNNLNAKTNKEIFKLENKYTYKDEKGKRKFIAPFPHIRKTSKENLSQILISHKAKNKVTTKNKNKINLKGKNSFKYQTVETPRGQLHKETVYGKSKYYETKTEKIGGKFNKEHINFVAKKSHRNALLKRLEEFENTPKKAFTGKNALAKNPIFLNGTQETVPEKVKLAWLEDRFTIRKEITPDIKIDKVVDEGVKKILRKRLKNFNNKPKEAFADLDKNPIWLNKEKGIKVKRVKITGISNAEPLQHAKNHFGEEVLGKNNNNIPTDYVSTGNNHHVAIYKDEKGNLQEEVVSFYEAVARKNADLPIINKEHEKGWEFLFTMKQNEMFVFPNEEKAFNPSEIDLLNPNNKALISENLFRVQKFTHKDYFFRHHLETNVDNTKETHKLSWVRTGLSGIKNIQKLRLNHLGDIVEVGEY

SEQ ID NO: 6583 - protein, 1370 aa, synthetic construct
  REGION 1..1370: note = Synthetic
MKRILGLDLGTTSIGWAYVNEAENEKEESLIIKTGVRVVPLSTDEENDFKKGNSITINADRTLKRGARRNKFRYQLRRKALIDELKGIGFIDDKTKLTETGNNSTHDLLHLRNKAVTEKVEKEELARILLSINKKRGYKSSRKANNSEEGELIDSMGVTKKLYEDNLTPGEFSYQLLKEGKKVLPNYYRSDLENEFDKVWVKQKEFYSDILDDNLKKELSGKNKNQTWKICEKPFDIKGIKLEGNRDEKKLETFRLRKIALTEQVELEHLAIVFQEINNEINQSSGYLSEISDRSKELHFNDLTVGQYLYNQISKNPHTSLKNQVFYRQDYLNEFQSIWNKQAKFYPELTEDLKDKIQNEIIFFQRRLKSQKGLISYCEFESWEQDVSIDGENKRKIVGHRVVPKSSLLFQEFKVWQNLNSIRITNIKTNEVYHIEEDSNTELFQKLNWTDKLTDKQTLKEFGLKPEEWKINFQKIEGNRTNHNLLEAYKEILKIEGYDNINFTKIGADELQKILEQCFDEIGIDKEILKFNATLSGNEFSKQKSYELWHLLYSYEDDFSRTGTTSLEEKLKLNFGFKNEHLPYLINIRFQDDYGNLSARAIRKIMPHLQDGKIYSDACELAGYNHSNSVTKKQNEKRDLKPKLEILKKNSLRNPVVEKILNQCINVVNAIIEDEKMGRPDEIRIELARELKNTKEQRDRMTKAIGRATRDHEQYREEIKTKFGLPHVSRNDLIRYKLYKELESNGYKTLYTDEYIKPEDLFSKKYDIEHIIPKSRLFDDSFSNKTLETRESNLDKGDETALDFVERKYGKEGLDKYRNRVEELYKAGKIKGSKHRKLLMSLKDIPEDFLNRDLGNSAYIAKKAAEILLEVTRRVSLTSGTITSKLREDWGLIQVMQELNWDKYEKVGLTYFKENKEGKKLPRIKDWTKRNDHRHHAMDAITVAFTKPGMIQYLNNLNAKSNKDIYKLENAYTFKDERGKRKFKAPFSNIRKASKEHLSKILISHKTKNKVTTKNKNKINIKGKNSYKYQTVETPRGQLHKETIYGKSNYYETKIEKVGGKFDKDYINLVANQSFRTALLKRLEEFQNNPKKAFTGKNSLAKNPVYLNGTQETVPEKVKLAWLENRFTIRKEITPDLKIDKVIDHGVKKILKKRIDDFNGKKKEAFSDLEKNPIWLNKDKGIKIKRVKITGVSNAKPLHHSKNHLGEEILDKNDNSIPTDYVSTGNNHHVAIYRDEKGNLHEEVVSFYEAVARKNTGIPIINKDHEKGWEFLFTMKQNEMFVFPNQEKGFDPSEIDLLNPDNKALISENLFRVQKFTNKDYFFRHHIETNVDNTKETHKLSWIRTGLSGVLYITKIRINHLGDIVQIGEY

SEQ ID NO: 6584 - protein, 1369 aa, synthetic construct
  REGION 1..1369: note = Synthetic
MKKVLGLDLGTSSIGWAVVNQAESDKEKSSIVKLGVRVNPLTVDEKGNFEKGKSITTTADRTLKRGMRRNLQRFKLRRDKLIEVLKENGIISNDSVLTEDGASSTFETLLLRAKAAKEEINLEEFARVLLSINKKRGYKSNRKANNEEEGELIDGMTVARELYNKGITPGEYVYELLKAQKRYKPSFYRSDLQAELDTVWNKQAKYYPTLLDEETRHKIEGKGKTDTRKLFYAAHNISAAEEKDRKLRQITYYQWRANAAKTKIEPEQLVTVLSEINGDIATSSGYLGAIGDHSKELEINKMTVGEYLFDLIKKNPHNSLKNIVFYRNDYIHEFNTIWETQSRFHKELTPELKEKIANETIFFQRRLKSQKGLISFCELEGKEITLANGKKVMTGPRVCPKSSPLFQEFKIWQDLNNLLLENKTIKNGDKTVLTIEQKQCLYNELYCTKELTAKEALKVLSLSDKEYSLNFKKLQGNITQVTLLNAYKNIVEMTGHDVDKFDKMDAENKLHLVKAVFEMLGAKNNFLTFDCGSTADEMQKNAMFKLWHLLYSYEDDNTPTGNGKLIDHIAELTGLPHEYASILARVTFVQDFGSLSSKAIMKILPHMKNEGMIYSDACEAAGYKHSKQSLTKEEKESRKLEKHLELLPKNALRNPVVEKIINQMVHVVNGCIDEFGDFDEIHIEMARELKQNQKQREDATKRLNAKTKEIENIKKILNVAPFNITNPSRNDVLRYQLYEELAPNGYKTLYSNTYISKEKLFSRDFDIEHIIPQAKVFDDSYSNKTLEARDVNIEKSNMTAIDYVKMKSGEDGVENYKKRIAFLNKEGSRKKYKNLTTEEDKIESDFLNRDLSDSQYIARKAKELLLQVARDVITTTGSITARLREDWQLVDVMKELNWSKYDKLGLTTVERNRDGHEVRRITDWTKRNDHRHHAMDALTIAFTRHSHIQYLNNLSAKDDGEKKDSNIYGIEKKELLQNRRFVPPIPLDELRAEALKHLGEILVSIKAKNKVVTKNVNKIKGSRSQNTLTPRGQLHNETVYGRRQRYATREEKVGAGFTLEKINTVCRKAYRDALMKRLEDNGGDAKKAFTGKKALSKAPLYIDNNHRAKVPEKVKIVVLETFYTIRKPINKDLKIEKVVDEGIKRILQQRLNEYGDAAKAFSNLDENPIWLNKEKGNAIKSVTIKGVNVATPLRTKKDKYGNIIVDSNGNKEFTDYVSTSNNHHIAIFEDADGNLQEHVVSLFEATARKSQGMPVVDREYHKELGWKFLFTMKQNEYFVFPDEESGFDPNDIDLTNPKNYNLISPHLFRVQKLSTCYYVFRHHLETNVIEDKKLRDTTWIRIQTTNYLKGVVKVRVNHIGQIVKVGEYL

SEQ ID NO: 6585 - protein, 1368 aa, synthetic construct
  REGION 1..1368: note = Synthetic
MKRILGLDLGTTSIGWALINEAENDQEKSSIIKTGVRVVPLSTDEQQSFEKGQSITINADRTLKRGMRRNLHRYKMRRAAVIEILKRINFITEDTPLAETENNSTFSTYEARAKAPKEKISKEDFARVLLMINKKRGYKSSRKANNEEEGQLIDGMAVAKTLYHQNLTPGQYSFLLLKEGKKILPDYYRSDLQDEFDKIWKFQKQFYNEILTDKHKEEIKGKNKNATSNYFEKVLGIARAENNGSDKKLQHYEWRTKAVSEQIDITEIAFILTEINNQINQSSGYLGAISDRSKELFFNDLTVGQYLYHQLKENPHASLKNLVFYRQDYMDEFDAIWKEQAKHNPELTEKVRQELRDITIFFQRRLKSQKGLINICEFEGVERIVKIDGEMKKKLVGPRVAPKSSPVFQRFKIWQNINAIRVTRKNNDLQVYELDEDTKHLLFEELTWVDKMTDKQFLKWLFKDSENNPKDWKLNFKHLEGNRTNAALLEVYKKIVKIEGYELNFKKPSSEIIQNIKACFKTIGIDEHLLDFNSELSGNDFVKQTSYELWHLLYSYEDDKSLTGTDSLLKKLQEKFGFQEAQARLLASITFQKDYGSLSVRAMRKILPHLRDGALYDEACSKAGYNHSNSITKAENADRELKSELEILKKNSLRNPVVEKILNQMINVVNAILNDSNLGRPDEIRIELARELKKTAQQRSEMTKQISKVTKEYEAIRTLLKKEFGLPYVSRKDLIKYRLYKELKATGYKTLYSGTYVKPEELFTNKFDVEHIIPQALLFDDSFSNKTLELRDVNLEKGNETAYDYCERKGWLEGFKQRVEEVYAAGDIKYMNRKKLLMTRKEIPEGFLNRDLGNAAYIARKSAQILLEITRNVALTSGTITSKLREDWELIDVLKELNFEKYKALGLTYTIQNRHGKELTRIAEWTKRNDHRHHAMDAITVAFTRPAFIQYLNNMNSESIKNGSFYGIKEKYTYRSKEGGRRFVKPFETIREEAKRHLESILISHKAKNKVVTKNKNKIRVKGKGHFRTKTELTPRGQLHKETIYGSAKKYDTKFEKIGGSFDLDKISTVAKKKYREALQQRLAEFENDPKKAFTGKNSLAKNPISLNGNGAVLPEKVKTVRLENQYTIRKELTPDIKIDKVMDIGVQRILQKRLDDFEGKAKEAFSNLDENPVWLNEGKKIPLKRVTISGINNAEALHNAKDHLGNEIKDDRGNTIPVDYVSTGNNHHVAIYQDEKGNLQEEVVSFYEAVIRKNQSLPIIQKEHPKGWKFLFTMKQNEMFVFPSEDFNPDEIDLMDPNNKTEISRHLFRVQKFTIRDYFFRHHLETNVELKKELKDVTWIRTGLSGIEGIIKVRLNHLGDIVQVREY

SEQ ID NO: 6586 - protein, 1364 aa, synthetic construct
  REGION 1..1364: note = Synthetic
MRKILGLDLGTTSIGWALVNEAENESENSEIIKLGVRVNPLSIDEKTNFDKGKPISTNADRTLNRGARRNLQRYKQRRENLFEVLLKNKIIEKETVLTETGYNTTHETLRLRAKAPNQQIELKELARVLFSINKKRGYKSSRKSKSEDEGNAIDGMSIAKELYENKITPGQYVYQQLLNKKKYIPDFYRSDLQNEFNTIWDFQKQFYPNILNDEMYKKLEGQGQQSSRKRFLAIHGIYTAENKGKRDAIKLQHYKWRSEATTNQLPIDQVSYVLVEINNDLNKSSGYLGAISDRSKELYFKKETVGQNLYRQIKENNHISLRNQVFYRQDYLDEFEQIWEEQAKYYSELTSELKNEIRDVVIFYQRKLKSQKHLISDCQFEKRHKAIPKSSPLFQEFKIWQNLNNLEFKNTKTKEKIVLDEDLRISLFEELNLRGNLTEKDILKFCDLDTTWKSNFTTGLEGNNTNKALYNIYQYIATEEGYGFDWEKKNAKEIQEELKSILPQINIDATILNFDANLEGQTFDKQTSYQLWHLLYSAEDDTKILEKDRLIYGNSNVALKKKLHTKYGFKPEYAAMIANISLQEDYGSLSSRAIRKIIPFLQEGNDYSESCALAGYNHSSSLTKEELEKRILKPKLEILHKNSLRNPVVEKILNQMVNVVNQIIDEYGKPDEIRIELARDLKKSAKEREETTKFINSATKVNDDIKFLIKKEFGFTPTKNDLVRYKLWLELKNNGHKSLFTNKYIPKENIFSKDIDIEHIIPKAILFDDSFSNKTLAYRAVNLKKADRTALDFIEQEYNNEEINNYKLRVENLYKNGDISKGKYRKLLMSIANLPTDFIARDLVNTQYISKKAKSMLFEVFQNVVPTSGRITDKLRGDWDLINVMKELNLPKYRSLGLTEIQERKGNKKIEVIKDWTKRNDHRHHAMDALTVAFTTHNHINYINNLNASRSKESVLYAIKNTITKIYEDPIGNKKRKFIPPMVNFRVEAKKHIESVLISYKNKNKVVTKNVNKSKLKGKDNFNIKSQLTPRGQLHKETVYGTSKREMEKPIKLNKSFNLDTLNLIINHNLKTLVAKHLHKYNNNPKIAFDSKTIKKDPILYNDLPLTEVFCFEKIYTIRKVVSPDNFKTEKDLNKIVDKKTREILKFRLAEYGANPKEAFADLDKNPIWLNKERGITIKKVTITGVANAEPLHYKKDHFGNEMLDENGNKQAVDFVSTGNNHHVAIYKDNKGKLHEKVVSFYEAVARVNQGLPIIDKEYNTSLGWEFLFTMKQNEMFVFPSDDLNLDEIDLLDKKNYTLVSPYLFRVQKLTTKDYFFRHHLETTIQDNKELKGISFIRTGLNNIENIIKIRTNHLGMIVQIGEF

SEQ ID NO: 6587 - protein, 1356 aa, synthetic construct
  REGION 1..1356: note = Synthetic
MRKVLGLDLGTTSIGWALVNQAESPEEKSSIIRAGVRVNPLSSDEKTQFEQGKDATTNAGRRIKRSMRRNLQRYKLRRDTLIGILKREGWIDDKTILAEHANGSTFETYRLRSEALDREVDLSQFARILLMINKKRGYKSNRKIKSQEDGRLYDGMDLARELNETGKTPGEYCYHILKNGAKYVPEFYRSDLASEFDRIWEFQKQYYPEYLTDKAKDGIKDKTKSVTASFFKANYGILTADNKGKDKKIQSYEWRMKALQTKLPIEELVYVLADINGKISDASGLLGKISDRSKELAFNNETVGQFLWRQICSNPNVSLKNITFYRQDYLDEFEKLWASQSRFHGELTEDLKKEIRDVVIFYQRRLKSQKGLVSKCEFEKNHRVIPRSSPLFQEFKIWQNLNNIILTDVDTGEQRALSQDEKDRLAAELQFKPKLQSSTALKLLFGKKSKSLTANFKAVEGNTTIASFAKVLLDIAGIEDDREYEAEKLDAELILETVNGTLKNEKLTGLLSFDSSLDRDSSEGQVSWKLWHLLYSYEGDNSRTGNDSLISKISEICGLQRDYAAMLSNVSFESDYGSLSSRAIKRILPYLKEGNRYDEACVLAGYNHSHSKTKDELEARELEETLSPIPKNSLRNPVVEKILNQMINVINAISEEYGKPDEIHLEMARELKMDKESRKRKYESISANEKENEEIREKLIKEFGFSHVRKSDIVRYKLYEELKPRGYKTFYSNQYIPREKLFSKEIDIEHIIPQSVFFDDSFANKTLEYRAVNIEKANETAYDYVCSKYGKEEAEQYKSGIQDMVGKGQISRTKGRYLLMRGSEIPEDFLNRDLTNTQYIARKAKEMLESYVRTVVPTTGSITARLREDWQLVDVIKEIDFPKYEKAGLTFIDYDNDGRVVKRIKDWSKREDHRHHAMDALTIAFTKPAHIQYLNNMKAKSDKSSSIYAIWQKETVKTGDKRIFMPPMPLDELRAAFRKELESVLVSIKAKNKVATRNVNKTRSSQGDNRQLALTPRGELHKETVYGRSKKYETYEATVGGRLTREEILNVASKKEREALLQRLEANGGDPKKAFCGKNAPDKNPIWLDAVHGEQIGSKVKCVILKDVFTIRKTVDPNLKVDKVLDAGIRNLLNERLQEYGGNAQKAFSNLDDNPIWLNKEAGIAVKRVVIEENVPAVAIRNKRDHVGKVMKDADGNSLPADYVNLRNNHHIAIYRDAEGNLQEKVVSFFEAMDRVSNGLKPVDKGYRKTEGWQFLFSMKINEMFVFPNPQTGFDPSEIDLTDQKNYGRISPNLYRVQKLSKKDYYFRHHLETSIEDTKELQEITWKRIRNLDNLKGAVKVRINHIGEIVAVGEYD

SEQ ID NO: 6588 - protein, 1353 aa, synthetic construct
  REGION 1..1353: note = Synthetic
MKKILGLDLGTTSIGWAMVNERESNDETSSIIRLGVRVNPLTVDEQTNFGKGAPITTTADRTQKRSMRRNLQRYKLRRDNLIALLKEQGWITDATILSESTNNSTFETYRLRAKAASEEITLEQFARVLLMLNKKRGYKSNRKMKNDEGGHFVSSLDVAKEIYDSNLTPGQYAYQLIKEGKHNIPDFYRSDLEAELDQVWAFQYKQHKSILTNEFRTAIANQSKTGTSNMFRKKYNIFAADIKGNRIEKAEKIYKLRNEALERALTEEELATVISEINGQINGSSGYLGAISDRSKILYINKQTIGQWLMRQLDSNPNASLKNKPFYRQDYLDEFEQLWETQAKHHAELTPEIKHEIRDIIIFYQRRLKSQKWLVANCSFEKRKVCPKSSPLFQRFKIWQMLNNVVITIDNEEYVLNEDQKALLAQELQYKEKLSKSDALKLLFAKTRGIDMNFAALEGDRTMARLLSAAQEIVSVSGHGEYDFAKLSAKETVEIVRMVFGGLGFATDWLTFNTDASDTEQEPLMRLWHLIYSFESDNSATGDEKLVKRIMQMLNMPKEYARLFANIHFEDNYCNLSSKAIKNILPFMTAGHVYSEACSLAGYNHSEQSITKEENEKRQLKDHLESVPKNSLRNPVVEKILNQMVNVVNEVIDTYGRPDEVRIELARELKKNALERKTMTDAINRNTHETEQYREILQKEFGLIHVSRNDIIRYRLYKELASNGYKTLYSNQYIPQEKLFSKEIDIEHIIPQARLFDDSYSNKTLEYRSINIEKGNSTAIDFVRQKYGEEGMAGYNDRVSNLLKCGAISMAKARKLKMSEPDIPEDFIDRDLRNTQYISRKAQEMLHEVVRIVTATTGSVTDRLRQDWQLVDVMQELNWDKYKQLGLTTIIKGRDGQQIRRITDWTKRNDHRHHAMDALTIAFTKPIYINYLNHLNARGSSEEIKLIEYKYLERDANNHLRFKSPIPGNFRSEAQRHLDMILVSTKAKNKVVTRNTNITKKKCGYNKKIQLTPRGQLHMENVYGSALHPITKEIAVGSKMTAEMIALVKNPIYQDLLYERLSQHGGDPQKAFTGKNSLAKNPIWINKEQTECIPEKVTIQEFERQFTIRKPVDKSLNLEKVKDEGIRRILEARLKEFGGDAGKAFANLDSNSIWLNRDKGIDIKRVTIVESIPGEPLHYKHDKDGKLILDANGNPLPADYVNLRNNHHIAIFRDADGNLQEHIVSFYEAVARVVELGLPAIDKEYNKDKGWQFLFTMKQNEYFVFPNPSQGFDPNEIDLTDERNYSQISPNLFRVQKLSSKDYWFRHHLETTIDTKNELKDITWKRINSINALNGIVKVRINHIGRIVQTGEY

SEQ ID NO: 6589 - protein, 1351 aa, synthetic construct
  REGION 1..1351: note = Synthetic
MAKVLGLDLGTTSIGWAVVNEADMPKDSSIVRLGVRVNPLTTDEQTNFEKGAPITTTADRTLKRSMRRNLQRYKLRRENLISLLKENQWISDNTILSENGNNSTFETYRLRAKAASQEITLEQFARVLLMLNKKRGYKSSRKMNNNEDGSFINNLDMARQLYDSGMTPGQYGHLLISEGKHYIPDFYRSDLLAELDKIWAYQHQYHSTILSTDFRNSIEGQSKKGTSVVFSKTYGIYTADIKGNRFERNKQLFSLRNDALNRALTPEELATVICEVNGQINSSSGYLGAISDRSKILYINHQTVGQYLMQQLDSNPNASLKNKPFYRQDYLDEFEQLWETQARYHTELTPELKHEIRDIIIFYQRRLKSQKWLVANCPFEHRKVCPKSSPLFQRFRIWQTLNNVTIIKDDEEYVLNDEQKATLCTELLLKEKLSKKDALKALFTKTRGLDLNFASLDGDRTMANILSATQEIISLSGHGEYDFSKMPADQILDIIKSVFHGLGYATDWLNLNTDAEKIEDEPQMRLWHLLYSFEGDNTTTGDEKLTKHIMELTHLPYEYARLYAKLHFEDDYCSISTKAIKRILPYMAAGHEYSEACALAGYRHSEQSLTREENDSRPLKEHLEPLAKNSLRNPVVEKILNQMVNVVNGIIDAYGRPDEVRIELARELKRNAAQRKAMTEAINRTTRETEQYRTILQKDFGLTHVSRNDIIRYRLYQELAPNGYKTLYSNQYIPKEKLFSKDIDIEHIIPQSRLFDDSFSNKTLEYRDINIEKSNATAIDYVKNKYGDSGVSDYKSRIDSLLSNGAISPVKARKLKMTEAEIPEDFIERDLRNTQYISRKAQEMLHDIARIVTATTGSVTDRLRQDWQLVDIMQELNWSKYQQQGLTSVITGRDGQQIRRIEDWTKRNDHRHHAMDALTIAFTRPAYINYLNHLNARDIDDIRSIERHFLERDANGHLRFVMPIAGNFRAEAKRHLEMILVSIKAKNKVATRNTNITKTKGGNKQKTQLTPRGQLHKETVYGSALIPSTCEVPVGSKMTAKLIAQVQNTTYRKALQQRLDEFDGDTKKAFTGKNSPAKSPIWLDAEHTVQVPEKVLIRQYDKQFTIRKSVDKDLNVDKVLDNGVRRLLQARLAEYGGDAGKAFSNLDSNPIWLNRERGIDIKRVTIVESIPGEPLHHKHDKEGHPILDADGNLQPADYVNLKNNHHVAIFRDADGNLQEHIVSFYEAVARVTQLDMPVVDKEYNKDKGWQFLFTMKQNEYFVFPNPTQGFDPTEIDLTDERNYSQISPNLFRVQKLSSKDYWFRHHLETTIDDKKALQNITWKRITSLNNLKGIVKVRIDHIGRIVHVGEY

SEQ ID NO: 6590 - protein, 1351 aa, synthetic construct
  REGION 1..1351: note = Synthetic
MKILGLDLGTNSIGWAVVNEAENERESSSIIRLGVRVNPLTVDEQNNFEKGKPITTNADRTLKRSMRRNLQRYKLRRANLVSLLKTQGWITDETLLSEQGNNSTFETYRLRAEAATKEITLEQFARVLLMLNKKRGYKSSRKMKHDEDGSFVNNLDIARELYDSGLTPGQYAYNLLKDGKKYIPDFYRSDLQEELDKIWAYQYEYHENILTHSLRSAIIDQSKTGTTKIFLKTHGIFTADIKGNRNERNKQLFELRCGALERALTAEELATVIAEVNGQINSSSGYLGAISDRSKALFINHQTVGQYLMQQLDRDPNKSLKNQPFYRQDYLDEFEQLWETQAHYHPELTAALKHEIRDIIIFYQRRLKSQKWLVANCPFEHRKVCPKSSPLFQHFRIWQVLNNVTVTVDNKTYVLNEEQKSILSKELLYKEKISKRDALKMLFVKAKGVDMNFASLEGDRTMSNLLKAAQEIVSISGHGDYDFGKMPADDIHNIIRSVFGGLGFATDWLNLDTDADDLEQESQMRLWHLIYSFEGDNSTTGDTKLVERLMSLLNLPQEYARLFANVHLEDDYCGISSKALKRILPFMKAGHIYSEACALAGYKHSEQSLTREENKNRPLKDHLEQLPKNSLRNPVVEKILNQMVNVVNSIIDTYGRPDEIRIELARELKNNALGRQAIFEAINRNTKESERIQQILKKEFGLTHVSRNDIIRYRLYQELSGNGYKTLYSNIYIPQEKLFSKEIDIEHIIPQARLFDDSFSNKTLEYRDVNIKKSNTTAIDFVRNEYGENEVEQYKKRVNDLLKSGAISQAKAKKLKMTEAEIPNDFIERDLRNTQYISRKAQEMLRDVARVVTATTGSVTDRLRQDWQLVDVMQELNWDKYERQGLTTVINGRDGQQIRRITDWTKRNDHRHHAMDALTIAFTKPAYISYLNHLNARSEDDIRSIERRFLERDANGHLRFISPIAHNFRSEAKRHLEMILVSIKAKNKVVTRNNNTTKTKGGRRNRIQLTPRGQLHDATVYGSILLPHTKTIAVDGKMTAEIIGQVQNPVFRQALSQRLEACGNDPKKAFTGKNSLEKAPVWIDQAHTEHVPAEVTIQRLEPQHTIRRAVNKDLNINKVLDKGIQHILQARLDAYGGDAAKAFANLDNNPIWLNQEKGIAIKRVTTAENISGEPLHHKHDKEGRPILDTNGKPMPSDFVRLMNNHHVAIFQDADGNLQEHIVSFYEAVARVTELGLPVIDKEYNKDKGWQFLFTLKQNEYFVFPNPAQGFNPDEIDLTDERNYSRISPNLYRVQKMSSKYYVFRHHLETTVEDKKELQGITWKRIQSLNNLKGIVKVRIDHIGRIVQIGEY

SEQ ID NO: 6591 - protein, 1350 aa, synthetic construct
  REGION 1..1350: note = Synthetic
MKRILGLDLGTASIGWALVNESENEKEKSEIIKLGVRVNPLTTDEQTDFEKGRPLSVNADRTLKRGARRNLQRFKQRRKNLIEILIKKGFITNISLLTEIGSNTTYQTLELRAKSVKEKIEKEEFARVLLTINKKRGYKSSRKAKNDEEGSLIDGMSVAKELYDNNLTVGQYVYQLLEKGGKYIPDFYRSDLQNEFDVIWNFQKEFYPNILTGELYKKLQGQGQQNSRKLFLAIHQIYTAENKGKRDTVKKQHYKWRNDAINTQLLIEEVAYVLVEINNNLNKSSGYLGAISDRSKELYFNKETVGENLYKQIQENPQTSLKNQVFYRQDYLDEFEQIWETQAKFYSELTKELKEEVRDVVIFYQRKLKSQKHLISECEFEKHHKAIPKSSPLFQEFKIWQILNNIEFKHKKTKELKILSEELKETLFEELNIRGNFTSDAVLKFVKLDKKEWELNYKKGIEGNRTNEVLYNVYQKIAEYEGYGFDWSKKSAVEIKEELNTIFSEIGINSKILDFNPEISGNDFDKQESYQLWHLLYSAEEDGFLKQKLQDKYGFKSEYANMLANVSFQSDYGSLSARAIKKILPNLIAGHEFSEACSLSGYNHSNSLTKEELANRPLKGKLELLKKNSLRNPVVEKILNQMVNLVNQVIESYGEIDEVRIELARELKKSAQERALMTTNINASKTKYESFRKLLQKDFGIKNPTRNDIIKYRLYEELKANKYHTIYTNKYIPRDKLFSKEIDIEHIIPKAKLFDDSFSNKTLAFRKPNQDKGNMTAIDYILSYQSKDIDNYKSRIENLFKNGKGDISKAKRNKLLMEEKDIPDGFIDRDLRNSQYIAKKAKQLLEEVIRTVNTTTGSVTNKLRDDWGLINVMQELNMPKFKAIDESLIEQIEKKDGTFKTRIKDWSKRNDHRHHAMDALTVAFTRYNHIQYLNNLNAKSDKKGAIYGIQELETYVNSKGKRKFIKPMHNFREEAKKHIEDILISFKAKNKVVTKNINKIKSKDGFIKKVQLTPRGQLHKETVYGKINEVVVKEEKINAKFDLEKINKVTKPIYRNALLKRLQEFNGEPKKAFTGKNSLSKNPIYLDVAQTKTLPESVKVQFFEENYTIRKEISPDLKIDKIIDKGIQRILLKRLDEFNGKPKEAFSNLEKNPIWLNKEKGIAIKRVKIKGVKNVESLHNKRDHLGNEILQKGKSAPNDYVSTGNNHHVAIYQDKNGKLQEKVVSFYEAVARVNNKLPIIDQDFNKDLGWKFLFTMKQNEMFVFPSEDFKPLETDLMDKKNNSKISKNLFRVQKLGNKDYTFRHHLETKIEDIKKLRDFTYIRKRNPESIKNIIKVRINHLGNIVHVGEY

SEQ ID NO: 6592 - protein, 1350 aa, synthetic construct
  REGION 1..1350: note = Synthetic
MKKVLGLDLGTSSIGWAVVNQAVDHNEESSIVKLGVRVNPLTVDEKGNFEQGKSITTTADRTLKRSMRRNLQRYKLRRENLLSALKSYGWITDDTRLAEEGNSSTFETYRLRAKAATEVISLEQLCRVLLMLNKKRGYKSSRKMNNEEDGELIDGMAVAKSLYEEHLTPGEYTLKILNSGKKYIPSYYRSDLQAEFNIIFNHQSQYYPEVLNAELKEKLMGRNKSTTEKMFFVIHKVKCAELTDRKTRVITLARWRVEALANQLDIEQVVLVLSTINGEIDKASGYLGAISDHSKELYFQHLTVGQYLMKNLDADPHFRIKNRVFYRQDYLNEFETIWECQKRFHSELTKERKEELRDIIIFYQRKLKSQKGLISFCEFESKQIEVMVDGKKKIVTTGSRVCPKSSPIYQEFKIWSELNNLALISKEDGTSIPLSLDQRKMLADELRYVKEIKGSAAMKLLKINAKEYSLNYDKIDGNTTASALMDACKNVVEWSDHDVEKFDKLSSQEKIDMVKTVFGALGYNSDFIVTSINEDDAMFRIWHLLYSYEGDSSTTGNDGLVKHIQQLTSLPEDYATALVNVRLEQDYGSLSAKAIKRILPFMKNDGKKYSEACEMAGYRHSKQSLTKEEIEQRELKPCLEVLPKNSLRNPVVEKILNQMVHVVNECISAYGPFDEVHIELARELKQSQKQRENATNALRLRTKETEDIKKILIDDFKINHPSRNDIIRYRLYEELKPNAYKTLYSNTYISKEKLFSREFDIEHIIPQAKLFDDSFGNKTLELRSVNIEKADMTACDYVKQKYGEKGFVDYEARVKTVYGKTNPRKQKQLLTPEKDIQSGFLNRDLSDSQYIAKEAKRMLHEIARTVVVTTGSITARLREDWQLVDVMKELNWEKYDRLGLTEAHYNNDGHQVRRIKDWTKRNDHRHHAMDALTIAFTTVSHVQLLNNLNARGGGDSIYGIMYKELTTGRKFKLPMPDFRAKAMNQLKSILVSIKAKNKVATPNRNRAKNGAKQITLTPRGQLHNETVYGKRNRYASALEKVGKNFDEAKIATVCRKAYREALLARLKEFGGNPAKAFTGKNSLEKNILWLDELHTHAVPPKVKTVSMESVYTIRKSITPDLKIEKVIDAGVRRILEKRLEDFKGDAKAAFSNLDDNPIWLNEEKGIAIKSVTIKGVNVATPLHEKVNKNGETEPTDYVSTSNNHHVAIFEDEQGNYHEHIVSFYEAMMCKNMGLQVVDKQYNKDLGWKFLFTMKQNEYFVVPDLEHGFNPEELDLMDEANFNLVSPHLFRVQKLSTKYYIFRHHLETNVEESKPLRNITWKRIQNENALRGFVKVRVDHIGKIVAVGEYD

SEQ ID NO: 6593 - protein, 1349 aa, synthetic construct
  REGION 1..1349: note = Synthetic
MKKIIGLDLGVGSIGWAVVNEAENDNEQSNIVRLGVRVNPLTADEQSNFEEGKSITTNADRTLKRSARRNLQRFRLRRNELVKVLKENNIINEDSCLIENGKNTTFETLSLRAKAVNEKVSLEEFARILLSINSKRGYKSNRKALNSEQEDGQLIDSIDVARELNERNITPSQYCLELLQQGKETFPDFYRSDLQNEFDKIWNYQKQYYADILTDEFKNHIQGRSKTNVTKIFLAKYGLYAEDIKGSKKDIKNKGLQLKVEALTRKLTKEELVYVVAEINGQISGSSGYLGAISDRNKELYFRNQTVGQYLHNIIKTNPHASLKNLVFYRQDYIDEFDKIWDTQAKYYPQLTSDLKKKIKDNIIFYQRRLKSQKGLLDFCIFESKEIEIIVDGKKKKKRTGLRVCPKSSPLFQEFRTWQMLNNLQIISETGEKRYLDIEEKDKLFEELQYTDKLKKSEFLKLLLNKAKGYSSNYEELIGNRTIAKLYSVAPSIKEEVFIFNSAEDLQSQLIFRLWLLLYSYEGDNTPTGNGNLIARLENEYGFSKEEAKGLANISFEEDYSNLSSKAIKKILPFLKEGYQYDEACLLAGYKHSEQSLTREEIDNKILKDKLDLLPKNSLRNPVVEKILNQMVNVVNALIEEYGKPDEIRIEMARELKKSAAERESTTKAINDNSKLNEAYVKEIKDYYHFTHVSRNDVIRYKLWKELESNGFKTLYSNTYIPKEEVFDKKFDIEHIIPQSKLFDDSFANKTLELRDINIEKSNETAYDFVANKYGEEGLQQYLNRIENLLKSNKIGRTKYRNLKTKLTDIPKDFINRDLNDTQYISKKAKEMLLSIVKEVNTTTGSVTDKLREDWQIVNIMQELNWDKYSALGLTEVIENKDGQTIRKIKDWTKRNDHRHHAMDALTIAFTKHSYIQYLNNLNARSDKSGSIYAIEKKELYRDEHNKLLFNPPLPIDEFRSEVKKHLEQILVSIKAKNKVVTQNINKTKRKGGTNRVIQLTPRGQLHKETVYGKRQRYITKEEKVGGSFSKEKIMTVCRKDYREALLNRLEEYYNDPKKAFTGKNSLEKNPVYYNLALEKKVPERVKTVSFETIYTIRKEISKDLKLDKVVDVRIRKILEERLKEYNGNANEAFSNLDENPIWSNKEKGIAIKRVTITAINNAEALHDKKDNKGNLILDSEGNKQPVDFVSTGNNHHVAIYRDENGDLQENIVSFYEATARAINQEPIIDKNYNSDKGWKFLFTMKQNEYFLFPDDKGFNPTELTKDFILNEDNYSILSPHLFRVQSLSKVMYGNSAVRDYIFRHHLETNVSSKLRDFTYKQYKSLAFASTIVKVRINHIGKIVAVGEY

SEQ ID NO: 6594 - protein, 1346 aa, synthetic construct
  REGION 1..1346: note = Synthetic
MKKILGLDLGVSSIGWALVNEAENQVEKSSIIRLGVRVNPLTVDEKGNFETGKSITTNADRTLKRSMRRNLQRYKLRRAALIDTLMSYGWINEGSILAESGKDTTFQTLKLRAKAAEKEISLEELARVFLNINKKRGYKSSRKLNKSDNTDEGSLIDGMETARILSEESITPGEYSYRFLCEGKEEKNLPEFYKSDLENEFERIWAFQKQFYPDILTDILKENLKDRNEKQTWAICEKPFNIAGTKRTTKGKELVIENYLWRSQALKEQLNLEQLAVVLQKVNAQLRNSDSYLGRISDRSKELYFKHRTVGQYQLAQLMKDPHSSLKNQVFYRQDYIEEFDRIWETQSRFHPEMTSDKKRNIRDIIIFYQRPLKSQKSLVSYCEFEKGRKVCPKSSPVFQDFKIWQMLNNLKVDGEYLDLKSKQLLFKELSIRKELSKTNTLKLLFGKSKGHDMNFRKLEGNRTQAALFLAYSKILSLSGHDEVDFSKSIDEIMDKTASVFSALGINTDILAFDSSKSGKEMENEPLYRLWHLMYSYTEDNSKTGYDSLVSKLQEEFGFTPEYGKILASVTFEDDYGSLSTKAMCRILPYMKEGMEYSAACTEAGYRHSQRSLTKDEIENKEYRDRLDILPKNSLRNPVVEKILNQMINVINGVIDTYGKPDEIRIELARELKKNAAERQGMTEAINRSAKENKEIEEKLKQDFGMSHVSRTSIIRYKLYMELKDNGFKTLYSNTYIPYEDLFSKRFDIEHIIPQSRLFDDSFANKTLESKDINITKGDMTALDFVTDKYGQEGVERYKSTVDMLLDKGAISKTKYHNLLRTQNDIPENFIQRDLRDTQYISRKALEILGDIVKSVVATSGEITARLREDWGLVDVMKELNWDKYDKSGMTEYYNDPDGRTISRIKDWTKRNDHRHHAMDALTVAFTKRSIIQYLNTLNAKDKELQQEIASKGRLLPPMPFDELRCEARKHLDDILVSIKAKNKVATRNTNKTKRKGGFNEKVQLTPRGQLHNETVYGRILQYDCKEEKVGSSFDADKIATVACERFRNALYQRLAQYGGNPKKAFSGSNSLDKNPLFTDILHSEEVPQKVKTVRLIPVYTIRKQIDSTLKIEKVIDSHIRQILSNRLEEFGNDPKKAFSNLDENPIWLNKDKGIQIKRVTISGPTNVYALHDKRNIFGAPIINCDGATIPSDFVSLSNNHHIAIFMDSDGNLQEQPVPFMEAVARVSLGDPVIDKTYKVKDGWKFMFSMKQNEYFVFPNKETGFDPNSIDLLNPVNYPVISKNLFRVQKLTSKDYFFRHHLETSIVDNKALKDITWKRIQNVNGLKGIVKVRIDHLGNIVQTGEY

SEQ ID NO: 6595 - protein, 1264 aa, synthetic construct
  REGION 1..1264: note = Synthetic
MKRILGLDLGTNSIGWALVNEAETDEEVSSIIRLGVRVNPLTVDETQNFEKGKSITTNAERTLKRSMRRNLQRYKLRRDALVEFLKELGFITDETILSEQGNRTTFETCRLRAKAAEEEISLEELSRVLLMINKKRGYKSSRKVKKEEDGVLIDGMEIAKKLYEEDLTPGQLCSQLLESGKKVLPDFYRSDLQEELDRIWSVQKQFHPDVFCDAAKEEIKGKNRSQTWAILANYFVWKEEVVGWNDREAKNETIEKECKLVGLKRTTKGYELKKENYRWRAQALTEQLGLEEIAVVLQEINGQINASSGYLGAISDRSKVLYFNHQTVGQYQMAELDKNPHASLRNMVFYRQDYLDEFDRIWEKQAEFHKELTAELKKEIRDMIIFYQRRLKSQKGLISFCEFERLEIVVEKDGKKQTKVIGCKVIPRSHPLFQEFKVWQTLNDIKVLGREKKRNALSASESRALYPEEKEILARELAIKENMKKADVLKLLFENPQELDLNFKQIDGNRTGFSLFSAYSKMIEKYGYEPLDFKKPADEIIGQLRTIFTDLGWNTNLFTIDLTKEGKELEMQPYFRLWHLLYSFEGDNTSTGNGKLIEKIMQLCGVEKEYAVELASLSFQDDYGSLSAKAIKRILPYLKEGNLYDVACEYAGYRHSKSSLTKEEIENKVLKGKLEVLPKNSLRNPVVEKILSQMVNVINTIIDTYGKPDEIRVELARELKKSAKEREELTKAIAKSTREHEEIRKLLQDEFGMMNVSRNDIIRYKLYEELKDNGYKTLYSNQYIPKEKIFSKEIDIEHIIPQSRLFDDSLSNKTLEYKAINIEKGNKTAYDFVKEKYGEEGLQQYINRCESLFNDKKAKLRKLKMEQKDIPDGFIDRDLRNTQYIAKKALAMLNEICRRVVATTGSITDQLREDWQLVDVMKELNLPKYEALGFVETYEDKDGRKIKRIKDWTKRNDHRHHAMDALTVAFTKDAFIQYFNNKNAAQDSGNRNHTNIIGIKTRYFDKGRALPPIPLEQFRIEAKQHLEKLLVSIKAKNKVVTVNVNRTKKRKGENTKIQQTPRGQLHLETVYGSHKQYVTKIEKVNASFDAAKIATVSKRAYRNALLKRLETFGNDPKKAFTGKNALEKNPLYADKYQTIRVPEKVQTVEFETIYTIRKPVDPALNVDKVVDVKVRAILERRLKEYGGDPKKAFVNFWENPIWLNKEKGISIKRVSIRGINNAQSIHVKKDKNGNPIWDENGKQIPVDFVNTGNNHHVAFIVNLF

SEQ ID NO: 6596 - protein, 1219 aa, synthetic construct
  REGION 1..1219: note = Synthetic
VKEEVRGKNRSQTWAILAKFFVWSEKESVWNEKEARTEERVKEYKLVGLKRDTKGNELKLENYRWRVQALSEQLNPEIVAIVLQEINGQISASSGYLGAISDRSKQLYFNRQTVGQYLMSELEKDPNVSLRNRVFYRQDYLDEFDRIWEKQAEFHEELTVELKKEIRDIIIFYQRRLKSQKGLISFCEFEKREVVVEEDGRKKNKTVGCRVIPRSHPLFQEFKIWQTLNDIEVFAWDKQSKRKKADKSSILFDNSEDALLVEGKRFLYQEEKELLAKELFVKESMKKAEVLKLLFENYQELDLNFKQIDGNHTGFALFSAYSKMIEKYGYEPVDFKRSADEIIEKLETIFTNLGWNTELLSIDLSKEDKELERQSYFRLWHLLYSFEGDNTPTGNGKLLEKIMQLCDVEKEYAVELANVSFQEDYGSLSAKAIKKILPYLKEGNQYDVACDYAGYRHSRSSLTKDEIENKILKDKLEILPKNSLRNPVVEKILNQMVNLINTLIDTYGKPDEIRVELARELKKNAKEREELTKSIARNTREHDEIRQLLRTEFGMMNVSRNDIIRYKLYEELKDNGYKTLYSNEYIPREKIFSKEIDIEHVIPQARLFDDSLSNKTLEYRAINIEKGNKTAYDFVKEKYGNDGLEKFLNRCETLFKDKRTKLRKLKMEEKDIPEGFIDRDLRNTQYISKKAFAMLNEISRRVVATTGSITDKLREDWQLVDLMKELNLPKYEKLGMVEMFEDKDGRKIKKITDWTKRNDHRHHAVDALTVAFTKDVFIQFYNNKNAAWMPASKEHANITGIKARYFENGKALAPMPLAQFRAEAKRHLENLLVSIKAKNKVITSNVNRTKNKNGENRKLQQTPRGQLHLETVYGSHRQYATKIEKVNAAFDVTKIATVSKLAYRNALLKRLEAFGNDPKKAFTGKNTLEKNPLYLDENQTEMVPEKVQTVEFETVYTIRKPIDPNLSIDKVVDVKIRSVLEKRLKEYGGDAKKAFVNLDENPIWLNEAKGISIKRVSIRGISNAQSLHEKKDKDGNLILGKEGRKIPVDFVNTGNNHHVAIYKKPVLDKVGQVVLDEEGNPKYELDEVVVSFFDAVTRANLGQPIIDKDYRRSEGWQFLFSMKQNEYFVFPNDKTGFNPKEVDLLNPENYALISPNLFRVQKFAYKNYVFRHHLETTIKDTSSTLKGITWTDFRSSKGLDKIVKVRVDHIGQIVSIGEY

SEQ ID NO: 6597 - protein, 1184 aa, synthetic construct
  REGION 1..1184: note = Synthetic
VVGWNDREAKNETIEKECKLVGLKRTTKGYELKKENYRWRAQALTEQLGLEEIAVVLQEINGQINASSGYLGAISDRSKVLYFNHQTVGQYQMAELDKNPHASLRNMVFYRQDYLDEFDRIWEKQAEFHKELTAELKKEIRDMIIFYQRRLKSQKGLISFCEFERLEIVVEKDGKKQTKVIGCKVIPRSHPLFQEFKVWQTLNDIKVLGREKKRNALSASESRALYPEEKEILARELAIKENMKKADVLKLLFENPQELDLNFKQIDGNRTGFSLFSAYSKMIEKYGYEPLDFKKPADEIIGQLRTIFTDLGWNTNLFTIDLTKEGKELEMQPYFRLWHLLYSFEGDNTSTGNGKLIEKIMQLCGVEKEYAVELASLSFQDDYGSLSAKAIKRILPYLKEGNLYDVACEYAGYRHSKSSLTKEEIENKVLKGKLEVLPKNSLRNPVVEKILSQMVNVINTIIDTYGKPDEIRVELARELKKSAKEREELTKAIAKSTREHEEIRKLLQDEFGMMNVSRNDIIRYKLYEELKDNGYKTLYSNQYIPKEKIFSKEIDIEHIIPQSRLFDDSLSNKTLEYKAINIEKGNKTAYDFVKEKYGEEGLQQYINRCESLFNDKKAKLRKLKMEQKDIPDGFIDRDLRNTQYIAKKALAMLNEICRRVVATTGSITDQLREDWQLVDVMKELNLPKYEALGFVETYEDKDGRKIKRIKDWTKRNDHRHHAMDALTVAFTKDAFIQYFNNKNAAQDSGNRNHTNIIGIKTRYFDKGRALPPIPLEQFRIEAKQHLEKLLVSIKAKNKVVTVNVNRTKKRKGENTKIQQTPRGQLHLETVYGSHKQYVTKIEKVNASFDAAKIATVSKRAYRNALLKRLETFGNDPKKAFTGKNALEKNPLYADKYQTIRVPEKVQTVEFETIYTIRKPVDPALNVDKVVDVKVRAILERRLKEYGGDPKKAFVNFWENPIWLNKEKGISIKRVSIRGINNAQSIHVKKDKNGNPIWDENGKQIPVDFVNTGNNHHVAIYRKPVLDKKGQVTFDEDGNLMYELDEVVVPFFEAVTRANLGLPIIDKDYRKSEGWQFLFSMKQNEYFVFPNEKTGFNPKEVDLLNPDNYAMISPNLFRVQTMSKVMYGNNVVRDYKFRHHLETTVKDMKELKDIAYKQYKTLSFGNSVVKIRINHIGQIVSVGEY

SEQ ID NO: 6598 - protein, 1176 aa, synthetic construct
  REGION 1..1176: note = Synthetic
MLFPKKLSKEEVAYVLVEINSNLNNSSNYLGNISDRSKELYFNKQTIGQFLYTKLKEDRHYSLKNKVFYRQDYLDEFERIWETQAIFHKELTEDLKKQIRDTIIFYQRRLKSQKGLISLCEFENKEITIEKEGKTVTKQIGVRVIPKSSPLFQEFKIWQILNNVICKKKGTRKKKAVTPAPLLFELFGTPSETFFSLDMECKQLLFEELNLKGNLKADKVIRLLGYIPQEWEINYNQLEGNRTQKSLYEAYLKIIEIEGYDIKTFLRIKSDKEDWDLEESPLSAKEIRENIQHIFETLGISTAILYFDATLPIKDFEKQASYQLWHLLYSYESDNSPSGNETLYKLLQDKFGFKREHAVFLSNISFQDDYGSLSAKAIRKIYPYIKENQYSTACELAGYRHSKLSLTKEELNNRPLKDLISPLKKNSLRNPVVEKGLNQMINVVNALIEKNSEKDAEGNIIKYFHFDEIRIELARELKKNAQERAEMTLNIKNATIEQEKIKSILISDFGIKNPTKNDITRYRLYQELAHNDYKDLYTNTDIPKELLFSKNIDIEHIVPKARVFDDSFSNKTLAYRDFNLKKGENTAFDFIDSSLGEEELNQYIARVENAFKTKNISATKYRNLLKKATEINDGFINRDLRETQYIAKKAKDLLFQITRSVVSTSGSITDRLREDWGLIDIMKELNMPKYRDLGLTEIIERRDGRKVEVIKDWTKRNDHRHHAMDALTVAFTKPSYIQYLNHLNARKDENNKLYADILGIERKETTKIHDENGNEKRVFIEPIPGFRQIAKKYLEEILISHKTKNKVVTKSINKIAGTNKKQETLTPRGQLHKETIYGKYHYYSNKEEKIGTKFDKETISKVSNPIYRYALQKRLEANENNPKKAFTGKNALSKNPIYLDDAKTKILPEKVNLIYLEEDFSIRKKIVSENPTSKEFVPNSISIEKIVDEGIKRILKERLETYNNDPKKAFADLDKNPIWLNKEKGISIKRVTISGVKNTQALHSKKDHLGKPILDKEGQEIPVDFVSTGNNHHVAIYRDQKGNLQEQIVSFFEAVVRAQQGLPIIDKTYKQEEGWQFLFTMKQNEMFVFPNEITGFNPSEIDLLDPKNKKLISPNLFRVQKISIKDYFFRHHLETNVETNNILKDITWKRGGLSLLKGIIKVRINHLGNIVSIGEY

SEQ ID NO: 6599 - protein, 1096 aa, synthetic construct
  REGION 379..396: note = misc_feature - Xaa can be any naturally occurring amino acid
  REGION 1..1096: note = Synthetic
LCFNDLTVGQFQYNQLKQNPLASLKNQVFYRQDYMDEFDAIWKEQSKHYSELNKKIKDKLRNITIFYQRKLKSQKGLINICELEGVERKVMTDGELKKKLIGPRVAPKSSPVFQHSKIWQNINNIILKNEKTKEIVELGEDLRELLFQYLNWKDNISASQLINFLIKNSDIPKGKWKVNLEKVEGNSTNAVLLSVYEKITEIEGYDKLKFSNPNEELIKSLKVCFTEIGVEPQILEMDYTLTGNDFSKQPAYELWHLLYSYEDDCSITGTESLEQKLQENFGFKKEHAKLLVGVNFQQDYGNLSVRALRKIYPYLEEGKVYSEACALAGYNHSKSLTAEENNKRILLDKLELLKKNSLRNPVVEKILNQMIHVVNAVIXXXXXXXXXXXXXXXXXXNAVIENPEMGKPDEIRVELARELKKTAKQRNELIKVITKATTDHIAFRDKIKKEFGLPYVSRKDLIKYKLYLELKSNGFRTLYSNTYIKPEELFTKKFDVEHIIPQSVLFDDSFSNKTLELRDVNLEKGNETAIEYCRRKGWGDDFKSRTDEIFKANGIKYGKRKKLLMTKTEIPEGFLNRDLGNTAYISRKATEILQQLTRKKVVSTSGKITSKLRSDWELINVLQELNWDKYEVLGLTYYDYNKEGKALARIKDWTKRNDHRHHAMDAIAVAFTKPAFIQYLNNMHAKSEKAGDIYGIEKKYTYRDKEGGRKFHKPFENIREESKNHLASILVSHKAKNKVVTRNKNKIKIKGNNSFKTKTELTPRGQLHKETIYGKSFYPEVKEEKINGSFSKEKIKTVTKPIYREALLKRLSENNHDAKKAFTGKNSLTKNPIFINEKTNVPDKVKTQQLQHQFTIRKVITPDLKIDKVTDEGIKRILEERLKEYNGKKKAAFSNLDENPIWLNKEKGISIKRVTISGVSNAEPLHIAKDHLGNDVLDEKGNTVPTDYVSTGNNHHVAIYKDEKGNLQEEVVSFYEAVIRKNNGLPIVEKNHPKGWEFLFTLKQNEMFVFPNEDFDPLNIDLYDDANRELISRNLFRVQKIGSKDYWFRRHLETTLVTTKELNEVVYHRKRNPNSISKIIKVRLNHIGEIVQIGEY

SEQ ID NO: 6600 - protein, 1084 aa, synthetic construct
  REGION 1..1084: note = Synthetic
MKKILGLDLGTSSIGWALVNEAETSEEKSSIIKLGVRVNPLTVDELQNFEKGKSITTNADRTAGRSMRRNLQRYKLRRENLIEVLKEYNFITDETILSENGNRTTFETYRLRAKAAVEEISLEQFARVLLMINKKRGYKSSRKAKGAENGTLIDGMEVAKKMYDEGITPGELCLQLLTAGKRYFPDFYRSDLQAEFDRIWNFQKQFYPDSLIDKVKDEVRGKNKSQTWAILAKYFVWKEVENSWNEEEAQTRRVEKEYRLVGIKRGVKREELKLENFQWRVKALSERMNPEELAIVLQEINEQISNSSGYLGAISDRSKELYFNRQTVGQYQMAVLDNNPNIGLRNMVFYRQDYLDEFNTIWEKQAEFHKELTEDLKKEIRDIVIFYQRRLKSQKGLINICEFERRQIEVEIDGKKKIKTIGSRVIPRSSPLFQEFKIWQTLNDIEVSVLGVKNKRKKQDDNSTTLLDSAENIDSLKLNVSRPLDADEKSLLAKELFIRDKLTKSDVLKLLFNNPQNLNLNFKNIDGNRTGSALYQAFSKILEISGHESINFKKSADEIVEQVKTIFSALGWNTEVLCFDSEKELDKQPYFKLWHLLYSFEGDSTPTGDGNLIQKIADLCGFEKDYASILANITFQEDYGSLSTKTIRKILPHLKDGNQYDVACEYAGYKHSKSSLKKEEIKNKVLKDKLELLPKNSLRNPVVEKILNQMVNVINAIITTYGKPDEIRIELARELKKNAKEREELTKSIVDTTKTHEGIRAILQNDFGMSHVSRNAIIRYKLYEELKDNGYKTLYSNTYIPKEKLFSKDFDIEHIIPQARLFDDSFSNKTLEVKSINIEKGSKTAYDFVEEKYGEQGLQEYLNRCEVLFRDKKTKLRKLKMQESEIPEGFIDRDLRNTQYIAKKALSMLNEICRRVVATTGAITDELREDWQLVDVMKELNWEKYNVLGLVEYFEDNDGRLIGRIKDWTKRNDHRHHAMDALTVAFTKDVFIQYFNNKNASLKPDTNEAAIRNKYFQNGKAIPPMSLDEFRAEAKKHLNDTLISIKTKNKVVTINLNRTKKEKWNKQKAATNSTRAIAFGNCLR

SEQ ID NO: 6601 - protein, 1072 aa, synthetic construct
  REGION 1..1072: note = Synthetic
LDEFEKIWETQSKYHQKLTKELKEEIRDIVIFYQRKLKSQKGLISICEFENREIEINDISTGSIGKNKKKTVGLKVAPKSSPLFQEFKIWQVLNNLKFQNLETKEIFPIDLEFKQSIFDEVNIKGKLSAKDVLDIVGYSGKEWKTNFKDIEGNNTNENLYNAFLKIIANDGKEFPKEFKLTIDDDIKISKISSSAKVIKEFVKEKLSELEINISVLDFNPELDGSAFEKQSSYQFWHLLYSYEGDDSPSGDDKLYELLEKKFGFKKEHSKVLAEIGFSQDYGSLSSKAMRKIYPYIKEHKYSDACNYAGYNHSKNSLTKEQLENRVLKEQLDILPKNSLRNPVVEKILNQMINLVNEVSKEYGRPDEIRIELARELKNNAEERANMTSEISKATLLHQKYVEVLQREFGIRSPSRNDLIRYKLFLELANNGFKDLYTDTKIERENIFTEKYDIDHIIPQSRFFDDSFSNKVLVPRGSNLKKGNFTAFDYLEIEGKEKLEKFLNLIKELYDKGVITKAKYEKLQKRGVDIGDGFIERDLRNTQYIAKKAKEILFEITNSVVSTTGRITDKLREDWNLVNTMKELNLEKYRKLGLTETIINSKGEEKQRIVDWTKRNDHRHHAMDALTVAFTTHNHIQYLNYLNARKDENHKQHQVISNIENLITNVFEKKNGSKQRIFIEPIKNLRIDAKKHLDEILVSHKAKNKVGTKNKNKTKSKNGEKIKVELTPRGQLHKETIYGSSKFLKTKEEKVSGKFDMETINKVQNEMFRNALLGRLQEFGGDFKKAFTGKNIVSKNPIYLNDEKTELLPETVTLAWYETGYTIRKVVNPDNFKDYKNIEKVTDRGVRDILTERLKQFNGNSKEAFSDLEKNPIWLNKSKGITVKTVTITGISNAEALHNKKDHLGNEILDEDGNRIAVDFVSTGNNHHVAIYEDTYGNLQERIVSFYEAVERVNQGLSIIDKDYNQGLGWKFLFTMKQNEMFLFPSEDFNPKEIDLFDDKNLSLISKNLFRVQKFGELSKSGFWFRHHLETSVEVKKELRNYSYLDFYSKDFMKTIVKVRLNHLGRIVQIGEY

SEQ ID NO: 6602 - protein, 1044 aa, synthetic construct
  REGION 1..1044: note = Synthetic
LDEFEAIWEKQATFHPELTSELKKEIRDIIIFYQRPLKSQKGLVGFCEFESRQMAICIDGKQKMKTVGCKVCPQSSPLFQEFKIWHTLNNLRVIEKSSNLSRFLEQEEKETLFMELSVKDKLNKKDALKLLYRNYKDLDLNYEDLEGDCTQSILFKAYQKIIAMTGNGEYDFSKMPSDEIKEKVKVIFDGLGYNTDILFFDSSKEGHTFDKQPMYQLWHLLYSYEGDKSNTGNDSLIRKITELCGFEKEYANIIANITFQSDYGSLSTKAIRKILPYMKEGSCYNQACEFAGYRHSQRSLTKEELDEKEYKDHLDPLPKNSLRNPVVEKILNQMINVVNHVVDTFGKPDEIRIELARELKKSAKERKIMTENINKATIDHDKYRQILQKEFGLVNVSRNDIIRYKLYLELKDNGYKTLYSNTYIPQEKLFSKEFDIEHIIPQAKLFDDSFSNKTIESRKVNIEKSNLTAYDYVLNKYDIEGVRDYEVRIENMYKNGMISKTKRNKLLMKEADIPNDFIERDLRDSQYIAKKAREILEDLVKFVVPTVGSITDRLREDWQLVDVMQELNWDKYDKLALTEIIEDKDGRKIRRIKDWTKRNDHRHHAMDALTIAFTQRRFIEYFNNMNAQNENSGNTIATKHNYMYRDNHGRLRVKPPISINEFRAEAKRHLESVLISIKAKNRVVTPNINRTKAQNGYNKKEQLTPRGQLHNETIYGSIKQYVTKIETVGGGSGAMQIAKVANKKYRDALLARLAVFDNDPKKAFTGKNSLEKNPIYLDELHTQRVPIKIKTVTLETIYTIRKSISPDLKIDKVVDVKIRRLLEERLADYGGDTRKAFSNLEDNPIWLNEEKGISIKRVTITGVNNAEPLHCKKDHKGELILDSEGKKQPVDYVNTGNNHHVAIYRDEKGELQENVVSFYEATARAILGEAIVNKAYNDSEGWSFLFSMKQNEYFVFPNENTGFDPNEIDLLDPDNYALISPNLYRVQKITSKDYVFRHHLETTVENKKELQNITWKRVTSLTNFDKIVKVRINHIGQIVFVGEY

SEQ ID NO: 6603 - protein, 1013 aa, synthetic construct
  REGION 1..1013: note = Synthetic
VGCRVIPRSHPLFQEFKIWQTLNDIEVFAWDKQSKRKKADKSSILFDNSEDALLVEGKRFLYQEEKELLAKELFVKESMKKAEVLKLLFENYQELDLNFKQIDGNHTGFALFSAYSKMIEKYGYEPVDFKKSADEIIEKLETIFTNLGWNTELLSIDLSKEDKELERQSYFRLWHLLYSFEGDNTPTGNGKLLEKIMQLCDVEKEYAVELANVSFQEDYGSLSAKAIKKILPYLKEGNQYDVACDYAGYRHSKSSLTKDEIENKILKDKLEILPKNSLRNPVVEKILNQMVNLINTLIDTYGKSDEIRVELARELKKNAKEREELTKSIARNTREHDEIRQLLRTEFGMMNVSRNDIIRYKLYEELKDNGYKTLYSNEYIPREKIFSKEIDIEHVIPQARLFDDSLSNKTLEYRAINIEKGNKTAYDFVKEKYGNDGLEKFLNRCETLFKDKRTKLRKLKMEEKDIPEGFIDRDLRNTQYISKKAFAMLNEISRRVVATTGSITDKLREDWQLVDLMKELNLPKYEKLGMVEMFEDKDGRKIKKITDWTKRNDHRHHAVDALTVAFTKDVFIQFYNNKNAAWMPASKEHANITGIKARYFENGKALAPMPLAQFRAEAKRHLENLLVSIKAKNKVITSNVNHTKKKNGENRKLQQTPRGQLHLETVYGSHRQYATKIEKVNAAFDAAKIATVSKLAYRNALLKRLEAFGNDPKKAFTGKNTLEKNPFYLDENQTEMVPEKVQTVEFETVYTIRKPIDPNLSIDKVVDVKIRSVLEKRLKEYGGDAKKAFVNLDENPIWLNEAKGISIKRVSIRGISNAQSLHEKKDKDGNLILDKEGRKIPVDFVNTGNNHHVAVYKKPVLDKVGQMVLDEEGNPKYELDEVVVSFFDAVTRVNLDQPIIDKDYRRSEGWQFLFSMKQNEYFVFPNEKTGFNPKEVDLLNPENYAMISPNLFRVQKFTYKNYVFRHHLETTIKDTSSTLKGITWTDFRSSKGLDKIVKVRVDHIGQIVSIGEY

SEQ ID NO: 6604 - protein, 1003 aa, synthetic construct
  REGION 1..1003: note = Synthetic
LVSFCEFESRQIEVNVDGKQKLRTIGCKVCPKSSPLFQEFKIWHTLHSLIVKEKKTNAERFLYQEEKETLFAELNIKETLSKLDALKLLYKNYKDLDLNYDKIEGNRTQAALFKAYQTIISMTGHGEYDFSKMMSDEVMEIVEGVFSGLGYNTDILHFDAENELFDKQPMYMLWHLLYSYEGDKSSTGNKSLIDKIFKLCGFEKEYASIIANIIFQSDYGSLSTKAIRKILPRMKEGNEYSLACEYAGYRHSQRSLTKDELDNKVYKDHLDLLPRNSLRNPVVEKILNQMINVVNFVVDAYGKPDEIRIELARELKKSSKERKEMTMAINKTTADHEKYRQILQKEFGLTNVTRNDIIRYKLYLELKSNGYKTLYSNTYIPQEKLFSKEFDIEHIIPKTKLFDDSFSNKTLESRRVNIEKSNLTAYDYVLGVYDEKGINDYEIRIENLYKSGIISKAKRDKLMMKEVDIPSGFIERDLRDSQYIAKKAREILEELVRFVVPTTGTITDRLREDWQLIDVMQELNWEKYDKLGLTEIVKDKDGRQIRRIKDWTKRNDHRHHAMDALTVAFTKRSYIQYLNNLNAKSDKSGSIYAIEQKELYRDKHGKLRFNPPMPLDVFRAEAKRQLENTLISIKARNKVVTQNVNITKTKKTESGYRKKIQLTPRGQLHNETFYGAIKRYVTKLESVGSGFNVEQIALVANKRYREALLTRLAACGNDPKKAFTGKNSLEKNPLYLDELHTQQVPTKVKTVTLETVYTTRKDISSDLKIEKVIDRKVRSILKERLKKFGGDPKKAFSNLDANPIWLNKEKGISIKRVTITAVSKAEPLHAKRDHFGKYILDANGAKQPVDYVNTGNNHHVAIYRDEKGVLQERVVSFYEATASASVGLPVVDKEYRKSEGWTFLFSMKQNEYFVFPNEKNGFNPNEIDLMDPDNYALISPNLFRVQKIASKDYVFRHHLETTVEDRKELQNITWKRFQSLTNLDKLVKVRVNHIGQIVSVGEY

SEQ ID NO: 6605 - protein, 1003 aa, synthetic construct
  REGION 1..1003: note = Synthetic
MGDPVQIPTGNDLRQKRDIRDIIIFYQRPLKSQKSLVSYCEFEKGRKVCPKSSPVFQDFKIWQMLNNLKVDGEYLDLKSKQLLFKELSIRKELSKTNTLKLLFGKSKGHDMNFRKLEGNRTQAALFLAYSKILSLSGHDEVDFSKSIDEIMDKTASVFSALGINTDILAFDSSKSGKEMENEPLYRLWHLMYSYTEDNSKTGYDSLVSKLQEEFGFTPEYGKILASVTFEDDYGSLSTKAMCRILPYMKEGMEYSAACTEAGYRHSQRSLTKDEIENKEYRDRLDILPKNSLRNPVVEKILNQMINVINGVIDTYGKPDEIRIELARELKKNAAERQGMTEAINRSAKENKEIEEKLKQDFGMSHVSRTSIIRYKLYMELKDNGFKTLYSNTYIPYEDLFSKRFDIEHIIPQSRLFDDSFANKTLESKDINITKGDMTALDFVTDKYGQEGVERYKSTVDMLLDKGAISKTKYHNLLRTQNDIPENFIQRDLRDTQYISRKALEILGDIVKSVVATSGEITARLREDWGLVDVMKELNWDKYDKSGMTEYYNDPDGRTISRIKDWTKRNDHRHHAMDALTVAFTKRSIIQYLNTLNAKDKELQQEIASKGRLLPPMPFDELRCEARKHLDDILVSIKAKNKVATRNTNKTKRKGGFNEKVQLTPRGQLHNETVYGRILQYDCKEEKVGSSFDADKIATVACERFRNALYQRLAQYGGNPKKAFSGSNSLDKNPLFTDILHSKEVPQKVKTVRLIPVYTIRKQIDPTLKIEKVIDSHIRQILSNRLEEYGNDPKKAFSNLDENPIWLNKDKGIQIKRVTISGPTNVYALHDKRNIFGAPIINCDGATIPSDFVSLSNNHHIAIFMDSDGNLQEQPVPFMEAVARVSLGDPVIDKTYKVKDGWKFMFSMKQNEYFVFPNKETGFDPNSIDLLNPVNYPVISKNLFRAQKLSSKYYVFRHHLETNVDEPKDLRDVTWKRIQNVNGLKGIVKVRIDHLGNIVQTGEY

SEQ ID NO: 6606 - protein, 996 aa, synthetic construct
  REGION 1..996: note = Synthetic
MKKILGLDLGTNSIGWAVVNEAENGNENSSIVKIGVRVNPLTVDELSNFEKGKSITTNADRTLKRSMRRNLQRYKLRRLNLIEVLKEHGFINDDTLLSENGNKTTFETYRLRAKAATEEISLQEFARVLLMINKKRGYKSSRKAKSTEEGQLIDGMEVAKRLYEENLTPGQLSLQLLMNGKRHLPDFYRSDLQIEFDKVWSMQMNYYPEFLDDVLREELLGKSGKVTKSLCEKRFGVEGIKPSKGIEWKSKVYQWRCISLSEKLDLEQLAVVLQEINAQINNASGYLGDISDRSKALYFNNMTVGQYQMAQLEKNPNYSLKNQVFYRQDYLNEFEKIWETQAKFHKELTQELKKEVRDIIIFYQRPLKSQKGLISFCEFESRQIEVEIDGKKKTKTIGLRVCPKSSPLFQEFKIWQVLNNIVVSGKVVPNQQTDLFGFEGSYKQGKRFLYQEEKEKLFAELNYKEKLSKSDALKLLFGNQKGLDLNFKELDGNPTQSELFKAYQTIIEMSGHGDYDFSKMPSEKALEIVAEVFDGLGFDTDILRFDSSLEGHAMEQQPMFKLWHLLYSFEGDKSELGNFNLIEKLHDRFGFDIEYATVLAGVVFPDDYASLSSKAIRKILPHLKDGLEYSVACEYAGYRHSKKSLTKEEINNKVLKDRLELLPRNSLRNPVVEKILNQMVNVVNAVIDEYGKPDEIRIELARELKKSAKEREEMTKSINETTRLHEGFVKLLQGEPFFLKHVSRNDIIRYKLYEELKFNGYKTLYSNTYIPREKLFSKEFDIEHIIPQAKLFDDSFSNKTLEVRQVNLDKGNATAYDFVAERYDEQGISEYEKRIESLYNNKVISKTKRDKLLMKETEIPSGFINRDLRDSQYIAKKAREILEDIVRFVVPTTGSITDRLREDWQLVDVMQELNWDKYNQLGLTEIIEGRDGQRIRRIKDWTKRNDHRHHAMDALTIAFTKRSFIQYLNNLNARVQKGVDDYIDLDMVELSRLFMA

SEQ ID NO: 6607 - protein, 970 aa, synthetic construct
  REGION 1..970: note = Synthetic
MKRILGLDLGTTSIGWALVNEAESNNEASSIVRLGVRVNPLTVDEKSNFEKGKAITTNADRQLRHGARINLQRYKLRRQNLHDCLQKQGWLGTEAMYEEGKASTFETYKLRAKAAEEEISLHEFARVLFMLNKKRGYKSNRKANNKEDGQLFDGMTIAKKLYEEHLTPAEYSLQLLNKGKKFTQGYYRSDLNAELERIWDEQKKYYPEILTDEFKQQLEGKTKTNTSKIFLAKYGIYSADLKGLDRKLQPLKWRVEALQQQVDKEVLAFVISDLKGQIANTSGLLGAISDRSKELYFNKQTVGQYLWASLEENPHTSIKNKPFYRQDYLDEFEKIWETQATFHKQLTPELKQEIRDIIIFYQRPLKSKKSLISVCELEQRKVKATIDGKEKEITIGPKVAPKSSPVFQEFRIWQNLNNVLLIDNDTNEKRPLDESERNLLYEELSIKAKLSKTEALKILNKKGKQWDLNYKELEGNRTQAILFDCYNRIITLTGHEECDFKKIKASYIRRHISIIFKNLGFSTEILDFDPSLEKHELEKQPMYQLWHLLYSYESDNSRTGNESLLRKLETTFGFPEEYATVLCDVVFEEDYGNLSVKAMRKILPYLQAGNDYSQACSYAGYNHSRHSLTKEELDQKVYKERLELLPKNSLRNPVVEKILNQMINVINAIIDEYGKPDEIRIEMARELKSSAIERENATRAISQGNAENQRIREILEKEFALSYISRNDIIKYKLYEELKPNGFKTLYSDTYIPKDKLFSKDFDIEHIIPKARLFDDSFSNKTLEARDINLAKSSKTAFDFIKEKYGEEGAEAYKKKLDMLLDNDVISKAKYNKLLMAEADIPSDFINRDLNNTQYIAKKAYEILGELVRTVTPTTIIRKTKRSEKIKRSVPPRKTKRSFFRSPHNAKRLRFLWGVCCLFFITFQTFKSNFTFSSPSSSNLVRSKLFSYMCTFPRFSVMFFSGRSICRAMR

SEQ ID NO: 6608 - protein, 1371 aa, synthetic construct
  REGION 1..1371: note = Synthetic
MKKILGLDLGTTSIGWALVNEAENKSENSEIIKLGVRVNPLSIDEKTNFDKGKPISTNADRTLNRGARRNLQRYKQRRENLFEILLDNKLITKETILTETGNNTTHETLRLRAKAPNERIELDELARVFFSINKKRGYKSSRKAKSEDEGNAIDGMSIAKELYENNITPGQYVYELLLNKKKYIPDFYRSDLQNEFNIIWEYQKQFHSNVLNDEMYKKLEGQGQQNSRKRFLAIHGIYTAENKGKRDAIKLQHYKWRAEAITNQLPIDQVAYVLVEINNNLNKSSGYLGAISDRSKELYFKNETVGENLHRQIKENNHTSLRNQVFYRQDYLDEFEQIWVRQAKYYSELTLELKNEIRDVVIFYQRKLKSQKHLISNCQFEKQHKAVPKSSPLFQEFKIWQNLNNLVFKNTRTKEKCVLDDDLRISLFEELNLRGNLTEKTILKFCNLNSTWKSNFTKGLEGNNTNKALYNIYQHIATEEGYGFDWEKKTTKEIKEELKSIFPRINIDTTILNFETNIEGQTFDKQTNYQLWHLLYSAEDDTKILEEDRLVYGNSNVALKKKLHTKYGFKPEYATMMANVTLQDDYGSLSSRAIRKIIPFLQEGNEYSESCALAGYNHSSSLTKEELEKRILKPRLEILQKNSLRNPVVEKILNQMVNVINQIIDEYGKPDEIRIELARDLKKSAKQREETTKFINSATKVNDDIKSVIQKEFGFTPTKNDVVRYKLWLELKNNGYKSLFTNKYIPKEDIFSKNIDIEHIIPKAILFDDSFSNKTLAYRAVNLKKADRTAIDFIEQDYSNEDINKYRLRVESLYKNGDIKKGKYKKLLMSLANLPTDFIARDLVNTQYISKKAKSMLFEVFQNVVPTSGRITDKLRGDWDLINVMKELNLHKYRSLGLTEIQERKNNVKIEIIKDWTKRNDHRHHAMDALTVAFTTHNHINYINNLNASRNKESHLFSIKNTITKVYEDTTGNKKRNFIQPIENFRTEAKKHIESILISFKNKNKVVTKNINKSKLKGKDNFNAKPQLTPRGQLHKETVYGTSKREMDKPIKLSKKFKIETLKLIVNSNLKTVVTKHLHKYNNKPEIAFDSKTIKKDPILYKGLQLTEVLCFEEIYTIRKVVSPDNFKTEKDLNKIIDKKTQEVLKNRLNEFGGKPKEAFSDLDKNPIWLNKEKGISIKRVTITGVSNAEPLHYKKDHFGSEILDKKGNKQAVDFVSTGNNHHVAIYKDDKGKLQEKVVSFYEAVARVNEGLPIINKEYNTGLGWEFLFTMKQNEMFVFPNDDFNPIEIDLLDEKNEILISKNLFRVQKISTKNYMFNHHLETQVVTSEILKTKKQLSGITYHFIQSTEPLRNIIKLRMNHIGKIVYVGEY

SEQ ID NO: 6609 - protein, 960 aa, synthetic construct
  REGION 1..960: note = Synthetic
MKTILGLDLGTNSIGWALVKETENSNEKSEIIKLGVRVNPLTVDEKTNFEAGRPLSTNADRTAKRSARRNLQRYKLRRKNLIDLLIKHRLIDKDTPLTEIGKNTTHQTLELRAKAARERIELEDLARVFLAINKKRGYRSSRKVNNEEEGQVVDGMAVAKKLYDENLTPGQYAYELLSKGKKYVPDFYRSDLQAEFDSIWEYQKQFYADILDDELYNALKGQGQQNSRKRFLAIKGVYTAENKGKRDEVKLQHYKWRSEAITQKLSIEEVAYVLVEINNDLNKSSGYLGAISDRSKELYFNKETVGENLWKQIQKNPHTSLKNQVFYRQDYLDEFEQIWETQAQFHPQLTLALKEQIRDVVIFYQRKLKSQKGLLSFCQFESWEIERKDENGNVILNKTTQLPKRQTVGRRVAPKSSPLFQEFKIWQNINNLEIAKISDGNSKNKKETEALSDDERKLLFEELNLRGNLSQKEVLQILGLKDKEYKTNFPEGLEGNRTNAALFNIYQQIAENEGYGDWTKKSAQEIKEELKAVFPQIGIQADILDFNAELDGKEFENQASYQLWHLLYSAEEDDKINEEDQIIYGNSAVSLKKKLCEKFGFTPEYAKWIANVSLQDDYGNLSTKAMRKIIPYLIDGNDYSEACALAGYNHSNSLTKEENDNRERLNKLELLPKNSLRNPVVEKILNQMVNVVNQVIETYGKPDEVRIELARELKKSAEERAEMTKGINEATRRNEDIKKLITKNFGIPNPTKNDVVRYRLWEELAPLAYKDVFTGRQIKKEDLFSSKIDIEHIIPKALLFDDSFSNKTLAFRETNLKKADRTAYGFIESDYNATLDDYIQRVETLYNNAKGTISKGKRNKLLMAQKNLPDGFIERDLRNSQYIAKKAKSMIEKVFNDVNVTSGSITDRLREDWDLINVMKELNFPKYKALGLTEIEERYDIGQEKQKSRSNYRLDKTKRP

SEQ ID NO: 6610 - protein, 844 aa, synthetic construct
  REGION 1..844: note = Synthetic
VIFENQASYQLWHLLYSYEGDDSPSGNEKLYELLEKKFGFKKEHSKILAEIGFPQDYGSLSSKAMRKIYPYIKEHKYSTACNYAGYNHSKNSLTKEQLENRVLKDQLEILPKNSLRNPVVEKILNQMINLVNEVSKEYWRPDEIRIELARELKNNAEERANMTSEINKATVQHQKYTEILQREFGIKAPSRNDIIRYKLYLELANNGFKDLYTDVKIERENLFTEKYDIDHIIPQSRFFDDSFSNKVLVPRSANLKKGNFTAFDYLEIEGKEKLEKFLNIIKELYDKGVITKAKYEKLQKKGIEIGDGFIERDLRNTQYIAKKAKEILFGITNSVVSTSGRITDKLREDWNLVNTMKELNLEKYKKLGLTETIINSKGEEKQRIIDWTKRNDHRHHAMDALTVAFTTHNHIQYLNYLNARKDEKHKEHQNIFAIENTITKVIEKKNGSKERKFIEPIKNLRIDAKRHLDEVLISHKAKNKVVTKNINKIKKKGSVVAKTELTPRGQLHKETIYGSSKFLKTKEEKISGKFDLETIHKVQNEKFRNALLGRLQEFGGDPKKAFTGKNVISKNPIFLNDDQTEQLPETVSLAWYEIGYTIRKVVNPDNFKDYKNIEKVTDKRIRDILTERLKAFNGNSKEAFSDLEKNPIWLNKSKGIVVKTVTITGINNAEAIHYRKDHLGKDILDENGKKVAVDFVSTGNNHHVAIYEDADGNLQERVVSFYEAIERVNQGLTIIDKDYNQDLGWKFLFTMKQNEMFLFPSEDFNPKEIDLFDDKNLSLISKNLFRVQKIATKDYFFRHHLETTVEDNSNLKGVAWRREGLNGLKGILKIRLNHLGKIVQVGEY

SEQ ID NO: 6611 - protein, 1446 aa, synthetic construct
  REGION 1..1446: note = Synthetic
MIKHILGLDLGTTSIGFAHVTEGNSPEQSSIKKIGVRIIQYDNFDKVDKSGKVTESKSPKDDFASGRGLSPNAGRTLKRGARRTLDRYQLRRKNLIEVLIKANIISENSILAEDGKQTTFETWHLRAKSVLEKINKEALARVFLAINKKRGYKSSRKAKNEGEGQIIDGMAVAKKIYEENLTPGKLAYQLLKEGKKYLPDFYRSDLQEEFDKVWNFQKQFYPEILTDEFYMELKGKGQRATSAMFWAKYGFNTAENKAKSREEKKLQAYLWRSEAIEKQLEKDKVAFVITEINNNLNNSSGYLGAISDRSKELYFNNQTVGQYLYEQLKENPHTRLKNQVFYRQDYLDEFEKIWEMQAKFHPELTKKLKIEIRDIIIFYQRKLKSQKGLVSFCEFESKEIDIEKNGQTVKRTIGLKVAPKSSPLFQEFKIWQVLNNVLVRKKGSEKRVAKETTVTLFEEEKEIFVFDLEAKQKLFDELNIKGNLKSAKIIEILGYRSSDWELNYSELEGNRTNKILYDAFLKILESEGYDKDLLTLQGKDDIDVSELKAPVSEIKDMIRRIFEVLNINTEILEFDAELEGKDFEKQASYQLWHLLYSYQEDDSKTGNDTLFRLLEEKFGFKKEHSQILANVAFSDDYGNLSSKAMRKIYPHIKEVTYDKACLQAGYRHSAASLTKEEIANRPLKDKLELLKKNSLRNPVVEKILNQLVNVINTIIETNSKKDEEGNITEYFRFDEIRVELSRDLKKNAEERREMTSNINASKIAHEKIFKLLQNEFHIKNPTRNDIIRYRLYEELKGTGYKDLYTNEYIPREILFSKQIDIDHIIPQSKLFDDSFSNKTVVYRKDNLKKGNRTAFDYISEEFGETGIENFKSRIEMLFEQGKKNKEEGISKAKYQKLLKQESEIGDGFIERDLRDSQYIARKSRNLLYDICRTVTPTTGSVTARLREDWDLINIMQELNFEKFKALGLTEMVEKKDGSFKERIVDWSKRNDHRHHAMDALTVAFTKQSHIQYLNFLNARKNEFHKLHNSIIGIENAETEIKTDDDGNKKRVFRLPIPNFRQVAKEHLENILVSHKAKNKVVTKNKNKTKSKNGGKTKVELTPRGQLHKETVYGKYQFYVNKEEKISAKFDKQTIEQVANPIYRKLLLQRLSENDNDPKKAFAGKNVLSKSPIYLNEEKTEVLPETVKLTWLEEDYSFRKDITPENFKDVKTIEKILDEGVKRILQNRLKKFGNDPKKAFSDLEKNPIWLDEAKGISIKRVTISGVKNAEFLHYKKDHFGNEILDKNGKPIPVDFVSTGNNHHVAIYRDEKGSLQERVVSLFDAVQLVNAGEPVIDKNYNQGIGWQFLFTMKQNEYFVFPNEKTGFNPKEVDLLDVKNKKEISPNLFRVQKLATKNYMFRNHLETNVEEQSQLRDVAYISVRSTNPLANIVKVRLNHIGDIVEVGEY

SEQ ID NO: 6612 - protein, 1415 aa, synthetic construct
  REGION 1..1415: note = Synthetic
MTKNILGLDLGVSSIGWAYVQEDDKNSANNKIIKLGVRVNPLTVDEQINFEKGKPITTNAGRTLARGARRNLQRFKLRRANVIDVLTKGNILKDGDLLTEVGKNSTFQTQELRAKSAKEKIELSDFVRVLLLINKKRGYKSSRKAKNEDEGQIIDGMAVAKKLYEESLTPGEYSYQLLIEGKKQLPDFYRSDLQAEFDKVWKFQKQFYSEILIDKLYKELQGKNKNATWAILKEPFSLVGIKQMGTMQEKKIEKYLWRSEAAKKQLDFESLAVVFQEINSNLNNSSGYLGAISDRSKELYFNHQTVGEYLYQQLKANPHTKLKNQVFYRQDYLDEFEKIWETQTQYHSELTKELKEQVRDVVIFYQRKLKSQKGLISICEFENREIEIIENGKTKKKTVGLKVAPKSSPLFQEFKIWQVLNNLQFQNLETKEIFPIDLDFKQSIFDEVNVKGRLSAKEVLDIVGYSGKEWKTNFKDIEGNNTNENLYTAFLKIIANEEKEFPKEFKLTIEDDIKVTKIHSSASKIKEFVKENFSSLGINTSILDFNPEFDGKDFEKQSSYQLWHLLYSYEGDDSASGNEKLYELLEKKFSFKKEHSKILAEIGFSPDYGSLSSKAMRKIITHLKAGFSYGGRKDKPEEPSACEFAGYKSHSKNSLTKEQLANRILKEKLEILPKNSLRNPVVEKILNQMINVVNEVSKEYGRPDEIRIELARELKKNAEERANMTSEIGKATLLHQKYAEILQKEYGIKVPSRNDIIRYKLYLELANNGFKDLYTGQKIEKENIFTDKYDIDHIIPQSRFFDDSFSNKVLVPRGANLKKGNATAFDYLEMEGKDQLEKFLNTIKDLFDKSLISKAKFEKLQKKGSEIGDGFIQRDLRDTQYIAKKAKEILFEITNSVVSTSGRITDKLREDWNLVNTMKELNLDKYKKLGLTETVINSKGEEKERITDWSKRNDHRHHAMDALTVAFTTHNHIQYLNHLNARKDEKHNQHIIISNIENLITKVFEKKKGSSKRKFIEPIHNFRIEAKKHLDEILISHKTKNKVVTKNINKAKKKGGVVSKVVLTPRGQLHKETIYGSSKFLKTKEEKVSVKFDLETINKVQNEKFRIALLERLKEFNGDSKKAFTGKNVLAKNPIYLNDEKTENVPESVILAWYEIGYTIRKAVNPDNFKDYKNLEKVIDNGVKEILKNRLDAFKGNAKEAFSDLEKNPIWLNESKGIAIKTVTITGISNVQSLHNQKDHLGKDILDENGNKLPVDFVSTGNNHHLAVYINENLELDDNVVSLYEAVERVNQGIDIVDKSYKSNDGYHFLFSLKQNEMFLFPSEDFNPKEVDLFDDKNLSLISKNMFRVQKISKVGYGNSFVRDFVFRHHLETSVEEKKELRNITYVQLKSLEGLRNVVKVRLNHIGKIVQVNEY

SEQ ID NO: 6613 - protein, 1393 aa, synthetic construct
  REGION 1..1393: note = Synthetic
MKKILGLDLGTTSIGWAFVKEAEDGDNEPSSIVKIGVRVNPLTTDEQKDFEKGKSVSVNADRTLKRGARRNLQRYKQRRGNLIEVLKQNNLINTDSILAENDKDTTHFTYAIRAKAAAEGITKEEFARILLMINKKRGYKSSRKATKEDEGQAIDGMAVAKQLYEDNLTPGQLSYQFLKEGKKHLPDFYRSDLQAELSRVWDYQEKFYPNILTAEFKKELEGKGQRATSAIFWNKYKFNTAENKGTRDEKKLKAYEWRSKAINSQLAIEEVAFVITEINNNINNSSGYLGAISDRSKELYFNKQTIGQYLFNQLQNNPHTRMKNQVFYRQDYFDEFETIWETQAKYHAELTLVLKEEIRDIIIFYQRKLKSQKGLVSFCEFESKKVEYEIDGKTVIKTIGARVIPKSSPLFQEFKIWQNLNNIELKNKKDKSRILIKDFDLDIKEQLFNELNIKGNLTKAKILPILVDKPNDWELNYMVIEGNRTHQALYESYFKMMEYESHDDIDLEKLTAAEMKSAVLSFFETQHIDRTILDFNAELDGNHFEKQPAYQFWHLLYAYEGDNSNTGNDKLYELLKSKFGFKKEYASILANIKIQDDYGSLSAKAIKKIFPFIKENNYSDACALAGYNHSSSLTKEENDKRPLKGELKILPKNSLRNPVVEKILNQMVNVINAIIKDPPLGKPDEIRIELARELKKNAKEREEDTKRINEAKSNHDKIREILIREDKIPNPTRNDIIRYKLYQELKFNAYKDLYTNEYIARQDLFTKKYDIDHIIPQASLFDDSFSNKTLAPREANYTKGNRTAYDYIDKDRGAESLTDYLERVEMLYQVNYKSKDEGISKAKYKKLLLKGSEIGEGFIQRDLRDTQYIAKKAKEMLHEVCRTVVATTGSITDKLRDDWGLVNVMQELNMDKYRKLGLTEMIEKKDGGFKERIVDWTKRNDHRHHAMDALTIAFTKHEHIQYLNNLNAKTKEDKKGKEIYAIEQKITEKFDKDKRRFKSPLDNFREEAKNHLESVLISCKAKNKVVTKNKNKTKSSKGEKSQPTLTPRGQLHKETVYGKIKQYVIKEEKVSGKFDEETIFKVSKPQYSSALLKRLHENNNDPVKAFTGKNSLAKNPIYLDDQKTVQVPEKVKLVWLDDDFTIRKDISPDLKIDKVIDIGIQNILYKRLEQFGGKEKEAFSNLDKDPIWLNKDKGIAIKRVTISGVKNAEPLHYKKDHHGKEILDDNGKPTPVDFISTGNNHHVAIYRDENGDLQDEVISLHKVITERVNQGLPVVDKTYNQHLGWRFLFTMKQNEYFIFPSYNFDPSEVGLLDPANNKLISPHLFRVQKFSKVTYGNSSVRDYVFRHHFETSVEDKKELKDITYKSIKSLPYFENIIKVRINHIGQIVKVGEY

SEQ ID NO: 6614 - protein, 1396 aa, synthetic construct
  REGION 1..1396: note = Synthetic
MSKTILGLDLGTNSIGWALVEEAENIDESSKIIKLGVRVNPLTVDEQTNFERGKPISTNADRTLKRGARRNLQRYKSRRENLIEILVKNGIITKNTPLTEIGKNTTHQTLMLRAKAAHNKVDLVDFAKVLLTINKKRGYKSSRKSKSSDEGVAIDGMTVAKILYEKNLTPGQYVYETLNGGNKFIPDFYRSDLRIEISKIWDKQTEFYPTQLTNDLFHAIEDRNKGQTYKILEVPWNLKGLKQSGKRDEQKLERYKWRQQALSEKIELEKLVIVLQEINGELNNSSGYLGAISDRSKRLYFNKITVGEHLYNQIERNPHTSLKNQVFYRQDYLDEFEQVWETQAKHYPEILTIELKEEIRDVVIFYQRKLKSQKGLISFCQFESKQEEYIDKTTGKTKFRTTGQRVAPKSSPVFQEFKIWQNLNNLTFENEKDNQIIEVRNLEDNIREEIFNELNFKGSLAPKNVLKVISKHIFINKASDWTCNIEKIEGNTTNKALLEVYQKIAEAEGYGFDWDKKSAKDINEEIEAIFGEIGVNKEILKFDSNRDDFDKQPSYQLWHLLYSAEDGGKVNEEDRLLYGNNDTKLRKTLHTKYGFKPEYATMLSNITMQPDYGNLSSRAMRKITPYLQAGHPYAKSSDNKDEAGACDLAGYNHSKSETVEDLKNKILKDKLEILPKNSLRNPVVEKILNQMVNLVNQVIDEFGKPDEVRIELARELKKTADERERMSKDIAEATKRNEEIKNLIIKEFGIPNPTKGDIVRFRLWDELSSRGHKTIFTELYIPKEKLFSKDIEIEHIIPQALLFDDSYSNKTLAYHSENLQKRNRTAYDFINQDYNQYTTEFENRVDVWYNNKSISKAKRNKLLMTYADIPDGFIERDLRNTQYIAKKAREMLLEAFKTVIPTTGSITEKLREDWGLINLMKELNLPKYKALGLTETEERFDIGSEKIKKVEVIKDWTKRNDHRHHAVDALTVAFTTHNHIQYINNLNARRNTNHKKHNIIHAIENVITERINGKPIFKEPIPNMRDVARKEIESILVSFKAKNKVTTNNINETKLAGKQRYKKTLQTTPRGQLHKETVYGKSLRPLDKPVKLNNKFNMDVANFIINKKERDAVILHLSKYGNNCEVAFASKTLKNNPILLNGETLKEVRCFEEIFTIRKPIAPDLKLDKVIDEGVRNVLEERLNEFNSNPKEAFSNLEENPIWLNKEKGISIKNVTITGVNNATPLHYKKDHHGKEVVNCKGEKSHCDFVQTRNNHHVAIYKDNDGNFQESVISFYEAVERANQGLPIIDKLFNNHLGWEFLFTMKQNEMFIFPADDFEPSEIDLLNPENAGVISKNLFRVQKISTNYYTFRHHLETTVTNDLNFTFKRIQTPNSLKGIIKVRINHIGKIVHIGEF

SEQ ID NO: 6615 - protein, 1394 aa, synthetic construct
  REGION 1..1394: note = Synthetic
MKRILGLDLGTASIGWAVVNQATTDEEQSSIIKAGVRVNPLTVDEKNNFETGKSITTNADRTLKRSMRRNLQRYKLRRNALLDILRKNGFITNDTILSENGNHSTFETYSLRAKAATDEVTLEEFARILLMINKKRGYKSSRKAKNEEEGSLIDGMAIAKSLYEEGITPGQFTLRLLETGKRYVPSFYRSDLIAELDKIWNFQKQFYPEVLTDKCRHDIADKSKTATSKYFYAAYQITTASVKDKNLRLIASYSWRVNALSEKLNLDQLAAAICDVNGAISSSSGYLGSISDRSKELFFNKQTIGQYLYDNIQKDPHYRIKNNVFYRQDYLDEFETIWDTQATYHRELTPELKSDIRDVVIFYQRRLKSQKSLISLCEFEQRKIKVTEGDKVREKMVGLRVAPKSSPLFQEFRIWQAINNITICHNDDPRPLTNDERQLLHDELSICDKISSAQILKLFGLKNQKDDEYSLNYKEIKGNTTQARLFDAFAEVYEMTGHDAESLKKLRSASERIDTLKRVFEGLGYKTDYLTPPSYTDTESMQKSALYRLWHLLYSYVDDKSTTGNEKLIAHIQEITGFERKEYAEVIAKIMFEQDYGSLSSKAMLKILPFLQQGQIYSDACQSAGYRHSAASLTKEEIASRPLKGNLEILPKGALRNPVVEKILNQMINVVNELNAQYGKIDEATGNHYFDEIHIELARELKKSADERKNATEAISKATNEMEKIRKKVSELTGSDHVSRNDIIRYRLYKELAVNEYKTLYSNTYIPEEKIFSGDFDIEHIIPQAKLFDDSFSNKTLETRDINREKSNLTAYDFVLNKYGKEYAEQYLTKVKKHFDKPGSKTKYRNLIAREADIPSDFINRDLRDSQYIAKKAKEMLYDITRVVVSTTGSITDRLRDDWQLVDALKELNWDKYSQLGLTEIFTNHSGQQVRRIKDWTKRNDHRHHAMDAITIAFTKPSHIQYLNNLNARSDKAGTIYAIEQKELHRDEKDNHLRFNPPFEGIRHEALRQLDNILVSIKAKNKVATINTNITKKKGGTNKTTQLTPRGQLHNETVYGKRLVAVVKTEKVGSTFNAEKIATVCSPTYREALLARLEAFGGDAKKAFTGTNSLAKKPLYFNEQHTECVPEQVKTKTFDEIFTIRKPITPELKLDKVVDDGVKRILKARLDEYGGDAKKAFVNLDKNPIWLNEAKGISIKSVAIKGVNVATPLHEKRDNNGFAILTEDGKNIPTDYVSTSNNHHVAIFIDADGNYQEHIVSLFEAAASKSLGLPVIDKNYNSDKGWNFLFTLKQNEYFVFPEYALDENGKPTDVMTFNPTEIDLIDPNIYSLVSKHLYRVQKFSTKDYVFRHHLETQVVDNSTLRGTTWKRITALNNLKKVVKVRVNNVGQIVAIGEY

SEQ ID NO: 6616 - protein, 1420 aa, synthetic construct
  REGION 1..1420: note = Synthetic
MYDFFLGKANLFYFFYYICGKIKTHINMKRILGLDLGTTSIGWALVNEGENDNEKSSIVKLGVRVNPLSSDEKNEFETGKALTTNAERTNKHGMRINLQRYKQRRANLVRCLKENGIIDDETLLFEHGNSSTFQTYRARAKAVDEEISLADFSRVLLMINKKRGYKSNRKAKDTDDGELIDGMTVAKELHSKGLTPGQFLMMRQKEGKKFRQEFYRSDLQNELDMIWDNQKTFYPDVLTDDMKSEIAGMNAKQCSAIFYNRKNVVTAKNNGKDSYETKLQWRCECLTGKRDIEQVAYVISSLCGEISNSSGRLAMISDRSKDLYFNNQTIGQYLMTLIDGNPNVSLKNITFYRQDYIDEFNAIWQCQSKYHKELTPALKDEIEKHIIFYQRDLKSCKSLVNHCEFEQSEKEIAVDGKKRKITIGLRACPKSSPLFQTFRTWQKLNDIMVSTSYGKHKSSAMNSVPDLFNDLKTWKPERFLKQEEKEKLFEELSVKGKLTKNEALCILFGKANGLEMNFREVEGNQTMAAIYGACRDIISQSGNGEYDFRKMSAAEIKSTVNEIFGRLGYDTSFLDFDPLSEGKALERQSSYRLWHLLYSYAGDKSVTGNDALLERIGELCGLDRESAGIMAKVSFAEDYGKLSAKAMRKILRYMMKGMGYSAACEEAGYKHSPRSLTKEELKAKVYAGKMDVIKRNSLRNPVVEKILNQMVNVVNGIIDTYGKPDEIRIEMARELKQSREDRAEKDKAIRDATKEQNIIRKTLEEDFHIANVTKNDILRYRLYEELKMNGYKTLYSCTYIPIEELFSKKFEIEHIIPKARLFDDSFSNKTLETSGVNKDKGDMTAYDFVAMKHDEKYLADYEARVNELFKQKKISKAKRDKLLMREADIPKDFLNRDLNDTQYIAKTAREMLEDIVPEVLTTTGKITSRLREDWGLVDVMKEINWDKFDKLKMTVTEHDRDGRPIKRIMDWTKRNDHRHHAMDALTIAFTKRAIIQYLNNVNARSDKGSSIYGIEKKYMKRNERGKLVFVPPMPSGKLREEARRQLDMILVSVKAKNKVVTKNINKTKKNGGVNKKEQLTPRGKLHNETVYGKIARYQTEMKRVGGSFTEDVVLSVADKRIREALYERLAEHDFNPKEAFTGSNSLTKKPLWLDKEHSRCVPEKVKTVILEPICTIRKPVDKDLNIDKVVDARVKEILKQRLKEYGGVAAKAFSNLEENPIWLNREKGIAIKRVKILDSKNNVAIHGKHDIAGRPMLDEDGKPVGNDYVNTSNNHHVAIFTDSEGNLQEHVVSFYEATAMAILGYPVVDRQYNKGLGWKFLFSMKQNEYFVFPNEAEGFDPNEIDLTDESNAAIISRNLFRVQKFSKGDYFFRHHLETNVETNLKLKNVTWKRITRLNDLIGVVKVRVDHIGRIVYVGEY

SEQ ID NO: 6617 - protein, 1368 aa, synthetic construct
  REGION 1..1368: note = Synthetic
MKKVLGLDLGTSSIGWAVVNQAENTDEKSSIVKLGVRVNPLTVDEKGNFEKGKSITTTADRTLKRGMRRNLQRYKQRRDKLKDLLINNNIISKTTKLSEDGMGSTYQTLELRAKAAKEEISLEELGRVLLIINKKRGYKSNRKASNEEEGELIDGMAVARELYRKGITPGEYVYELLKSQKRYKPSFYRSDLQAELETVWNKQAEYYPTLLDSETRRKIEGKGKTDTRKLFYAAHNISAAEEKDRKLRQITYYQWRALAAKSRIEPEQLVTVLSEINGDIAASSGYLGAIGDHSKELEINHLTVGEYLFNIIKENPHNSLKNIVFYRNDYIHEFNTIWETQSRFHKELTPELKEKIANETIFFQRRLKSQKGLISFCELEGKEITVGGKKVMTGSRVCPKSSPLFQEFKIWQDLNNLLLEDKTTRNGDKILLTIKQKQRLYKELYCTKELSAKDAIKVLGLNDKEYGLNFKKLQGNITQVTLFNAYKSIVEMTGHDVEKFDKMDAENKLHLVTAVLEMLGARTDFLTFDPGKNADEMQQNAMFKLWHLLYSYEDDNTPTGNGKLVDHIAELTELPHEYASLLARVTFVQDFGSLSTKAMMKILPYMKNEGMIYSDACQAAGYNHSKQSLTKEEKELRELEKHLEVLPKNSLRNPVVEKILNQMIHVVNGCIDEFGDFDEIHIEMARELKQSQKQREATTKHINDKNREVEKIKQILKESPFNIPNPSRNDVLRYQLYEELAPNGFKTLYSNTYISKEKLFSREFDIEHIIPQAKVFDDSYSNKTLESRQVNIEKSSMTAIDYVKMKGGDAAVEDYLKRIEFLKKDGTRKKYDNLTTTEDKIKNDFLNRDLSDSQYIARKAKELLLKVSRDVIATTGSITARLREDWQLVDVMKELNWEKYDKLGMTTVERNRDGHEVRRITGWTKRNDHRHHAMDALTIAFTRHSHIQYLNNLNAKDDGEKKDSNIYGIEKKELLQNRRFVPPIPLDEFRAQALNSLENILVSMKAKNKVVTKNVNKPKGAKPQNTLTPRGQLHNETVYGQRHRYSTREEKVGASFTAEKINSVCRKAYRDALMRRLQENGGDPKKAFTGKNSLSKNPLYVDEHHMVKVPERVKTVVLETYYTIRKPINKDLKIDKVVDEGIKRILQARLAEMGDATKAFSNLDENPIWLNKEKGIAIKSVTIKGVNVATPLRPKRDKNGDIIVGDDGNIILTNFVSTSNNHHIAIFEDSDGNLQEHVVSLYEATARKNRDLPVVDRDYNKELGWKFLFTMKQNEYFVFPDEETGFDPSDMDLTNPVNFSLISPHLFRVQKLSTCNYVFRHHLETNVEEEKVLRNTTWKRIQTTNYLRGIVKVRVNHIGQIVKVGEYL

SEQ ID NO: 6618 - protein, 1369 aa, synthetic construct
  REGION 1..1369: note = Synthetic
MKTILGLDLGTTSIGWALVKEAENDTETSEIIKLGVRVNPLSVDELTDFEKGRPLSTNADRTLTRGARRNLQRFKLRRSNLIQILKENHFINEQSVLTEIGKHTTHETLSFRAKGAKEKISLEAFAKVLLSINKKRGYKSSRKAKNEEEGSLIDGMSIAKELYDNNMTPGQFVYHLLKNDKKFIPDFYRSDLESEFLLIWNHQKNYYPELLEDSLFEQLKDKNKTQTWAICKAPFELVGILQKGKVQEKKVERYKWRDEALTKQVDLETLAIVLQEVNNNINGSSGYLGAISDRSKELYFNKETVGENLYYQLVVNKHTSLKNQVFYRQDYLDEFEQLWETQAKHHPVLTTKLKEEIRDVVIFYQRKLKSQKHLISNCQFEKHHKAIPKSSPLFQEFKIWQVLNNLEFTHKKTKEKTTLAEELRQDLFDEVNIKGGLNLTGLYKFIGINAKEYSCNYKEGIEGNRTNEALYEVYHKIAEEEGYGFEWSKKTGAAIKTELTAIFKTAGIDASILDFDPTLNGTEYEAQASFKLWHLLYSAEDDEKISKEDQLIYGNSNVRLKKNLCKKFGFKPAYAALLSGVTLQPDYGSLSSRAIKKIIPFLVDGHDFYEAAALAKYNHSNAKTAEEQAERFLKDKLDLLKKNSLRNPVVEKIINQMVNVINLIIDTYGKPDEIRIELARELKKSAKQRGEMTTSINKATTKNIELKKIITKDFGIPNPTKNDLIRYKLWLELEANGFKTVFTNKYIPKEELFSKNIDIEHIIPKAILFDDSFSNKTLAYRSVNLKKADRTAMDFISDDYNADKDDYIKRVESLYNNGKGAFSKGKYKKLLMPKSDLPDGFIERDLRNSQYIAKKAKMMLEEVVRTVVSSSGTITSKLREDWDLINVMKELNFPKYKALGLTEIQIRKDNKKVEVIKDWTKRNDHRHHAMDALSVAFTTHNHIQYLNNLNAARTKESRLFQIKNKITSNNQHGKRVFIAPMPNFRQEAKKHLESVLISFKAKNKVVTKNKNKIKGQDTPKIQLTPRGQLHKETVYAKQLVIINKEEKVSGKFDLKKIAQVTKPLYKDALFMRLAAHNNDPKKAFTGKNSLEKTPLYLNDAQTKYVPEKVKLQFTEELFTIRKPITHELKIEKVTDAGIRKKLSQRLKEYNNNKKEAFSNLDKNPIWLDKKNNIAIKRVTITGVSNTEALHTKKDHLGNPILKNGKEIPVDFVSTGNNHHVAIYKDSKGKLQEKAVSFYEAVARVNTELPIIDYDYNEQIGWTFMFTMKQNEMFVFPSNGFNPSENDLLDEKNTALISEHLFRVQKIASKDYSFRHHLETTVENNNVLKSLNWKREGLNGLTGIIKVRTNHIGKIVAIGEEIQQEKRVLN

SEQ ID NO: 6619 - protein, 1373 aa, synthetic construct
  REGION 1..1373: note = Synthetic
MNMKCITKAAEMRKTVDIIVIFVRRILGWNERDRKICDYICYFTILSYMKKILGLDLGTSSIGWALVNEAENDEESSSIVLLGVRIINYDNFVSTKTGKESKEPEKDFAGGKGISPNAGRTLKRSMRRNLQRYKLRRENLIEILKEYKFISNESILSENGNRTTFETYRLRAKAAKEEISLEQFARVLLMINKKRGYKSSRKAKNTEEGTLIDGIEIAEELYDRNLTPGEYCLELLRKNTKALLPDFYRSDLQTEFNRIWEKQKEFYPDILIVQLKENLQGKNEKQTWAICREPFGIVGAKRNGDKGEQEKENYEWRAKALNEKIDLEYLAIVLQKINSQINGSSGYLGKISDRSKELYFNKQTVGQYLMAILDKNSNTSLRNMIFYRQDYLDEFETLWSKQAEFHIELTETLKKEIRDVVIFYQRKLKSQKNLISFCEFENRKIEVEIDGKKKIKIIGNRVIPRSSPLFQEFKIWQILNNIEVTDKNSGEITLLSKEEKEKLFAELQKAESLSTKKALEILFEKRAKNYSIENYKEKIEGNKTRAKICEILNKTLADEKLNELWHLLYSWESENSNLAEKLEKKYVYPSDIAKKLSNITFLDDYGNLSARAIKKILPHLKNGKQYNEACELAGYAFSKSSLTKEQIENKILKNRLEILPKNSLRNPVVEKILNQMVNVINSIIDIYGKPDEIRIELARELKKGAKEREEMAASIAYATKENERIKKLLQSAPFNIANTSKNDIIRYKLYEELASNSYRTLYSNTYIPQESLFTKDFDIEHIIPQSRLFDDSFSNKTLEKRQENIEKGNSTAYDWMAKKGEKELADYEIKIKNLFDQEKISRAKYNNLKRREKDIPDDFIDRDIRDTQYIAKKAREMLQELVRVVVPTTGSVTAHLREDWQLVNVMQELNFPKYERLGLVEEIENKDGQKIKRIKEWTKRNDHRHHAMDALTVAFTKYAHIQFFNHINSHYDSTSEIYGIKQKYFTNDNKALPPIPLKNFRVEAKKQLEKILVSIKAKNKVVTTNINKVNNQKTLTPRGQLHNETIYGSQKQNVVKEEAINAKFNEAKILTVTKLAYREALLKRLRENENDPKKAFTGKNSLAKNPIYLDNMHTKQMPEKVKTVTFEIVYTIRKPIDKDLNVEKVVDVKVREILKDRLNKYNNDPKEAFVNIKENPIWLNEKKRISIKYVTIFGVSNVEALHDKHDKDGNKQPVGFVSTSNNHHVAIYRDEDGNLQENVVSFYDTVKRANAGLPVIDKEYKQSEGWQFLFTMKQNEYFVFSNEKTGFDPKKVDLMNPENYHLISPNLFRVQKIASKNYMFRHHLETKVSFETKEMEKQLRGIAWELYQSTEKLKYIVKIRVNHIGQIIQVGEY

SEQ ID NO: 6620 - protein, 1460 aa, synthetic construct
  REGION 1..1460: note = Synthetic
MKRILGLDLGTTSIGFAYIKEGENEKELSSIEKIGVRVNPLTTDEQTNFEKGKPLTTNADRTLKRGARRNLDRYQLRREDLIEILKKASLISDDSILTENGKNTTFETWRLRAKAVNEKIEKHEFARVLLAINKKRGYKSSRKTKNEEDGQAVDGMGIAKLLYEENLTPGQLSFQILQNGKTLLPDFYRSDLQAEFNKVWNFQKQFYSEIFTDEFYKELQGKGQRATSALFWITCKFNIAEIKDLEDSLKTEKTIKFNKRQQKKLQAYKWRSDAISKQLPKEEVAYVLTEINNDLNKSSGYLGAISDRSKKLYFNKETVGQHLYRQLQKNQHTRLKNQVFYRQDYLDEFEIIWETQAKFHSELTKELKEEIRDIVIFYQRKLKSQKGLISFCEFESREIVKNGREKTVGLRVASKSSSMFQEFKIWQILSNLEFRNKTTKEKLSLDLEAKEILFEELNLKGNLSASKIIELLGCESKDWELNYKTIEGNRTNKSLYEAYLKILEIEGYDVKDLLKVKSNKDELELDDLNVPATKIKNMVNKIFDTLEISTEILDFDADLDGKDFEKQASYQLWHLLYSAEDDSKKYSEDDILTYGNDNIGLKKQLCAKFGFKPEHAKILVNVDFQDDYGNLSSKAMRKIYPYIKEHQYSDACEQAGYRHSKYSLSKEELKKRELKPHLELLKKNSLRNPVVEKILNQMVNVVNTLIDNEKKKDPNFKFDEIRIELARELKKNAKERAEMTTNINAAKMRHEKIVKRLQSEFGVANPTRNDIIRYKLYEELKNNGYKDLYTNTYIPREKLFTKEIDIEHIIPQSKAFDDSFSNKTICYREENLKKGNRTAIDYIQSEYGGEKLEEYLNRITALNKNWGKDKQEEGISKAKFQKLQKRESEIGEGFAERDLRDSQYIAKKAKSMLFEITPSVVSTSGSITDRLREDWDLINVMKELNLPKYRMLGLAEIQERKFGKQVEVITDWTKRNDHRHHAMDALAVAFTKRNHIQYLNYLNARKNENHKLHANIIAIEKKETELVENGNGSKKRLFKKPLPNFRQVAKEHLENVLVSHKAKNKVVTKNKNKTKSKKGEKVKIELTPRGQLHKETVYGKYHYYNSKEEKVGTKFNKETIAQVSNPLYRKLLLQRLEENNNDPKKAFGGKNALVKNLIYLDKIKTEVLPEKVKLVWLEEDFSIRKDITPENFKDLKTIEKVLDDGVKRVLKKRLSDFGNDPKKAFSDLGKNPIWLNEEKGISIKRVTISGVKNAEHLHYKKDHLGNFILDDDGHKIPVGYVSTGNNHHIAIYRDENGELLDYVVSFSDAVKRKSYGLPIVPKDTNKLWDKVFQLGIDNQSILATLPRQGLQLEFSMKQNECFVFPNEAMDFNPKEVDLHNPNYKKLISPNLFIVQTISKVMYGNNAVRDYVFRHHLDTTKDKSSALKGVSHQIIKSLSHLHGIVKVRINHLGDIVSVGEY

SEQ ID NO: 6621 - protein, 1393 aa, synthetic construct
  REGION 1..1393: note = Synthetic
MKKILGLDLGTTSIGWAFVTEAENEKEKSSIIKLGVRVNPLTVDEQTNFEKGKAITTNADRTLKRTVRRNLQRYKLRRENLISLLKKEGFITEDSVLCEKGNNTTFETRRLRAKAVTEEISLEELARVLIMLNKKRGYKSSRKANSGEEGNLIDGMTVARKLYDEHLTPGQYTYQLLCKGKKYIPDFYPSDLIAEFEAVWNCQKQFYTDMLTDELREALRDKNEKQTWAICAAPLGLKGIKRNGTVADQRVENYRWRTEALTKQLPLEQVVIVLQKINSQIRGTSGYLGAISDRSKELYFNHLTVGQFQMKQLSENPNISLKNQVFYRQDYLDEFERIWEKQAKFHKELTEELKHELRDIIIFYQRPLKSQKSLISYCEFESSQKEVVVDGKKKTITIGLRVCPKSSPLFQCFKIWQSINNLQITGNVIPKQQLDLFGDTTEFDHGTRILTEEEKLDLYRELSIKESLSEAEIIKLLFGGKKGLSLNFHKVEGNRTMATFIKACHTILVINGYNDYDFSKISYDKTIAIITQVFDALGFKSGFLNFNPTLEGKGYERQDTYRLWHLLYSYSDDNSATGNEKLVERIGNLLNMDKESAAAFASITYESDYGSLSSKAMRRILPHMMDGLEYSVACEYAGYRHSRRSLTKEEIMSKPLVNTIPLLPRNSLRNPVVEKILNQMINVVNAVSESYGKPDEIRIEMARELKKSATEREQMTRDIARANIENDKYRKVLQEKFNIQNVSRNDIIRYRLYLELEANGFKTLYTQTYIPREKLFSKEFDIEHIIPQARLFDDSFSNKTLEARSANIEKGSTTAYDYVLAKYGEHGSNGAIAYKERIDHLYKDGKISKTKHDKLLMTTDDIPDGFINRDLRDTQYIARKAREILESTVRVVVPTTGSVTDRLREDWQLVDVMKELNWDKYDQLGLTEIVKDHDGRQIRRIKDWTKRNDHRHHAMDALTIAFTRHSYIQYLNNLNARSDKGGSIYAIEKKELYRDKNNKLRFIPPMPLGEFRVEARRHLENVLISIKAKNKVVTRNVNITRGSDGKTHRTVQLTPRGQLHNETVYGHRCQCIVKEEKVCSAFNMEKINTVSNPQFREALLRRYAEFGDAKKAFTGKNSLDKNPIYLNDDHTKQVPKKVKTVTFEEVFTIRKPIDKDLNIDKVVDAHIREILQQRLSEYGDDAKKAFANLDENPIWLNRERGIAIKRVTIYGVSNAIALHDRRDMQGNKILKSNGTPTPADYVSTSNNHHVAIFLDEKGNLQEHVVSFFEATERSRQHLPIVDREYNKHLEWKFLFTMKRNEYFVFPNEKTGFNPNEIDLLDPNNAAEISKNLFRVQKLATKNYFFRHHLETNVDTPKELSGITYKSQLGLKGIVGIVKVRINHLGQIVAVGEY

SEQ ID NO: 6622 - protein, 1376 aa, synthetic construct
  REGION 1..1376: note = Synthetic
MKRILGLDLGTTSIGWAFVNEAENDKESSSIIKTGVRVIPLSADEQQDFKKGNNITINADRTLKRSMRRNLQRYKQRRIAVIEELVKIGFISKEDSLAEGGKNTTHNTYKTRAIAPTEKISKKDFAKVLLMINKKRGYKSSRKANNQEEGQLIDGMAIAKQLHIKKLTPGQFSLQLLEGGKKTLPIYYKSDLQKEFDTIWDFQKQFYPEQLTTAHKEGLIGLGQRASGTYFEKTIGTPRAENKGKEKKLQEYQWRRKAITKQLDLTEVAFILTELNNQINQSNGYLGAISDRSKELYFNNLTVGQYLYEQLKKNPLASLKNQVFYRQDYMDEFDAIWNEQSKHYPELTEETRKQLRNISIFYQRRLKSQKGLINICELEGKEREVTIDGEKKKKIIGPRVAPKSSLVFQQAKVWQNINAIIITNNKTNKKRTLDQEIKELLFEQLNITNSLSDKEVLKFLASVSDIKIKDWSINFEKIEGNRTLAALYKVFEKIVEIEGYPEFFKDKNGGEIRESLEKCFCESGINTGILKLEFQSTGNEFAKQPAYQLWHLLYSYEDDNSPTGIESLIVKLQEKFGFKIAHAQILANITFQEDYGSLSVRALRKIYPYLEEGKMYDEACMLAGYNHSNSLTTIENEKRPLLEAIKILKKNSLRNPVVEKILNQMIHVVNTIIAHPEMGRPDEIRVELARELKKTAKQRNDLTKQIGAATKKHEEIRDYLKKEIGLKYVSRKDLIKYKLYQELASIGHKTLYSGTYVELKDLFFSNKFDVEHIIPQSVMFDDSFSNKTIELRKVNLEKGNETAYDYCERKGWLKSFDSSVQEVFKAKGIKYGKLKKLLMKKEEIPKDFLNRDLGNTAFISKKANEILKQVTRRVQPTSGNITAKLRSDWELINVLKELNWDKYKAVGLTYYDYNKQDKALPRIKDWTKRNDHRHHAMDAITVAFTKPAFVQYLNNMNAESNKGIIIQKIKDKFTYRDKKDGRKFIKPYDTIREDAKKHLSEIFISHKAKNKVVTRNKNKIKIKGKNNYKIQKVLTPRGQLHKETIYGKSKYYVVKEEKINGSFNKEKISTITNLIFRNAVLERLLVNENDPKKAFTGKNALTKNPIFTEGSENSVPLVVKTQVLKSQYTIRKEISSDLKIDKVVDQGIKKILQIRLKAFGGKPKLAFANLEENPIWLNKEKGISIKRVTITGVSNAESLHDAGDLNGNKLENKYGALIPKDFVSTGNNHHVAIYRDEKGNLQEEVVSFYEAVIRKNIGESIIKMNHEKGWKLEFTLKQNEMFLFPKDDFIPNEIDLFAPENRKIINQNLFRVQKISTKDYVFNHHLETMAVSADDFKNKKMLSNLTYKRYRSEKSLEGIVKVRLNHLGEIVQLGEY

SEQ ID NO: 6623 - protein, 1404 aa, synthetic construct
  REGION 1..1404: note = Synthetic
MSKKILGLDLGTTSIGWAFVREAEDFQEESSIERIGVRVNPLTTDEQINFEKGKPISVNADRTLKRGARRNLQRYKQRRTNLIQLLKQYKIINENTILAEDDKNTTHSTYALRAKAVSEKISKEAFARVLLMINKKRGYKSSRKAKNEDEGQAIDGMSVAKRLYEEDITPGQLCLQLLKEGKKKLPDFYLSDLQAELEKIWNFQKKFYPEILTDEFKKEIEGKGQRATSASFWAKYKFNTAENKGSRDEKKMQAWEWRSKAINTQLTREEVAYVITEINNNINNSSGYLGAISDRSKELYFNKETVGEYLFRQLRYSPHTRVKNQVFYRQDYLDEFETIWENQSRYHNELTNELKSEIRDVVIFYQRKLKSQKGLISFCEFESKQIEIQKDGKIVKKIIGLKVSPKSSPLFQEFKIWQILQNLEFTNKETKEKKVPDFEAKNLLFEELNIKGNLKGEKAIEILGYKPKEWLVNYKELDGNRTNQVLYEGYLKILEVEGYDIKDLLKIKSNKDEVNLSELSKPVSEIKDLIKSIFESLNINTAILDFNPELEGKDFERQASYQLWHLLYSYEGDNSNTGNDELYRLLYQKFGFGKEHAQILANLSFSQDYGSLSAKAMRKIYPFIKENSYSEACSLAGYNHSSSITKEENDKRELKEKLELLPKNSLRNPVVEKILNQMVNVINAIIADPSMGRPDEIRIELARELKKNAAERAEMTIHINKAKSEHDNYRKILTTEFGIPNPTRNDIIRYKLYEELKVNGYKTLYSNTYIPREKLFSKEFDVEHIIPKALLFDDSFSNKTICARQENLDKGNKTAFDFIQSFYGKEKFEEYLQRIESLAKIKEGDTFVISKAKYKKLLLPEIEIGEGFIERDLRNSQYIAKKAKSMLLDICKTVVPTTGSITDRLREDWGLINIMQELNFEKYKKLGLIEMVEKKDGSFKERITDWTKRNDHRHHAMDALTVAFTKHNHIQYLNYLNARKNENHKMHGNVIAIEQKETELLVDSVGKRKRKFKLPISNFREVAKMHLENILVSYKAKNKVATKNKNRFKTKNGEKVKIELTPRGQLHKETVYGKMKKYETKEEIIGSKFDEATILKVANLEQRNALLQRLKENNNDPKKAFSGKNSLKSNPLYYGVDSKPIPERIKIVWLEDDYTIRKEITPDLKIDKVIDIGIRRILENRLAEFNGNAKEAFSNLEKNPIWLNEGKRIAIKRVTISGVKNAETLHYKKDHLGHEMLDKQGKRIPVDFVSTGNNHHVAIYKDDKSDLQEKVVSFYEAVERINQELPIIDKSFNHDLGWQFLFTMKQNEYFVFPRDGFDPYEIDLLNPDNYKIISPNLFRVQKIATKNYVFNHHLETKAVDGELLKTKKDLSDITYRFIQTPVNLKNIIKVRINHIGQIVKIGEY

SEQ ID NO: 6624 - protein, 1383 aa, synthetic construct
  REGION 1..1383: note = Synthetic
MKKILGLDLGTTSIGWAVVNEATNKEEKSSIVKLGVRVNPLTVDEQTNFEKGKPITTNADRTLKRSMRRNLQRYKLRREHLISCLKENGFITDDSILCENGNRTTFETYRLRAKAATEEISLEELARVLLMINKKRGYKSNRKAKSNDEGELVDGMSVAKTLYEEDITPGQYSLQLLCNGKKYLPDFYQSDLRVELQKIWEKQQTFYPDILTPDFMQVLEGKSKTNTSKIFYARYGIHTADNKSKDKKRQAYEWRVDGLTRQLNIEEVAYVISDLNGLINGSSGYLGKISDRSKNLYFNKLTVGQYLMQELDKNPNVSLKNQVFYRQDYLDEFETIWNTQSQYHPELTCELKKDIGNMIIFYQRPLKSQKGLVAICELENEQREVEVDGVKKLITAGCKVCPKSSPLFQEFRMWQRLNDVIVYDSNAKADLFGNGTATKRRLTEEEMNTLAFELNIKGKLTKQQALKCLFGKATGLDMNFKELDGNETQAKLFEAYLKIVEMSGHEGYDYAKLNASQIFDVVEKVFAGLGFNTAPLYFDASIEGKQFDKQPMYQLWHLLYSYEGDNSKTGDESLVKKIRDIFHFDNDDYAKIIAGISFKPDYGSLSAKAIKKILPFMKAGNDYSLACEYAQYNHSKRSLTKEELEKKELKDHLDLLPKNSLRNPVVEKILNQMINVVNEVVKTYGPLDEIRIEMARELKKSAKEREEATNEINAANIRHEAIKKILQAAPFNIEHVSRNDIIRYKLYEELKDNGYKTLYSNTYISKEKLFSREFDIEHIIPQARLFDDSFSNKTLESRSINQEKGNATAFDFVKEKYGEEGTKAYKQRIDELLKQKVLSKAKHDKLLMTIDDIPEDFINRDLRDTQYIARKAREILEQIVKVVVPTTGKITDRLREDWQLVNVMQELNLPKYRELGLIETFKKDGNEVVRIKDWTKRNDHRHHAMDALTIAFTKLSFIQYLNNLNARSDKSSSIYGIEQKELYRDKHGSLRFLPPMPLDEFRAEAKRQLEQILVSIKSKTKVVTRNVNKSKSKKAEKGFNKRVQLTPRGQLHNETIYGSSQRYVTKEEKVGSSFDAEKIATVANKAYREALRHRLDAYDGDAKKAFTGKNSLEKAPIWLDDLHTRAVPIKVKCVTMETIYTIRKPISKDLRIEKVVDKHIQDILRVRLEEYGGDANRAFSNLDENPIWLNEEKGIRIKSVAINAGLSKPEAIHVKRNQFGKPILNERGNKQAADFVQTANNHHVAIFRDANGKLQEHIVSFYEATMRANQGWPIIDKEYNQTEGWEFLFSMKQNEYFVFPDKDFCPADYDLMNPDNYAIISPHLFRVQKLASKDYFFRHHLETTVEDKNELRDMTWKRIRNCDELQGIVKVRVNHIGQIVAVG

SEQ ID NO: 6625 - protein, 1436 aa, synthetic construct
  REGION 1..1436: note = Synthetic
MKTVLGLDLGTNSIGWALVKEAENESEKSEIIRLGVRVNPLTVDELQNFEKGKSITTNADRTLKRSMRRNLQRYKLRRENLIKILKENNFITDETILSENGNFTTFETYRLRAKAATEEITLEQFARVLLMINKKRGYKSSRKAKGNEDGALIDGMEVAKKLYDEQLTPGQYCLELLQNGKKYLPDFYRSDLLQEFDRIFEKQMTFYPEVLTKELQEELRGKKRDAVWAICSKAFKEKGFELVGTKRQGNAGDQKIENFVWRAKGLTEKLDLEQFVIVIQQINIQINSSSGYLGAISDRSKELYFHKITNPDGTTRAQTVGEYQMEILKNNPNASLRNMVFYRQDYLDEFNTIWETQAAFHKELTAELKREIRDVVIFYQRPLKSQKSLISFCEFESRKIEVEMNGKKKIQTIGSRVIPRSSPLFQEFKIWQILNNIEVFGKGRKNKKQKEKSLFSDMEDPLQIGGRRELYQEEKELLAEELSIRKELKKTDVLKLLFDNPKELDMNFNSIQGNLTQAVFFEAYKRIIELSGHEIEIEKKSAKEILKAVEEVFSVLGFNTDILYFDSNKMLDKQPMYKLWHLLYSFEGDSSKTGNQNLIDKITELCGFDKEFSKILANVTFQDDYGSLSTKAIRKILPYLKAGNKYDVACQYAGYRHSASSLNKEEINTKNYKERLNILPKNSLRNPVVEKILNQMINVINLIIDTYGKPDEIRIELARELKKNAKEREELTKSIADTTKLHEQYKETLYRPPFNLSYISHNDIVRYKLYEELKENGYKTLYSNTYISPAALFSGDFDIEHIIPQSRLFDDSFSNKTLELRSINIEKGNRTAYDFIKEKYGESGEENNLDNYLSRIEDLYKKGILSRAKYNKLKMQEKDIPEGFINRDLANSQYIAKYAKTMLGELVKFVVSTTGSITDRLREDWQLVDVMKELNWEKYYNLGLTEEFINEEGQRIRKIKDWTKRNDHRHHAMDALTVAFTKRQFIQYLNNLNARRLDESQGISNAEKEEQDNYAIGAEDVILSTRDVLGIEKKYLYRDNKNKLRFVPPIPLDEFRAEAKRQLENTLISIKAKNKVTTKNINITKKKGGVNKKEQLTPRGQLHNETVYGSHKEYVVKIETVNAKFDNEKIATVANPAYRVALTERLQQFNNDPKKAFTGGNALSKKPIWLDELHTKQVPEKVKTVSFEIVYTIRKDISPDLKVDKVIDKKIRQILENRLKEFGGNAKQAFSNLDENPIWLNKEKGISIKRVTIYGVNNVESLHDKKNKEGKLILDENGNKQPVDFVNTGNNHHVAIYRDAEGNLQEKVVSFYEAVNRRNLGLPVIDKNYKSDEGWEFLFSMKQNEYFVFPNEKTGFNPNEIDLLDPDNYSLISTNLFRVQKITTKDYTFRHHLETNVENNNLLKGITWIRTGLNGLSNIVKIRINHLGQIVSVGEY

SEQ ID NO: 6626 - protein, 1430 aa, synthetic construct
  REGION 1..1430: note = Synthetic
MNIHKNILGLDLGTTSIGFAHVIEGNTPEQSEIVQIGVRVNPLTTDEQSNFEKGKPVSENADRTLKRGMRRNLDRYQLRRKNLIDVLLKANFISNETILAEDGKHTTHETWRLRSKAVTGKIEKEELARVLLAINKKRGYKSSRKAKNEDEGQAIDGMAVAKRLYEENLTPGQLAYQLLQDGKKHIPDFYRSDLQAEFDKVWKFQKQFYPEILTDDFYKNLQGKGQRATSAAFWGTYGFNTAENKGNRDEKKLQAYKWRSESVSQQLEKEEVAYVITEINSNLNSSSGYLGAISDRSKELYFNKETVGQYLYKQLQANPHTRLKNQVFYRQDYLDEFEAIWKEQSKYHLELTNELKAEIRDIVIFYQRKLKSQKGLISFCEFESQEKTIGGKKKTIGLKVAPKSSPLFQEFKIWQVLQNVLVRKKGSRKRTVRTTGQPSLPEGEQEIFAFDKYARQTLFDELNIKGNLSASKALEVLGYRSADWELNYPILEGNRTSKVLYDAYLRILEIEGYDEDLLKLKGKDDIDVSELKAPASEIKEMVSRIFGILNINTEILEFDAELDGKAFEQQASYALWHLLYSYEGDNSPSGNEKLYALLETKFGFKQEHARILANVPLSDDYGNLSTKAMRQMYPHIKEVSYDKAAAIAGYRHSKNSLTVEEIKNRPLKDKLELLKKNSLRNPVVEKILNQMVNVVNALIEKNSEKNENGDIVNYFKFDEIRIELARELKKNAKERAEMTVNINAAKSAHEKIFKLLQMEFGVKHPTRNDIIRYRLYEELKNNGYKDLYTNTYIPREILFSKQIDIDHILPQSRLFDDSFSNKTIVYRHTNLDKGNLTTFDYMGSRLGGLQLNEYVSRIEHLYQLGLKNKEEGISKAKYQKLLKQAVDIGDGFIERDLRDSQYIAKKAKGMLYEITRSVVSTSGSITDRLREDWGLVNIMQELNFSKFKSLGLTELVEKKDGTFKERIVDWTKRNDHRHHAMDALTVAFTKHQHINYLNHLNARYNELHKEYRNIKGIEEKETHWEYDDEGNKKRVFNLPIPNFREQAKVHLENVLVSHKAKNKVVTKNKNKIKTKNGEKVKVELTPRGQLHKETVYGKYQYYVNKEEKVSTKFDEVTIVRVANPLFRKLLLQRLQENGNDPKKAFGGKNALSKNPIYLDDEKNELLPETVKLSWLEEDYSIRKDVTPENLKDVKTIEKVLDANVKRVLLNRLGAFGNDPKKAFSNLDKDPIWLNEEKGIRIKRVTISGVKNAEPLHYKKDHLGKPILDDEGRKIPVDFVSTGNNHHVAIYRDDKGNLQERVVSLFDAVQLVNAGEPVIDRQFNQGLGWQFLFTMKQNEYFVFPNEKAGFDPKEIDLLDPQNKRLISPNLFRVQKIASKNYFFRHHLETTVEEKKELKDIVYKPQLGLNAVKDIFKVRINHLGDIISVGEY

SEQ ID NO: 6627 - protein, 1401 aa, synthetic construct
  REGION 1..1401: note = Synthetic
MKKILGLDLGTTSIGWALVNEAETENELSSIIKIGVRVNPLSTDEQTNFEKGKPITINADRTLKRSARRNLQRYKQRRENLINVLKKNGLINEDTILTETEKHSTHTTYALRSLAATEEINKEAFVRVLLMINKKRGYKSSRKVKNEEDGQAIDGMSVAKRLYEENLTPGQLCYTLLKDGKKFIPDFYRSDLNTELEKIWNFQKQFYPEILTYDFKKEIQGKGLRVTSAIFWNKYGFNTSENKGSREEKKQRAYQWRSQAIDTQLNKEEVATVISDVNGNINNSSGYLGAIGDRSKELYFNKETVGQYLYKQLKENFHSRMKNQVFYRQDYLDEFEIIWETQARFHKELTPILKEEVRDIVIFYQRKLRSQKGLISFCEFENKKIEIEKEGKKVTKTIGYKVVPKSSPLFQEFKIWQNLNSILLSNKTNKEEKITLDLEEKQLLFDELNIKGNLNKEKILSLLGNDFKTWDLNFSKIEGNRTNQSLYEGYLKIMENDGYDLKQVFKIKSKKDEVELNDLSMPALEIKEIVSSALKNLSINTDILEFNAELDGKAFERQNSYQLWHLLYSYEGDGSKSGNDKLCELLKTKFGFAQAHSNILANIPLSDDYGNLSAKAIRKIFPFLKDNRYDEACALAGYNHSSSLTKEENDSRILKGRLEILPKNSLRNPVVEKILNQMVNVINVIIDDPSLGKPDEIRIELARELKKNAKEREEMTKQINTATIEHDKIRQILMNEDGIQNPTRNDIIRFKLYQELRNNGYKTLYSNTYIQREMLFSKEFDIDHIIPQALLFDDSFSNKTLCVRQENLDKSNKCASDYIEALGLDNLNAFLNRVETLYGYNVKSAGEGISKAKYKKLLMKEEEIGKGFIERDLRDSQYIAKKARQMLQEICRNVNSTTGSVTDRLREDWNLVNVMQELNMDKYRKLGLTERIEKKDGGTKERIMDWSKRNDHRHHAMDALTVAFTKHSHIQYLNNLNARKIEDKKGKEIYGIEQKETYIEIDENGNRKRKFKPPSNNFRVEAKAHLENIFISFKAKNKVFTKNKNRFKTKTGEHSKTELTPRGQLHKETVYGRIKQYVTKEERVGVKFDEQTILKVASAKYRIALLKRLQENTNDPKKAFTGKNSLANNPIYLDETNLVSVPEKIKLAWMEDQLTIRKEITPSNFTDYKDIEKVIDPIVRKLLQKRLEDMGNAKDAFSNLDINPIWLNYEKGIAVKRANITGVSTAEALHHKKDHFGKVILDENGDKIAVDFVSTGNNHHVAIYRDEAGNLQEQPVSFYEAIHRVNEGLPIIEKTFNQSFGWSFLFSMKQNEYFVFPNDEFEPTESFLRNSENNKLISPYLFRVQKITPKDYFFRHHLETSVEDKKQLQNTAYKRAGLNGIKGIIKIRINHIGQIVHVGEY

SEQ ID NO: 6628 - protein, 1366 aa, synthetic construct
  REGION 1..1366: note = Synthetic
MKRIIGLDLGVSSCGWAYVKEAENENEKSEILRIGVRVNPLTVDEQSNFEKGKSITTNAERQMKHSARINLQRYKLRREQLIAYLTKAGFINNETIFCEHGNRTTFETYRLRAKAASEEISLPELARVLLMINKKRGYKSNRKTNGSEEGALIDGMEVAKYLYENDITPGHYSYELLKQGKKYLPDFYQSDIKAELDKIWDFQKSFYPDILSDDFKQVLAGKSKTNSSKIFLARYSIYTAQNKVKDKRMQAMKWRSDALARKLNIEQLAYVICELNGLINNSSDYLGKISDRSKELYFQNLTVGQYQMKMLDENPNVSLKNMVFYRQDYLDEFERIWETQARFHPELNRERKKEIGNMIIFYQRPLKSKKSLIGICELEGKKIEIEVKDKKKTITVGSKVCPKSSPLFQEFRIWQRLNDIKLIHLITRQEYCLSQDQKELLAKELEYKAKMNKQQILKCLSLNHKEYDMNFKEVDGNTTQAVLFDAYRKIIEMSGHGERDFSKMSATDISSLVKSVFGALGFNTKLLHFDAQAADISQDSMYQLWHLLYSYESDNSAMGNEALIHKIQELFHFDSDIYAKILAGISFKSDYGSLSAKAIKKILPFMKEGIDYSTACVYAGYNHSKRSLSKEELDNKELKDRLDLLPKNSLRNPVVEKILNQMVNVINSLIDTYGKPDEIRIELARELKKSAKEREAMTDAINMANRENEEYKKILEKEFGIAHVSRKDILRYKLYLELKDNFFHTLYSDTYIPREELFSHNFEIEHIIPQAILFDDSFSNKTLESKSINTEKSNSTAYDYVKGKYGEEGAKTYEKRVEALFKNGTISKTKMTKLLMTSNDIPTDFINRDLRDSQYIAKKAREILEEIVRVVVPTTGSITDRLRDDWQLVDVMRELNWDKYDKLGLTETYEDKDGNIIRRIKNWTKRNDHRHHAMDALTIAFTKPSFIQYLNNLNARSDRSHSIYGIEQKELYRDKHNKLRFNPPIPLNEFRSEAKRHLQNILVSIKAKNKVVTRNVNKSKCKQGFNTKVQLTPRGQLHNEMIYGRQQRYVTHEEKVGASFSADKIATVANKKQREALQLRLQAYDNDAKKAFTGKNALDKNPVWLNEDHTASVPLRVKCVTTETIYTIRKPITSNDFDVNKVVDTRIKQILQQRIDEYNGDANKAFSNLDENPIWLNQEKGITIKRVAINAGLRNPEPIHEKKDKQGKNIPVDYVQTSNNHHVAIFIDEQGHLQEHIVSFYEATSRAIQELPIIEKDYHTEFGWKFLFTLKQNEYFVFPDIENGFNPKEIDLMNVENYAIISPHLFRVQNLSTRDYVFRHHLETTVNKNNILKEITWKRIVSLDKLANIVKVRINHIGQIVAVGEY

SEQ ID NO: 6629 - protein, 1395 aa, synthetic construct
  REGION 1..1395: note = Synthetic
MKKILGLDLGTTSIGWALVNEKENDKEKSEIIRLGVRVNPLTVDEKTNFEKGKSITTNADRRLKRSMHRNLQRYKLRRKNLIECLLEHHIITEETPLFEQGNKTTFQTYRARAKAVTEEISLEDFARVLLMINKKRGYKSSRKVKDGEEGELIDGMEIAKRLYEENLTPGQLLLYLYKKGKKNRPIFYRSDLQAEFDKIWEVQSAFYPNILTNDFKSSIHGFNKTQTSGAFYGVYQIYTAKNSGKEGYLQSLTWRTEALKRQMDIEEVAYILADINGAINNSSKRLAMISDRSKELYFNHQTIGQYLMQRLDENPNNSLTNIIFYRQDYMDEFETIWEKQSLYHPELTTELKKEIRDIIIFYQRDLKSCKNLVSYCEFEHEEREVTIDGKRKKILIGSKVCPKSSPIFQEFKIWQTLNNIEVFLTNHKRKKIQREKVQLSLFDDTEIGTLQRYLNQEEKDILYHELSIREKMSKKEVLKLLFGDAKDLDLNYKEIEGNRTMAALFKAYQDIISLTGNGEYDFANMSTDKVLSLTSEIFEGLGYKTDFLLFDPQLEGKALEKQPAYRLWHLLYSYVGDNSNTGNEALLKKIQEICGFEKEYATILSNVSLSTDYGSLSTKAIRKLLPHMMRGYEYSAACEKIYGTHSARSLTKEELANKIYKTQLEQLKRNSLRNPVVEKILNQMINVINDIVKTYGKPDEIRIELARNLKKSQEERKELDEAIRKTTAEYDKLRKELEEEFHIQYVSKNDLIRYRLYKELKMNGYKTLYSNTYIPREELFSKRFDIEHILPKARLFDDSFSNKTLEARDINIEKGDKTAYDYVADKYDEDYLAKYESRVEELYSQHIISKTKRNNLMAREADIPSDFLKRELRDSQYIARKAREILEDMVPIVVTTTGSVTKRLREDWQLVNIMQELNWEKYDALGLTEQYTDKNGNIVKRIKDWTKRNDHRHHAMDALTIAFTKPSIVQYLSNINARSDKSSSIYGIEQKELHRDERDHKLVFNSPMPLDIFRAEAKKHLESILVSIKAKNKVVTKNINKSKTKDGILKKVQLTPRGALHNETVYGKIHNFEAEYRKVDSKFTEDVILRVSSQKYREALLKRLAEYDNDPKKAFTGKNSLEKNPIWLNADHSYAVPLKVKLYKIVDVFTIKKAVDKDLKLDKVIDNKVRAILQVRLDEFNGDAAKAFSNLDENPIWLNQEKGIAIKRVKIRGIANGEPVRIKRDIMGNIMKDENGNPIPNDYVNTGNNHHVAVFKDAEGKLQEHVVSFFEATTRAILGYPIVDKLFRHSDGWEFLFSMKQNEFFVFPNDKTGFNPQETDLQNANNWSIISPNLYRVQKFTTGDYVFRHHLETTVESDNALRDITWKRIRSIQDLDGIVKVRLNHLGNIIAVGDY

SEQ ID NO: 6630 - protein, 1369 aa, synthetic construct
  REGION 1..1369: note = Synthetic
MKKILGLDLGTTSIGWAFVNEAENTEETSSIQQIGVRVNPLSTEEQTDFEKGKSLTLNADRTAKRSARRNLERFKLRRRNLIALLIEAGIISETTELSENGKGTTFETLALRAKAANERIEKNELARIFLSINKKRGYKSSRKAKNEDEGQAIDGMAIAKRLYEEDLTPGQLCLKFLKEGKKILPDFYRSDLQAEFVKVWEFQKRFYPEILTEKIKLEVEGKGQRATSAILKKEFDIYTAENKGTREEKRIQAYEWRSKAISEKLDISEVAFVLAEINNNLNASSGYLGAISDRSKELYFNKETVGQYLYKQIRQNPHTRTKGQVFYRQDYLDEFESIWETQRNFHPELTEKLKSEIRDVVIFYQRRLKSQKGLISFCEFESKQKLVLVDGTKKLKTIGARVAPKASPLFQEFKIWQNLSNVIIKNKKTKELFEFGLETKELLFEELNLKGNLKKAEVLKLVTDNPQEWELNYSELEGNRTNQVFYEAYQKIIQSEGSEDFDFKKLTAREVKEVVKSFLESIGVNSKILEFDPMIEGADFEKQLSFQLWHLLYSYEGDNSTSGNERLLQKLESKFGFKREYALVLSNVVFQDDYSSLSAKAIRKIFPFIKESKFSEACELALYNHSKSLTKEANEKRSLKPILDLLPKNSLRNPVVEKILNQMVNLINTIIKDPTMGVPDEIRIELARELKKNAKEREEMTQQINKAKDNHDKYRKIIQSEFGVSNPTRNDLIRYKLYIELESVGYKTLYSNTYISKDKLFSKEFDIEHIIPKSRLFDDSFSNKTLESRQVNIEKGEDTAYDFVSQKYDGSRLNQFTATVELLFKDGKISKAKYKKLLMQGNEIGEGFIERDLRESQYIAKKAKEMLFEICRSVLSTSGSITDKLREDWDLVNVMKELNLEKYRSLGLTEFVELKDGNKKEQIIDWTKRNDHRHHAMDALTVAFTKHNHIQYLNNLNARKNENSKNHAVIMAIEQKEVERDENNKKRFKAPMLNFRSEAKKHLENTLISFKAKNKVVTRNKNKVQGSKKIQLTLTPRGQLHKETIYGLSKKGFVKEEKVSGKFDRVMIDKISNPIHKMALAKRLEEFGNDAKRAFTGKNAPDKNPIWIDQEKTKKLPEKVKILSFENQYTIKKEVSPDLKLEKVVDEAVRRILQQRLSEFENDPKKAFVNLDLNPIWLNKEKGICVKSVTITGVNNAEALHTKKSHLGEEVLDEYNNPIPVDFVSTGNNHHVAIYRDASGNLQEEVVSFYEAVARVNQEMQIINKNHKEGWEFLFTMKQNEMFVFPSFAFNPKEIDLLDPKNYVLISPNLYRVQKFTIKDYFFRHHLETNVDMNGSLKNIAWRREGLNGLNGIIKVRLNHLGQIVKVGE

SEQ ID NO: 6631 - protein, 1378 aa, synthetic construct
  REGION 1..1378: note = Synthetic
MKRIIGLDLGVSSCGWAYVKEAENEDEKSEILRIGVRVNPLTVDEQSNFEKGKSITTNAERQMKHSARINLQRYKLRREHLIDYLTKAGFINEGTLLCENGNRTTFETFRLRAKAANEEISLSELARVLLMINKKRGYKSNRKANGSEEGALIDGMAVAKYLYENDITPGQYAYELKKKGKKHLPDFYQSDIMDELDKIWNFQQPFYPNILTDEFRQVLAGKSKTNSTKLFLARYSIYTAQNKEKDKVLQALKWRSDALARKLDIEQLAYVICELNGLINNASDYLGKISDRSKELFFQNLTVGQYQMKMLDENPNVSLKNMVFYRQDYLDEFERIWETQAKFHPELTRERKKEIGNMIIFYQRPLKSKKSLISICELEGKQIEVEVEGKKKTITVGSKVCPKSSPLFQEFRIWQRLNDIELTDLSTRQKYGLNQEQKELLAKELEYKPKMTKQQMLKCLSLKPKDYDMNFKEVDGNTTQAMLFEAYRKIIEMSGHGEHDFSKMSASDISTLVESVFAALGFNTSVLHFDAQAADISQDSMYQLWHLLYSYESDNSAMGNKALICRIQELFHFDSDEYAKILAGISFKPDYGSLSAKAIKKILPFMKEGNDYSTACVYAGYNHSKRSLTKEELDNKPLKDHLDILSKNSLRNPVVEKILNQMINVVNSLIDTYGKPDEIRIELARELKKSAKEREAMTDAINAANRENEEYKKILETEFHIPHVSRNDILRYKLYLELKDNGFHTLYSDTYIPREKLFSRDFDIEHIIPQASLFDDSFSNKTLESRSINIEKSNSTAYDYVKGKYGEEGAKNYKTRVEDLFKNGTISKTKMTKLLMTADDIPTDFINRDLRDSQYIAKKAREILEEIVRVVVPTTGSITDRLREDWQLVDVMKELNWDKYDQLGLTETFEDKDGNTIRRIKDWTKRNDHRHHAMDALTIAFTKPSFIQYLNNLNARSDRSQSIYGIERKELYRDKHNKLRFNPPIPLDEFRTEAKRHLQNILVSIKAKNKVVTRNVNKTKCKEGFNTKVQLTPRGQLHNETIYGSQQRYAIHEEKVGASFTAEKIATVANKKQREALLARLQAYNNDAKKAFTGKNALDKNPVWLNEAHTTSVPLKVKCLTMETIYTIRKPINKDLKLDKVVDSRIKQILQQRLDKYKGDANKAFSNLDENPIWLNQEKGIAIKRVAIFGAVSAKAIRDKRDKYGHFLLDENNQHQPSDYINTNGNHHVAFYVDKEGNIHDYIVTFFEAVIRAINGFPIIDKEYNKSIGWNFLFTMKQNEYFVFPNTKTGFNPKEYDLTNESYYHLISPNLFRVQSISKKEYGNAVVRDFIFRHHLESSVNVSIKDITYKQMKSLSFVKDIVKVRLNHIGQIVSVGEY

SEQ ID NO: 6632 - protein, 1385 aa, synthetic construct
  REGION 1..1385: note = Synthetic
MKPKRILGLDLGTNSIGWALVEESASIEQPSKIVKLGVRVNPLTTDEKNNFEAGKPLSTNADRTTKRGARRNLQRYKLRRENLIQLLIEHHLINKNTPLTEIGKGSTYETLSLRAKATKEKISLEEFARVLLAINKKRGYKSSRKVNNEEEGQAIDGMAVAKKLYDEQLTPGQYVYSLLSQNKKYVPDFYRSDLKTEFDKVWHFQKQFYPEILSDELYKALQDKNKTQTWAICKHPFQIEGITLKEKGAELKKKKYELRSLALSEQFDLERLAIVLQEINNNLNQSSGYLGAISDRSKELYFNKETVGEYLWKQIQKNPHTSLKNQVFYRQDYLDEFEQIWATQAKFHSQLTDELKEQVRDVVIFYQRKLKSQKGLLSFCQFESQIQKYTDPETGKEKKRTIGRRVAPKSSPLFQEFKIWQNLANLTFEKTKASDEKSPLAQKEKNIYVLNEEDRQALFEELNLRGNLSQKEVFKFLGLREKEWRTNFPQGIQGNRTNAVLMNAYKNILEAEGYAFDWEKKTAPEIKEEIKSIFSSVGINPEIIYFKASLEDTAFEMQPAYQLWHLLYATEEDDKISEEDKLVYGNSAVRLKKKLVEKFGFTPEQAKWVANVPLQDDYGNLSTKAMRNIIPYLEAGHEYSDACELAGYNHSNSLTKEENENRELKEALELLPKNSLRNPVVEKILNQMANVVNQIIAAYGKPDKVRIELARELKKSAQEREKMTKQINAATKQNEEYRKILTKEFGIPNPTRNDVIRYRLWLELENNAFKDIFSNKQIKKEDLFSSKIDIEHIIPKALLYDDSFSNKTLAFKDINLKKANRTGYDFISEDYHENLDDYVQRVEMLYNGGAISRAKKEKLLKPQKDLSEGFIERDLRNTQYIAKKAKNMLLEAFREVEATSGSVTDKLREDWGLINVMKELNLPKYKALGLTQKEQRFDIGRGETKEVEVITDWTKRNDHRHHAMDALTVAFTKLNHTQYLNRVNTANDDSIDNEKIIERVNGKKQFIPPMPHFRSEAKKHLEEVLVSIKNKNKVFTINKNHTKGGKNEPQKVKTPRGQLHKETVYGKAKVPMSKPTKISKKFPLEQAKLIINPKEKEAVLKHLALYDNDPQIAFDTKTLKKNPLLLSDEPLKEVLCFEEIFTIRKEISPDLKIDKVMDEKIRQILKKRLSAYDNDAKKAFSDLDKNPIWLNEEKGICIKRVTITGVSNAEALHYQKDHLGQEILDEKGNRKPIDFVSTGNNHHIAIYEDTEGKLQEKVVSFFEAIAKANQGLPVIDKEFNKDLGWKFLFTMKQNEMFVFPNDDFDINEIDLLDDKNASLISKHLFRVQKIGSKDYTFRHHLETTVDAKSELKDIAYKRINSLEPLHNIKKVRINHIGKIVQVGEY

SEQ ID NO: 6633 - protein, 1416 aa, synthetic construct
  REGION 1..1416: note = Synthetic
MKKILGLDLGTSSIGWAVVNEAENTNEKSSIVKLGVRVNPLTVDELTNFEKGKSITTNADRTLKRSMRRNLQRYKLRRENLIEILKAHGFINDETILSENGNRTTFETYRLRAKAATDEISLQEFARVLLMINKKRGYKSSRKAKSTEEGQLIDGMEIARQLYDNNLTPGQFSLNLLKQGKKYLPDFYRSDLQAEFDKVWNFQKQYYPDILTDTLKEELRGKNKTQSWAICAKPFNIVGFKRTGKAAEQKIENYQWRANALSEKLGLEELAVVLSEINGQSNSASGYLGDISDRSKALYFNHQTVGQYQMSELAKDPNHRLKNEVFYRQDYLNEFETIWETQAKYHKELTPELKKEIRDVVIFYQRPLKSQKGLISFCEFESKQIEIEIDGKKIKKITGSRVCPKSSPLFQEFKIWQILNNIQVSTKQEHSKRFLTQEEKELLFAELNYKEKLTKSDALDLLFGKTKDYDLNYKELEGNKTQAALFKVYQTIIEMSGNGEFNFAKLSAEKAIAKTTEIFNKLGISSQILIFDSNKDEETQPMFKLWHLLYSFEGDNSVTGNDKLINKLSEHYGFAKEYAEVLAGVVFQPDYGSLSTKAIKKILPHLKDGLDYSVACEYAGYRHSKRSLTKEELEQKVLKDKLELLPRNSLRNPVVEKILNQMINVVNGVIDEYGKPDEVRIELARELKKSAKEREELTTSINQTTKLHEEYVKKLQAPPFNLEHVSRNDIIRYKLYLELEKNGFKTLYSNTYIPKEKVFSKEFDIEHIIPQAKLFDDSFSNKTLEARNVNLKKSNATAYDFVLAEYGKEKAEEYKNRIEDLYADKAISKTKRDKLLMKEADIPSGFINRDLRDSQYIAKQAREMLEGIVKFVVPTTGSITDRLRDDWQLVNVMQELNWDKYNKLGLTYYEQDRDGRQIPRIKDWTKRNDHRHHAMDALTIAFTKHSYIQYLNNLNARVQKGVDEYFDLDMVELSDLSKEQRSSAIYGIERKELERDEHGKLRFKPPMPLDEFRAEAKRQLENIIISNKAKNKVVTQNINTSKKKIGKNKKVQLTPRGQLHLETVYGSSKRYVTKEEKVNASFDVEKIMTVASPRYREALLARLKIFGGDPKKAFTGKNTLEKLPEWLNEQHTEKVPEKVTTVEFETIYTIRKEISPDLKIDKVVDAQIRRILQARLDEFGGDAKKAFSNLDENPIWLNKAKGISIKRVTITGINNAEALHDKRDKEGNLILDGNGNPQPVDFVNTGNNHHVAIYRKPKLDKNNEPLRDENGNIQYELDEQIVSFYEATSRAMQNLPIIDKTYKQEEGWQFLFTMKQNEYFVFPRYDADGNIIFNPKDYDESWFLNPENYAEISPNLYRVQKMTTKDYFFRHHLETTVQDISVLKGTTWKRFGLNGIENIVKVRVNHIGKIVSVGEY

SEQ ID NO: 6634 - protein, 1420 aa, synthetic construct
  REGION 1..1420: note = Synthetic
MKRILGLDLGTSSIGWALVDEAENGNEKSSIVKLGVRVNPLTADELTNFEKGKSITTNADRTLKRSMRRNLQRYKLRREVLIQILKEHKFITDETILSENGNRTTFETYRLRAKAATEEISLEEFARVLLMINKKRGYKSSRKANGTEEGTLIDGMDTALKLYNEDLTPGELCLQYLNEGKKTLPDFYRSDLQNECDKIWIKQKEFYPEILTDTLKEELRGKKRDAVWAICAKYFIWKETQTEWNNEEGKSEQIEKEHKLEGIYSKRKREEAKKENLQWRVNGLKKKLSLEQLVIILQEINTQINASSGYLGAISDRSKELYFNKQTVGQYQMEILNRNSNASLRNMVFYRQDYLDEFNTLWEKQAEFHKELTEELKKEIRDIVIFYQRRLKSQKGLISFCEFESRQIEVEIDGKKKVKTVGSRVIPRSSPLFQEFKIWQILNDIKVTVGEKKSKRREKSEQNDSRCLNLEEKELLAKELFVRDKMTKSEVLKLLFDNPQELDLNFKTIDGNKTGAAIFRAYSKIIEMSGHEPVDFKNSKEKIVEHIRAVFASFNWNTDILNFNPDEELDKQSYYKLWHLLYSFEGDNTPTGNGCLIQKITELYGFEKEYATVLANVTFQDDYGSLSAKAIHKILPHMKEGNQYDVACTYAGYKYSKSSLSKEEIANKILKDKLELLPKNSLRNPVVEKILNQMVNVINAIIDIYGKPDEIRVELARELKKNAKEREDLTKSIAETTKAHEEYKKLLQNEFGLKNVSRTDILRYKLYKELESRGHKTLYSNTYIPREKLFSKEFDIEHIIPQARLFDDSFSNKTLEARNINIEKGNKTAYDFIKEKFGETGTENSLDCYLNNIEELFKSGKISKTKYNKLKMTQQDIPDEFIERDLRNTQYIAKKALSMLHEISYRVVATTGSITDKLRQDWQLVDVMKELNWDKYKALGLVEYFQDRDGRQIGRIKDWTKRNDHRHHAMDALTVAFTKDVFIQYYNNKNASLNPNTNEYAIKNKYFQDGKAIAPIPLNEFRAEARKHLENTLISIKAKNKVVTSNMNETKKRGGTKKKIQQTPRGQLHLETIYGSNKRYLVREEKVNASFDVDKIETVSKLVYRNALLKRLQENDNDPKKAFTGKNLLDKKPIWLDKEQTKKVPEKVKTVVFETIYSVRKEISPDLKIDKVIDVGIRKILADRLSEYGNNAKKAFSNLDENPIWLNKEKGISIKRVAVLGISNAQSLHVKKDKNGKVFLDENGKNIPVDFVNTGNNHHVAVYRKPVIDKKGQIVIDEDGNPQYELEEVVVPFFDAVTKANLGQPVIDKDYKTSEGWQFLFSMKQNEYFVFPNEKTGFNPKEIDLLDADNYGVISPNLFRVQKFSHKNYVFRHHLETTIKDTSVLLKGITWTDFRSSKGLDSIVKVRVNHIGQIVSVGEY

SEQ ID NO: 6635 - protein, 1410 aa, synthetic construct
  REGION 1..1410: note = Synthetic
MKKILGLDLGTTSIGWAYVHEAENDNEVSSIQKLGVRVNPLTVDEQINFEKGKPITTNATRTQSRSARRNLQRYKLRREHLINILTQHNWINKSTILAETGNQSTFETYQLRDKAASQKISLSELSRVLLMINKKRGYKSSRKVNNTEEGQLIDGMSIAKRLYNEQLTPGQLSLELLQKGIKKLPDYYRSDLNQELDLIWTFQQKYYPEILTETFKDKIKDKGGKATSTLFWVTYNFNTADNKGTREEKKLQSYQWRVQALTQQLDKDVVAFVIADINGQIYNSSGYLGAISDRSKELYFNKLTVGQYLYQQLKENSHTRLKNQVFYRQDYLDEFETIWNTQSLYYSDELTIELKEEIRDTIIFYQRKLKSQKGLISFCEFEQCQKLVNGKSKTIGNRVIPKSSPLFQEFKIWQQLHNVTLKNKETNEYTCLAEEQKTHLFEELNIKGKLTSAQALKLIESKPKMWELNYTELEGNNTNKVLYNAYLDIIDAAGYDIRNELKIKLNKDDIELTDLDVDASQIKEMIYTIFKDLGIDTTILDFDATLEGKAFEQQGSYQLWHLLYSYEEDDSKTGLNTLYKLLQTKFNFSPDQTKYLGNIVFQDDYGNLSAKAIRRIFPYIKDNKYSDACLLAGYKHSKHSLTKEENDNRELNNKLTILPKNSLRNPVVEKILNQMVNVVNTLIDGENLKLKEQGKAPDFHFDEIRIELARELKKNAKEREELTKSINQGKSDHEKIIKILQKEDGLKNPTRNDIVRYKLYQELKNNGYKDLYTNEYIERKNIFTKDYDIEHIIPQSKLFDNSFSNKTLVRRNVNLKKGNQTAYDFILAEYGQEKANEFEIRITNLFSLGQVEGISRSKFKKLLMRESDIGHGFIERDLRETQYIAKKAKAMLFDITRNVVSTSGSITDRLRDDWGLINVLKELNLQKYRDAGLTELIEMKDGNEKEIIIDWTKRNDHRHHAMDALTVAFTKHNHIQYLNNLNARKNNSDKLHSNIIAIETKETQLITDSLGNRKRVFKEPIPNFRQVAKQYLESILVSHKAKNKVVTKNINKIQGKKIGQLTLTPRGQLHKETVYGKIRQYVSKQEKVGPKFNSEIIELVSNPTYKKLLLKRLNDNNNDPKKAFGGKNALSKSPIYIDLEKNITLPEVVKLIWLEEDYTIRKEITPDLKVDKVIDQGVKRILENRLKQYDNNPKLAFSDLDQNPIWLNKEKGIAIKRVTISGVKNAEALHIKKDHLGQPILDSKGQEIPVDFINTGNNHHVAIYEDENGKLQDNVISLFEVVERVNQQLPIIDKTYNQHLGWKFLFTMKQNELFLFPSDDFNPNEIDLFDEENYKLISKHLFRVQKFSKVEYGNSAVRDYVFRHHLETNVTDTKELRNKSHIILKSTNALESIVKIRTNHLGEIIHIGEY

SEQ ID NO: 6636 - protein, 1390 aa, synthetic construct
  REGION 1..1390: note = Synthetic
MKKILGLDLGTTSIGWALVNESENENEKSSIVKIGVRVNPLTVDELTNFEKGKSITTNAVRTLKRSMRRNLQRYKLRKNALIEILKEKGLILNETILTENGNRTTFETYRLRALSVVEKVSLEQLARVFLMINGKRGYKSSRKEKSTDEGQLIDGMEIAKKLYNENLTPGQFVFQLLTEGKKYIPDFYRSDLQAEYDKIWNFQKQFLPEILTDEFKKQIVGKGKMITTKIFLAKYGVFTADNKNTDKRLQAYRWRVEALANQLSKQEVAFVISDLNGIISNSSGYLGSISDRSKVLYFNKQTVGQYLMAQLERNPHARLKNQVFYRQDYLDEFNAIWETQANFHKVLTEDLKGEIRDVIIFYQRRLKSQKGLINYCEFENRKVEVDIEGNKKILTVGLKVCPKASPAFQEFKIWQILNNIQLSDRDGSKRFLNQEEKEILFNELNFKEKISKNDALKLLYENYKDLDFNFKEIEGNRTQSALYKAYQRIIELSGHGEYDFSKMCSNDIFANVKQIFAGLGYNTDILLFNSGLEGKEFENQSMYKLWHLIYSFEGDDSNTGDEKLINKISQLYGFEKEYATIIANINFQPDYGSLCTKAIRKILPFLKEGNEYSVACTFAGYRHSKSSLTKEEIDSKVLKDCLDILPKNSLRNPVVEKILNQMINVINAVIQEYSVKDKEGKIVEYFKPDEIRIELARELKKSAEERENATNAINKSTTEHEAYRIILQNEFGLAHVSRNDIIRYKLYLELENRGFQTLYSNTYIAPNKLFSKEFDIEHIIPQARLFDDSFSNKTIESRSINIEKANDTAYDFVLRKSGEEGLDDYLIRIEELFKAERITKSKYNKLKMKGADIPSDFINRDLRDTQYIAKKAKNIIEELVRDVVSTTGSITDRLREDWQLIDIMQELNWDKYDKLGLTEIIENREGHKIRRIKDWTKRNDHRHHAMDALTIAFTKRSHIQYLNNLNARSDKSGSIYGIEAKELYRDEKGKLKFIPPMPLNDFRSEAKKHLENTLISIKAKNKVTTININVTKKSNGVNKKKQLTPRGQLHLETVYGSINQYVTKVEKVGAAFSEDQIQKVANKGFREALMKRLMEFENNPKKAFTGKNSLDKNPIFIDSLHTQKVPEKVKSVSAETIYTIRKDVSPDLKIDKVIDFKVKSILMDRLDDYKGDSKKAFSNLEENPIWLNKEKGIAIKRVTILGISNSVALHDKRDKTGNLMLDKEGNAVPVDFVNTGNNHHVAIYKDVNGNLQEKVVSFFEATERVSQGLFIIDKSFNSTLGWEFLFSMKQNEYFVFPNEKTGFNPSDIDLLNLENYHLVSPNLFRVQKLSKKNYVFNHHLETTAVDGETLKNKKLLLNITHRFIQSVPPLKDLVKVRINHIGKIVSVGEY

SEQ ID NO: 6637 - protein, 1425 aa, synthetic construct
  REGION 1..1425: note = Synthetic
MKRHRLSFLFTIFAKSNIANTNTMKRILGLDLGPNSIGWALVNERENEAEHSSIVKLGSRIINFDGFVSTKTGKESKTPLDDFKQGKGISSCAGRTLKRTMRRNLQRYKLRRDSLVGILKSNGLISNDAVLAECGNRTTFETYRLRASAATEEITLEELARVLLMINKKRGYKSSRKAKQKDEDGHLIDGMEVARRLYDDGLTPGQYTLSLMEKGNRHIPDFYRSDLQAELNKVWDCQRRFYPDILTDELKDAIQGKNKSQTRAVCSTPFGIKGMKRNTKGEQMRKENYRWRVEALTDKLDLERLAVVLQEINGQLKNSSGYLGAISDRSKELYFNHQTVGQHLMAELDRNPNYSLKNKVYYRQDYLDEFERIWETQAKYHKELTPELKHEIRDVVIFYQRPLKSQKGLISHCEFESREIEIEVDGHKKKITAGLRVCPKSSPLYQEFRIWQMINNVQVSGPIEPENQPDLFGATAKYRKGKRFLTQEEKETLASELTFRDKMTKKEILKLLFDNPKELDLNYKEIKGNTTMAALMKVCLGIVDMSGHGEYDVSKISVSDAIGVIVSVFNALGFSSAFLDFDSSLDGKDFAAQSAYRLWHLLYSFEGDKSKTGNERLVAKIQELYGFDKDSAAMIAGITFEPDYGNLSAKAMRKILPYMKDGVEYSEACRMAGYRHSKRSLTKEEIETKQLKDHLDLLPRNSLRNPVVEKILNQMINVVNAAICEYGRPDEIRIEMARELKKSTSEREEMVKAISRATADNEKYRKMLQEEFGMANVSRNDIIRYRLYMELKENGFRTLYSGTYIPREKLFSKEFDIEHIIPQAKLFDDSFANKTLEARNVNLEKSNMTAYDYVKGKYDAAGLEQYEQRVEALYAKGAISKTKRNRLLTVEADIPDGFINRDLNDTQYIARKAREILEEVVRTVTPTTGSVTDRLRDDWQLVDVMKELNWDKYDRLGLTEIVEDKDGRRIRRIKDWTKRNDHRHHAMDALTIAFTKPAYIQYLNNLNARSDRSGSIYAIERKELYRDRGGKLRFMPPMPLDELRREARRQLEAVLVSIKAKNKVVTRNINVTNAKGGGHRKVQLTPRGQLHNETIYGSIRRYATKEEKVNASFTEDKIMTVADKRYREALLERLRLCYGDPKKAFTGRNSLDKNPLFVGRMHTEKVPTKVKTVTLETIFTQRKEVNKDLKVDKVIDTRVRKILEERLRQYGGDAQAAFSNLDENPIWLNKEKGISIKRVTITGVNNAVALHDKRDNLGRLILDGNGNKQPSDYVSTSNNHHVAIFRDAEGNLQEHVVSFYEATARAIQHLPVIDRDYNKAVGWQFLFTMKQNEYFVFPNAETGFDPKEIDLLDPKNYAAISPNLFRVQKVSKKNYMFRHHLETTVEEKKELQGFTWKNIRSLGGIDKLVKVRVNHLGQIVSVGEY

SEQ ID NO: 6638 - protein, 1432 aa, synthetic construct
  REGION 1..1432: note = Synthetic
MKTILGLDLGTNSIGWALVNEAENDEEKSSIIKLGVRVNPLTVDELQNFERGKSITTNADRTLKRSMRRNLQRYKLRRNTLIEVLKEHSLITDGTLRSEQGNKTTFETYRLRAKAAVEEISLEEFARVLLMINKKRGYKSSRKTKGEEDGVLIDGMDIAKRLYDEQLTPGQLCLQLLESGKKALPDFYRSDLQDEFDRIWNHQKVFNIESYCDAAKEEIKGKNKSQTWAILQKYFIWEEKETIWNEEEAKTKELKKERRLAGIKRNTKGNEQKLENYRWRVQALSEQLNPEMAAIVLQEINGQISASSGYLGAISDRSKELYFNRQTVGQYQMAILTKNPNASLRNMVFYRQDYLDEFNRIWEKQAEFHRELTVELKKEIRDIIIFYQRRLKSQKGLINFCEFERHEVTIEKEGKKRAKVVGCKVIPRSHPLFQEFKIWQTLNDIEVFAGDKKNIRKNPSKKSNLFNDMEDALSIKGSRYLYQEEKEILAKELSVRENMKKVEVLKLLFSNPQELDMNFKQIDGNHTGFSLFSSFSRMIERYGYEPIDFKKSADEIKKQLEAIFSDLGWSTGLLSIDLGQDNKELEKQPYFRLWHLLYSFEGDNTPTGNGKLIERLMELCGTEKEYATVLANVSFQDDYGSLSAKAIKKILPYLKEGNQYDVACEYAGYRHSKSSLTKEEIDNKKLKDKLDILSKNSLRNPVVEKILNQMVNVINAIIDDYGKPDEIRVELARELKKNAKEREELTKSIAQNTREHEEIRKLLQSEFGMINVSRNDIIRYKLYEELKDNGYRTLYSNQYIPKEKIFSKEIDIEHIIPQSRLFDDSLSNKTLEYKAVNIEKGNKTAYDFVKEKYGDDGLLQYLNRCEALFKEKRTKLNKLKIEEKDIPEGFIDRDLRNTQYIAKKALSMLNEICRRVVATTGSITDELREDWQLVDLMKEMNLPKYETLGLVETFEDKDGRRIKRIKDWTKRNDHRHHAMDALTVAFTKDVFIQYFNNKNASMPGAKEQTNITGIKSKYFESGKAISPIPLAQFRAEAKRHLEGVLVSIKAKNKIITTNVNYTKKVNGENKKLQQTPRGQLHLETVYGSHRKYATKMEKVNASFDIAKISTVSKLAYRNALLKRIKIFDNDPEKAFAGKNTLEKNPVYLNENHTKMVPEKVQIVDFETIYTIRKPIEPNLSIDKVIDAKIRRILEERLKKYGGDAKKAFVNLDENPIWMNEAKGISIKRVSIRGISNAQSLHEKKDKDGNLALDTDGKKVPVDFVNTGNNHHVAIYRKPVLSKTGQTVFDEEGNPKYELDEVVVSFFDAVTRANLGQPIIDKDYKRSEGWKFLFSMKQNEYFVFPNEKAGFNPKEEDLLNPENYAMISPNLFRVQKFSYKNYVFRHHLETSIKDTSAALKGITWTDFRSSKELDKIVKVRVNHIGQIVSVGEY

SEQ ID NO: 6639 - protein, 1396 aa, synthetic construct
  REGION 1..1396: note = Synthetic
MKKILGLDLGTNSIGWAVVNEAEKEGEKSSIVKLGVRTISFDNFVNTASKKACMDAVADFNGGKSISCNAGRTQSRSMRRNLQRYKLRRDHLRKLLKEHGFIDDSTILAEKGNGTTFETYRLRAKAASEEISLTEFARVLLMINKKRGYKSNRKAKSSDEGSLIDGMAIAEKLYNENLTPGQLVLSLFNQDKRYEPEFYPSDLQTEFDKIWSFQKTFYPDVLTESLKHNVEGKNKSATWAICKTPFNIVGIKRSTKGFDQKKEDYEWRVNALSEKIGLEELAIVLQNINGQKSGTSSYLGNIGDRSKELRINHLTVGQFQMNELAKNPNYSLKNQVFYRQDYLDEFETIWETQVKFHPELTPKLKHEIRDITIFYQRPLKSQKNLISICELEGRKVNRTIDGQTKTVLSGPKVIPASSPIFQEFRIWQVLNNLMLTSKETGEYCALKQDEKEKLFAELNVKEQLSKSDALKVLFNKEYREYDLNFDKLEGNRTQSKLFDAYRRIIEMSGYGEFNFQKMPAKEIFNTVQNSFEKLNIRTDFLSYNSSLTTPELENQPLFKLWHLLYSFQDDKSITGNRNLIAKIGNLCNMEEDYAAILASVTFEDAYGSLSAKAIKKILPFMKQGQMYSDACTSAGYKHSKRSLTRDELANKVYKDHLDALPMNSLRNPVVEKILNQMVNVVNLIIDTYGKPDEVRIELARELKKSAKEREEMTNAIKKSAADYDDYRKILINEFGLECPSKNDLLRYRLYKELESNGFKTLYSDTYIPQEKLFSKEFDIEHIIPQAKRFDDSFANKTLEKRQINIEKSNSTAYDFVLTKYGENGAEQYKSRIDKMYNEGMISKAKYKNLLMHEADIPSGFIERDLRDSQYIAKKAREMLEDVVKFVIPTTGAITDRLREDWQLVDVMQELNWDKYNKQGLTETYKDKDGRTILKIIDWTKRNDHRHHAMDALTIAFTKRSYIQYLNNLNARVPKSEQEYIDLADYDLSNINPADVKRIEATIEQKELYRNEKGKLCFIPPIPLDEFRAQAKEQLENTLISIKARNKVVTRNTNISKGKNGKLNQQQTLTPRGQLHNESIYGSYQAENVKSEKIDAKFTAEKIATVCNAKYRDALLERLNAFNGDAKKAFTGKNALTKSPIYLDEMHTTKIPEIVTTKSYETTYTIRKAVSSQNFKDAKSIEKVIDGKIKQILLDRLAEYDNDAKKAFDNLMDNPIWLNKEKGISIKSVTIRAVNNAVALRKGHDFVNTGNNHHVAIFQDADGNLQEHIVSFYEATQRATKGLPIIDKEYNKEQGWQFLFTMKQNEFFVFPNQETGFDPQKIDLLDSKNNALISPNLYRVQKFTTRDYFFRHHQETMLNDNKKLLGKTWKRGGLSLLNGIVKVRVNHIGQIVSVGEY

SEQ ID NO: 6640 - protein, 1450 aa, synthetic construct
  REGION 1..1450: note = Synthetic
MKKRILGLDLGTTSIGFAQVIEGDTPEQSFIKRIGVRVNPLTTDEQTNFEKGKPVSVNADRTLKRGMRRNLDRFQDRRRNLIEVLIQSGLITTESVLAEDGKHTTHETWRLRAKAVTEKIDKEQFARVLLAINKKRGYKSSRKTKNEEEGQAIDGMATAKRLYEENITPGQLAYQLLKEGKKTLPDFYRSDLNAELDKVWKQQQQHYPDIFTDEFKKYLEGKGQRATSTSFWGRYQINTSENKGSRDEKKLQAYKWRAEAVSQRLEKEEAAYVITEINNDLNKSSGYLGAISDRSKELYFNKETVGQYLYKQLLHNPHTLLKNQVFYRQDYMDEFEAIWSEQSKHHAELTEELKIEIRDIVIFYQRKLKSQKGLVSFCEFESKEIEIERNGQIVKRTIGLKVAPKSSPLFQEFKIWQVLNNLLIRKKGSRKRTVKKSDNSGGEEQEIFAFDMNAKQLLFDELNIKGNLSASKALGLLGYKPQDYELNYTTIEGNRTNKALYDTYLKILEIEGYDVKDLLKVKSNKDEVALDDIDVPAVEIQKMVRDIFETLGINTQILEFNAELDGKAFEQQASCQLWHLLYSAEDDTRKYSEEDILVFGNENIGLKKKLCSKFGFKPEHSKILVNVTLSDDYGNLSSKAMRRIYPYIKEHHYSDACEHAGYRHSKSSLTKDEIANRPLKGRLELLKKNSLRNPVVEKILNQMVNVVNTLIDAENAERKAQGLPEDFHFDEIRIELARELKKNAKERAEMTANINAAKLKHERIVRLLQTEFGIKNPSRNDIIRYKLYEELKNNGYKDLYTNTYIPREILFSKLIDIDHIIPQAKQFDDSFSNKTVVFRQDNLDKGNKTAYDYIESKYGEVAAVDFVLRAQHLFELGQKNSEEGISKAKFQKLQKRESDIGDGFIERDLRDSQYIAKKAKNMLYDITRSVVSTSGSITDRLREDWDLVNIMQELNLEKFRKLGLTEMVEKKDGTFKERIVDWTKRNDHRHHAMDALTVAFTKHNHIQYLNYLNARKNERHRLHSNIIAIEAKETELVMDSDGNKKRVLKSPIPNFRQVAKAHLENVLVSHKAKNKVVTKNKNRTKTKYGERVRTELTPRGQLHKETVYRKYRYYQSKEEKVGAKFDKETIQKVSSPLYRKLLLERLAENNNDPKKAFTGRNALNKNPIYLDNAKQKVLPEKLKLVWLEEDYSIRKDVTPENLKDVKTIEKVLDGKARNILLERLNEYGGDPKRAFSDLDKNPIWLNREKGISIKRVTISGVKNAEPLHYKKDHMGNDILDDEGKKIPVDFVSTGNNHHVAIYRDENGNLQDHVVSFFEAVERVNQGLTVIDKSYNAHLGWQFLFTMKQNEYFVFSNDQMAFDPREIDLLDPKNKKLISPNLYRVQKLSKVIYGNSAVRDFVFRNHLETTVEEKKELNGIAYKQLKSLPFMENIIKVRINHIGDIVGIGEY

SEQ ID NO: 6641 - protein, 1394 aa, synthetic construct
  REGION 1..1394: note = Synthetic
MKKILGLDLGTNSIGWAYVNEAEDLDEKSSIIKLGVRTISFDNFVSTDSGKESRIPENDFRSGKGISPNAGRTFKRSARRNLQRYKLRRENLIDVLKEYKFINEETILSENGNRTTFETYKLRANAVTKEISLEELSRVLLMINKKRGYKSSRKADSKDEGQIIDGMDIAKYMYEYNLTPGQYSYQLLQNGKNRIPDFYRSDLQSEFDKVWNNQKQHYAEILSDQLKEELKGKNKTQTWAICSKPFGIVGIKRTTKGSELRKENFEWRVKALSEQLNLEQLAIVLQEINAQLSNSSGYLGAIGDRSKELYFNKLTVGQYLMDLIENNPNESLKNKVFYRQDYLDEFNTIWETQSKFHKELTPELKQTIRDIIIFYQRPLKSQKGLISFCEFESKQIEKIIDGKNKTITIGHRVCPKSSPLFQEFKVWQILNNLEVSNKKTREKRFLEQEEKDTLFFELSIKDKITKPKALKLLFENYKDLDLNYKEIEGNKTQAALFKAYQSIIEQTGNGEYNFDELNSSKILDIVTNIFSGLNYNTDILNFNSNLEGADFQKQPIYKLWHLLYSYEGDNSKTGDEKLIIKISELFGFEKEYSTILANVNFQPDYGSLSTKAIRKILPYLKEGNKYSLACEYAGYRHSKNSLTKEEIESKVLKDRLEILPKNSLRNPVVEKILNQMINVVNTAIDSFGKPDEIRIELARELKKSAKERAQMTEAIGKTTAEHEKYRDILKKEFGLTNVSRNDITRYKLYLELKDNGFKTLYSDTYIPQEKLFSKEFDIEHIIPQAKLFDDSFSNKTLESRNINIEKDKSTAFDFVSIKYGETGLSYYLNRIELLFKNGVISRAKYNKLKMKEEDIPSDFINRDLSETQYIAKKAKDLLNEIVRNIVSTTGSVTDRLREDWQLIDVMQELNWNKYNELGLTEIFEDKDGRRIRRIIDWTKRNDHRHHAMDALTIAFTKPSFIQYLNNLNARSDKSGSIYGIEKNELYRNQDGNLKFKPPMPLDEFRSNAKEQLQNILISTKARNKVVTNNVNCIKKKIGTNKVIQSTPRGQLHNETIYGSIKQYETKEIKVGSIFTSDLISTVANKKYREALEKRLIENDNDAKKAFTGKNSLEKNPIYLDDLHTLQVPSKVKVVSLNTIYTVRKEVNSDLNIDKVIDVKIKKILKERLEEFGNDPKKAFSNLTENPIWLNKEKGISIKRVTISAISNAVSLHDKTNKDGILILNDHNAKIPVDFVSTSNNHHAAIFRDKNGNLQDNVISFYEAVERVNQDLPIIDKTYNQEEGWIFLYTIKQNEFFVFPNNQTGFNPNELDLLNPDNYALISPNLFRVQKFSKVTYGTSSVRDYVFRNHLETTITDKKELRDVTYIQLKSLVGLENVVKVRINHIGEIVSIGEY

SEQ ID NO: 6642 - protein, 1458 aa, synthetic construct
  REGION 1..1458: note = Synthetic
MSKNNQINILGLDLGVTSIGFAHVIESEDHNNSEIKQIGVRVNSLTVDEQTNFEKGKPFSINAERTLKRGARRNLDRYQDRRNNLIEVLTKSGFITSETKLAEDGKNTTHQTWALRAKAVSEEVGKEDFALILLAINKKRGYKSSRKAKNEDEGQAIDGMAVAKRLYEENLTPGQLAYQLLNEGKKSIPDFYRSDLQAEFDKVWESQKQFYSEILTDEFYKELEGKGQRATSALFWSKYGFNTAENKGNREEKKLQAYKWRSEATSKQLEKEEVAYALTEINNNLNNSSGYLGAISDRSKELYFNKQTVGQYLYQQLQENPHTRLKNQVFYRQDYLDEFEMIWETQAKFHSELTNELKEEIRDIIIFYQRKLKSQKGLISFCELESKEAVIDGAKKIIGSRVAPKSSPLFQEFKIWQNLNNVSVRKKGSKKRVAKAQNQHSLFEEEKEIFTLDLEAKEKLFEELNLKGNLSAKKCLEFLGLNSAEWELNFTQLEGNRTNKSLYEAYLKILEIEGYDVKDLLKVKSNKDEVELDDLKVSASEIKNMVRDIFKTNEIDTEILDFDAEADGKAFEKQQSYQLWHLLYSYEGDDSQSGNEKLYELLAKKFGFKREHAQILANVGLVDDYGNLSSKAMRKIIVHLKQGFAYAGRKDRPNEPSACEYAGYRHSKHSLDKEELDNRVLEDKLELLKKNSLRQPVVEKILNQMINVVNALIEKNSERDENGNITKYFKFDEIRIELARELKKNAEERRDMDSQVREGKLRNERVFNILQKEFGIKNPTRNDIIRFRLYEELKNNGYKDLYTNTYIPREILFSNQIDVDHILPQSRLFDDSFSNKTVVFKKDNLDKGNMTAFDYIKSKYGEEKLNDFVERIENLFELGRKNIEEGISKAKYQKLLKQEAEIGDGFIERDLRESQYIAKKAKELLFKIAPSVVSTSGRVTDRLREDWGLINIMKELNLPKYRALNMTEVQERRNGHKVEVIKDWTKRNDHRHHAMDALTVAFTKHNHIQYLNYLNARKNESHKLHGNIIAIETLETELKIDDNGKKKRVFKEPIPNFRQVAKEHLENVLISHKAKNKVVTKNKNIISGKEKAQITLTPRGQLHKETVYGKYRFYQSKEEKVSAKFDLETIEKVTNPVYKKALLQRLAENGNDPKKAFAGKNALNKTAIYIDLENDIKVPESVKLVWLEEDYSIRKDVTPENFKDEKSIEKILDEGVKRILKNRLKEFSGDAKKAFSDLDKNPIYLNKEKGISIKRVRISGVKNAEPLHYKKDHFGNDILDENENKIPVDFVSTGNNHHVAIYREPALDKKGQPILDEFGNQKYNLQEKVVSFFEAVERVNQGLPIIDKTHNQHLGWQFLFTMKQNEMFVFPNENTGFIPTEIDLLDPKNKKLISPNLFRVQKIATKNYFFRHHLETTVETPKDLAGVTYKPQLGLNGITGIIKVRINHLGDIVSVGEY

SEQ ID NO: 6643 - protein, 1256 aa, synthetic construct
  REGION 1..1256: note = Synthetic
MKKIIGLDLGTSSIGWALVNEAENDGEKSSIIRLGVRVNPLTVDEQQNFEKGRSITTNADRTLKRSMRRNLQRYKLRRENLIELLKSNGFIVNETILSENGNRTTFETYRLRAKAASERISLEEFARVLLMINKKRGYKSSRKAKGSEEGALIDGIEVAKRLYDEDLTPGQMSFTLLQTGQKYLPDFYRSDLQAEFDKIWTKQREFYPDILTDELKENLRGKNGKASWAICEKPFGIVGIKREGKSDAKRKENFAWRVDALSVKTDLERLAIVLQDINSQIYNSSGYLGAISDRSKELYFNKQTVGQYQMAVLDANPNASLRNMVFYRQDYLDEFNTLWETQAKFHPELTEDLKRQIRDVVIFYQRRLKSQKGLIRFCEFESRKIEVEIDGKKKIKTVGSRVIPRSSPLFQEFRIWQTLNNLEISTSEGKRELEQEEKEFLAKELATKEKLSKAEILKLLLGNARGYDLNFKDVQGNHTRTKLFQACPETADLPEDELYALWHLLYSFEGDNSNMGNEKLVKKLAACFGQECAVKLANIAFQDDYGSLSAKAIGRILPHLKDGNKYDVACEYAGYRHSASSLTKEEIENKTYKDRLEVLPKNSLRNPVVEKILNQMVNVINGVIDAYGKPYEIRIELARELKKNAKEREELTKSIAETTRAHDEIKKRLREEFGLNYVSRNDIIRYKLWEELAKNNYCTLYSNTKITKAALFSGDFDIEHIIPQARLFDDSFSNKTLELRSINLEKGSLTAYDFVKGKYGEEGLVEYLHRVETLHKGGAIGRTKCNKLKMQEKDIPEGFLNRDLGNTQYITKYAKAMLGDLVKRVVATTGAITDVLREDWQLVDVMKELNWDKYDRLGLTYYEENRAGKRFGRIRDWTKRNDHRHHAMDALTVAFTKDALIQLFNNLNASLTPNSNAYALKTSYMENGIVKPPIPLNEFRAEAKKHLANTLISIKAKNKVVTKNINTTKKPVGMNKKTQLTPRGQLHNETIYGSLQRYKKDKKGVSFETVYTIRKEVSPDLKLDKVIDVGIKRILQIRLDEYGGDAKKAFSNLEENPIWLNEEKGIAIKRVTISGINNAEALHHKRDKDGVPILDENGNRQPVDFVNTGNNHHVAIYSDAYGGLQERVVSFYEAVARRNSGLPIIDKDYRADEGWEFLFTMKQNEYFVFPNAETGFNPHEIDLLDSDNYARISPNLFRVQKLASKDYWFRHHLETIVETKNELKGIAWIRTSVKGIDKIVKVRINHIGQIVTVGEY

SEQ ID NO: 6644 - protein, 1177 aa, synthetic construct
  REGION 1..1177: note = Synthetic
LEGIYSKRKRDEAKRENLQWRVNGLKEKLSLEQLVIVFQEMNTQINNSSGYLGAISDRSKELYFNKQTVGQYQMEMLDKNPNASLRNMVFYRQDYLDEFNMLWEKQAVYHKELTEELKKEIRDIIIFYQRRLKSQKGLIGFCEFESRQIEVDIDGKKKIKTVGNRVISRSSPLFQEFKIWQILNNIEVTVVGKKRKRRKLKENYSALFEELNDAEQLELNGSRRLCQEEKELLAQELFIRDKMTKSEVLKLLFDNPQELDLNFKTIDGNKTGYALFQAYSKMIEMSGHEPVDFKKPVEKVVEYIKAVFDLLNWNTDILGFNSNEELDNQPYYKLWHLLYSFEGDNTPTGNGRLIQKMTELYGFEKEYATILANVSFQDDYGSLSAKAIHKILPHLKEGNRYDVACVYAGYRHSESSLTREEIANKVLKDRLMLLPKNSLHNPVVEKILNQMVNVINVIIDIYGKPDEIRVELARELKKNAKEREELTKSIAQTTKAHEEYKTLLQTEFGLTNVSRTDILRYKLYKELESCGYKTLYSNTYISREKLFSKEFDIEHIIPQARLFDDSFSNKTLEARSVNIEKGNKTAYDFVKEKFGESGADNSLEHYLNNIEDLFKSGKISKTKYNKLKMAEQDIPDGFIERDLRNTQYIAKKALSMLNEISHRVVATSGSVTDKLREDWQLIDVMKELNWEKYKALGLVEYFEDRDGRQIGRIKDWTKRNDHRHHAMDALTVAFTKDVFIQYFNNKNASLDPNANEHAIKNKYFQNGRAIAPMPLREFRAEAKKHLENTLISIKAKNKVITGNINKTRKKGGVNKNMQQTPRGQLHLETIYGSGKQYLTKEEKVNASFDMRKIGTVSKSAYRDALLKRLYENDNDPKKAFAGKNSLDKQPIWLDKEQMRKVPEKVKIVTLEAIYTIRKEISPDLKVDKVIDVGVRKILIDRLNEYGNDAKKAFSNLDKNPIWLNKEKGISIKRVTISGISNAQSLHVKKDKDGKPILDENGRNIPVDFVNTGNNHHVAVYYRPVIDKRGQLVVDEAGNPKYELEEVVVSFFEAVTRANLGLPIIDKDYKTTEGWQFLFSMKQNEYFVFPNEKTGFNPKEIDLLDVENYGLISPNLFRVQKFSLKNYVFRHHLETTIKDTSSILRGITWIDFRSSKGLDTIVKVRVNHIGQIVSVGEY

SEQ ID NO: 6645 - protein, 1368 aa, synthetic construct
  REGION 1..1368: note = Synthetic
MKRILGLDLGTTSIGWAFVNEAENETEMSFIVKTGVRVVPLSTDEQISFEKGQSITINADRTLKRGMRRNLHRYKMRRAAVIDTLKSIGFITDETPLSENGNDTHSTYKLRAKAVSEKLSKQDFARVLLMINKKRGYKSSRKAKNQEEGQLIDGMAVAKRLENEKLLPGQLSFILLNEGKKMLPTYYRSDLQNEFNAIWDFQKQFYEEHLTEKHKEALEGLNKTATGQYFEKTIKTQRAENKGKNKKLQEYEWRNKAITEQLTLPQVAYILTEINNQINQSSGYLGAISDRSKELCFNDLTVGQFQYNQLKQNPLASLKNQVFYRQDYMDEFDAIWKEQSKHYSELNKKIKDKLRNITIFYQRKLKSQKGLINICELEGVERKVMTDGELKKKLIGPRVAPKSSPVFQHSKIWQNINNIILKNEKTKEIVELGEDLRELLFQYLNWKDNISASQLINFLIKNSDIPKGKWKVNLEKVEGNSTNAVLLSVYEKITEIEGYDKLKFSNPNEELIKSLKVCFTEIGVEPQILEMDYTLTGNDFSKQPAYELWHLLYSYEDDCSITGTESLEQKLQENFGFKKEHAKLLVGVNFQQDYGNLSVRALRKIYPYLEEGKVYSEACALAGYNHSKSLTAEENNKRILLDKLELLKKNSLRNPVVEKILNQMIHVVNAVIENPEMGKPDEIRVELARELKKTAKQRNELIKVITKATTDHIAFRDKIKKEFGLPYVSRKDLIKYKLYLELKSNGFRTLYSNTYIKPEELFTKKFDVEHIIPQSVLFDDSFSNKTLELRDVNLEKGNETAIEYCRRKGWGDDFKSRTDEIFKANGIKYGKRKKLLMTKTEIPEGFLNRDLGNTAYISRKATEILQQLTRKKVVSTSGKITSKLRSDWELINVLQELNWDKYEVLGLTYYDYNKEGKALARIKDWTKRNDHRHHAMDAIAVAFTKPAFIQYLNNMHAKSEKAGDIYGIEKKYTYRDKEGGRKFHKPFENIREESKNHLASILVSHKAKNKVVTRNKNKIKIKGNNSFKTKTELTPRGQLHKETIYGKSFYPEVKEEKINGSFSKEKIKTVTKPIYREALLKRLSENNHDAKKAFTGKNSLTKNPIFINEKTNVPDKVKTQQLQHQFTIRKVITPDLKIDKVTDEGIKRILEERLKEYNGKKKAAFSNLDENPIWLNKEKGISIKRVTISGVSNAEPLHIAKDHLGNDVLDEKGNTVPTDYVSTGNNHHVAIYKDEKGNLQEEVVSFYEAVIRKNNGLPIVEKNHPKGWEFLFTLKQNEMFVFPNEDFDPLNIDLYDDANRELISRNLFRVQKIGSKDYWFRRHLETTLVTTKELNEVVYHRKRNPNSISKIIKVRLNHIGEIVQIGEY

SEQ ID NO: 6646 - protein, 1449 aa, synthetic construct
  REGION 1..1449: note = Synthetic
MTKNILGLDLGITSIGFAQVIESNTPEKSEIIQIGSRIIQYDNFNKVDKSGKVSESKNPEQDFTSGKGLSPNAGRTLKRGARRNLDRFQLRRKNLVNVLEKANIITNETILTENGKHTTHETWRLRAISVTKQIEKEQLARVFLAINKKRGYKSSRKAKNEDEGQAIDGMAIAKKLYKENLTPGQLVYQLLKEEKKSIPDFYRSDLQSEFDKVWNFQKQFYPEIFNDSFYKELLGKGQRATSASFWNKYKFNTAENKAKSRDEKKLQAYKWRSDAIVKQLEKEEAAFVITEINNNLNNSSGYLGAISDRSKELYFNKETVGQNLYKQILQNPHTLLKNQVFYRQDYLDEFEAIWKEQAKHHIELTEDLKSEIRDIVIFYHRKLKSQKGLVSFCEFESQEKIIDGKKKTVGFKVAPKSSLLFQEFKIWQVLNNVLVRKKGSKKRLPKNIEQTKLFDEEKEIFDFDLETKQSLFEELNIKGNLKSSRVIEILGYKPTECEINYSELEGNRTNQVLYNAYLKILEVEGYNEDLLKLSDKDEINVNDLKTPASEIKEMVKSIFEVLGIDTLILEFDAEIDGKEFEQQASYQLWHLLYSYEGDDSPSGNEKLYELLTRKFGFKREHAQILANVTFSDDYGSLSSKAIRKIYPHIKELHYDKACVMAGYRHSASSLTKEEIAERPLKNTLELLKKNSLRNPVVEKILNQLVNVVNTIIDKNSKKDENGNVIEYFKFDEIRIELARELKKNAAERAEMTTNINAANVAHQKIFKILQSEFGIKNPSRNDIIRFRLYEELKNNGFKDLYTNTYIPRNIIFSKQIDIEHIIPQSKMFDDSFSNKTITYRKDNLDKGNKTAFDYIESKFGEIELDLYTKRIETLYELGKKNKDEGISKAKYQKLLKKEIEIGDGFIDRDLRDSQYIAKKAKNMLLEISRTVVSTSGSVTNRLREDWGLINIMQELNFEKFKSLGLTEKVEKKDGTFKERIIDWSKRNDHRHHAMDALTVAFTKHNHIQYLNYLNARKNENHKLHNIIVGIEALETKILIDDEGNKKRVFNLPLPRFRQHAKEHLENVLVSHKAKNKVVTKNKNKIKTSNGNKVKIELTPRGQLHKETVYGKYKYDVNKEEKVSSKFDANTIKKVSNPLYRKLLSERLEKNGNDPKKAFGGKNVLSKNPIYINQDKTKTLPETVKLTWLEEDYSVRKEITPENFKDAKNIEKVFDAKVKKILLDRLKQFKNDSKKAFSDLDKNPIWLNQEKGIAIKRVTISGVKNAEFLNYKKDHQGNFILDNKEEKIPVDFVSTGNNHHVAIYRDEKGKLQERVVSLFEAVQMVNAKEPIIDKQFNQGLGWEFLFTMKQNECFVFPNEKTGFNPSEMDLLDPKNKKLISPNLFRVQKISNKNYVFNNHLETKAIDGNILKNKKDLSGIMYYFIQTPNNLENIIKVRINHLGDIVGVGEY

SEQ ID NO: 6647 - protein, 1393 aa, synthetic construct
  REGION 1..1393: note = Synthetic
MKKVLGLDLGTNSIGWALVNEAEKKDEASQIIKLGVRVNPLTVDEKTNFEKGRPLSTNADRTLKRGMRRNLQRYKQRRENLIEILIKNGIIQKDTPLTEVGKGTTYQTLSLRAKAARDKIELEDFAKVLLAINKKRGYKSSRKASNDEEGQPIDGMAIAKELYERNITPGQYVLELLEKDKKYIPDFYRSDLKQEFNAIWNNQKAFYPDILTNELYKELEGKNKSQTWSICQKPFGIVGIKRTAKGKEKNLENFQWRAQGLSEKLDLEHLAIILQEINNSINQSSGYLGAISDRSKRLYLNKETVGENLYSQIAKNPHTSLKNQVFYRQDYLDEFEQIWETQSKFHRQLTEELKKDVRDVIIFYQRKLKSQKSSISFCQFESWEQEYVEKETGKTKKRTVGRRVIPKSSPLFQEFKIWQNLNHLVFINSETNETIEVKELDQEIRQEIFDELNLRGDLSPNDLLKILKSEFKIGKLSDWKCNFEKIEGNRTNAALYNIYQKISDFEGYGVDWKKADAGKINKELKATFPEIGIDASVLDFDAEKDDFTKQSSYQLWHLLYSAEEDDKISEDEKLIYGNSSVALKKKLHQKFGFKPEYATMLSNMSLKTDHANLSAKAIRKILPHLKDGHLYSEACSLARYNHSRSLTGEELANRELKPKLELLKKNSLRNPVVEKILNQMVNLVNQLIDTYGKPDAIRIELARELKKSAKERADMTKGIADATRRNDEIKKIIRQKSGIPNPTKSDVVRYRLWQELEPRGHKDLFTDTYIPLEKIFSSEIDIEHIIPKALLFDDSFSNKTLSYKSVNLKKGNRTALDFIAQDYHSKLEDYTKRVETMYKDGHISKGKRNKLLMALVDIPDGFIERDLRNSQYIARKAKQMLFEVFPEVIATTGSITDKLREDWDLINVMKELNLPKYRALGLTEFEERLDKGTEELFKHEVIKDWTKRNDQRHHAMDALTVAFTTHNHIQYINNLNARRDSALDNHPIIKNIENLITEINPKGKRIFKPPMERFRENAKAHIESILISFKNKNKVVTKNVNITKTKNGENRKVHLTPRGQLHKESIYGKSKRPMDKLISLNDKFSTKQASLIINSNEKEAVLEHLKKYQGISEKAFDSKTLRKDPILINEQPLKQVKVFEEVFTIRKDINPENFKTLKHLDKIVDEGVKQAMKTRLKEYNGDFKTAFSDLDKNPIWLNEEKGISIKRTKITGVSNAEALHHAKDHLGKILKDKNDNEIPVDYISTGNNHHVAIYKDKDGNLHENVVSFFEAVEKVNQGLPIIDKNYNAHLGWGFQFTMKQNEMFVFPNVEAGFNPLEIDLLDKKNQKEISQHLFRVQKFTIKDYFFRHHLETNVENNPENKNVTWKREGLSGIEGIVKVRINHIGEIVEVGEY

SEQ ID NO: 6648 - protein, 1439 aa, synthetic construct
  REGION 1..1439: note = Synthetic
MKKILGLDLGTNSIGWAVVNEAENETEQSSIIKIGVRVNPLTTDELGNFEKGKSITTNSDRTLKRSARRNLQRYKLRKEALIKILKNNNFISNDTILSEQGNKTTFETYSLRAKAVEQEITLTEFARVLLMLNKKRGYKSSRKAKSTDEGQLIDGMSVARELYDRDLTPGQFLLEQIYKGVKTEPDFYRSDLQSEFDKIWEYQKQYYSELFTDELKEQLKGKNKGQTWTICQKAFNIEGESRTTKGVEQKIENYQWRADSLKEQMTLEQLTIVFQEINKQLNKSSNYLGNISDRSKELYFNHQTVGQYLYSKLSQDSHYSTKNKVFYRQDYLDEFESLWESQKKYHKELTDELKKEIRDVIIFYQRPLKSQKGLLSICELEGREIEIEKNGKKITKIIGPRVAPKSSPIFQESKIWQILNNVQIEGNVIPNVQQDLFGEATEFKYGKRPLTQEEKQTLFAELNIKEKLTSSQVLQILEMKGNYKLNYKEIEGNKTRASFFKAFQEIIELSGHEIEFTKKKAHKIEEELKEIFVALGFSTEILGFKTDLTKEEIKDQQIEKQAYYKLWHLLYSFEGDSSKLGNEKLIQKVMELCKMPKEYATILSNITFPLDYSSLSTRATLKILPFLKQGFMYSDACEKAGYKHSKKSLTKEEIENKILKDSLSQLPKNSLRNPVVEKILNQMVNVVNSIIKEYGKPDEIRIELARELKKSAKERDELTKAVNSSKKDHEKIVSILQSSFNIQNPSRNDIIRYKLYEELKPNGYHTLYTNTYIPQERLFSKDFDIEHIIPQALLFDDSFANKTLEKRDANIEKGRMTAYDYVLEKRGEQGIEEYKSKIDNLNISSSKRKKLLMRGNDIPDGFIDRDLRNSQYISKKSREILEQIVKVVNTTTGSVTDRLREDWQLVDVMKELNWNKYDKCGQTESYTNRDGNVIKKIKDWTKRNDHRHHAMDALTIAFTKPSYIQYLNNLNARVEKSVEEHLDLDNVEIRLLDKDKRSSAVYGIETKELYRDKNGKLRFNPPMPLDELRKEAKKHLEDTLVSIKAKNKVVTRNTNTTKTRNGEKQIIQQTPRGQLHLETIYGRIKQYETKVETVNASFDIEKIQTVANKEYRDALLKRLQEFNNDPKKAFTGKNTLEKNPIWLNKLHTDQVSTKVKIVNFVDVYTIRKPIDKDLKIDKVVDVKIRKILEARLEEYGGKANDAFSNLDENPIWLNKEKGIAIKRVTITGISNATALRSKRDKEGNFILNEDGTKQAVDFVNTGNNHHVAIYRKPVLDKKTGQQQFDDNGNAKFELEEKVVSFFEATIRANNGEPIIDKEFNKDKGWQFLFTMKQNEYFVFPRYETTKDVNGNEVTIKTFDPKDIDLLNPDNYSLISPNLFRVQKLATKNYCFRHHLETTVDDIKELKGITYKSQLGLNGIIGIVKVRVNHIGQIVEVGEY

SEQ ID NO: 6649 - protein, 1392 aa, synthetic construct
  REGION 1..1392: note = Synthetic
MKRILGLDLGTSSIGWAVVNEKENADEQSSIIKLGVRVNPLTVDEQRNFEAGKPITTNADRTLKRSMRRNLQRYKLRRENLLEILKDNHFITNETILAENGNRTTFETYRLRAKAAVEEISLEELARVLLMINKKRGYKSSRKVNADEDGKIIDGMSIARELYDEGCTPGQYVLSLMKTGKRYVPDFYRSDLIAEFDRIWNFQKQFYPEILIDELKEELANKNKKQTWAICAKPFSLVGIKREIKGSEQKKENYEWRVASLSGQTDLERLAIILQEINGQISSSSGYLGEISDRSKELYFKRQTIGQYLMERLDTNPNYSLKNKVFYRQDYLDEFEKIWETQTKFHAELTDKLKREIRDVVIFYQRPLKSQKGLISFCEFENKQIEVTVDGKKKLKTIGMRVCPKSSPLFQEFKVWQILNNIQVSGKVIPVQDTDLFGTTSRMEQGKRFLYQGEKETLFYELNIKEKMSKNEVLKLLFKNHKELDLNYKEIEGNRTMAALIKACQTIIDMSGHWEYDFSKMQTKDVMHIIETVFRGLGFNTDILHFDASVEGKAFDKQPAYMLWHLLYSFAGDNSKSGNEKLIHKISELYGFDKDYASIIAGISLQQDYGSLSSKAMRKILPHMKDGLEYSVACGYAGYRHSSESLTREELDNKVLKDRLGLLPRNSLRNPVVEKILNQMINVVNSVVEEYGKPDEIRIELARELKKSASEREELTKAINKTTKEHDEYKKILQTEFGIANVSRNDIIRYKLYMELKDNGFKTLYSNTYIPQEKLFSKEFDIEHIIPQAKLFDDSFSNKTIEARAINIEKSNATAYDFVCSKYDAEEIKRYEVRIEELFRNGIISKTKRDKLMMKEADIPDGFIERDLRDSQYIAKKAREILCDIAREVVTTTGSVTSRLREDWLLVDVMKELNWDKYDRLGLTEIVEDKDGRKIRRITDWTKRNDHRHHAMDALIIAFTKRSYIQYLNNMNARSDKSGSIYAIEKNELYRDKGKLKFYPPIPLDVFRTEAKRHLDNILVSIKAKNKVVTRNLNVTKTRNGKNKKMQLTPRGQLHNETIYGKIKQYVTKEEKVNASFTEDKISTVANQKYRMALLERLKRYNGNSKKAFTGSNTLQKNPIYLDDMHTMTVPEKVTTVTFEDVYTIRKEISPDLKIDKVIDVHVREILKARLAEYSNDPKKAFVNLKDNPIWLNKEKRIDIKRVTIRGVSNAVALHDKHDNKGLLVFDNNGIKQPTDFVSTGNNHHVAIYRDAEGNLQDTIVSFYEATMRANMGMPVVDKDYKKSEGWQFLFTMKQNEYFVFPNQETGFNPNEIDLLNPNNYAEISKNLFRVQKLFKAIGREYVFRHHLETSVDDNNKLQEIAWKRINSLNKLKDIVKVRINHIGQIVAVGEY

SEQ ID NO: 6650 - protein, 1386 aa, synthetic construct
  REGION 1..1386: note = Synthetic
MKRILGLDLGTTSIGWALVNEAENSEEHSSITRLGVRVVPLTVDEQTNFEKGKSITTNADRTLERSMRRGLQRYKLRRAALIQCLKKAGIINDDTILTENGPRTTFATLRARAKAATEEVSLEEFARILLMINKKRGYKSSRKTQSKEEGTLIDGMEIAKILHDEQITPGQYIYSLLQADKKYIPEFYRSDLQAEFDAIWRFQRLYHAEILTDDFYQQLQGKTKTKTTSIFLAKYGIYTAENNGSNRRLQQYKWRVEALQRELTNEELAYVIADVNGAISGSSGYLGAISDRSKELYFNQQTIGQYLLQEIEADPHYSLKNKTFYRQDYLEEFEKLWHVQSQFHPELTPELRKYVRDIIIFYQRPLKSKKAMLDICTFENRQVEVTEDGKTRTKTVGLKVCPKSSPLFQEFKIWQILNNLEVEYEAPGEDLFAETEQRRLLSLEEMEILAHELLYKDKLTKREALSILFGKSAKKYDLNYKEIEGNRTIAALYRAFFNIFALSGHEEYDTNKLTANKIEEIASNLFRLLGFNEGVLQFDASAEGHAFDQQPLYQLWHLLYSYESDNSKTGNEALIKKLQRLCHCDREYAQVLANVTFQEDYRSLSAKAMRKILPYMKQGLTYDKACEEAGYRHSERSRTKEELANREYLNRLELLPRNALRNPVVEKILNQMINVVNAVCEEFGKPDEIRIELARDLKQNAKERERTTADINAANLLNEKYRKELETEFGIQHVSRNDIIRYKLYLELKGNGFKTLYSDTYIPKEKLFSKEFDIEHIIPQARLFDDSFSNKTLEARDINIEKSNATAFDFILSKWGEEKAAAYKAKIDDLYRKGIIGKSKHDKLLMREADIPDGFIDRDLRNSQYIAKKAREILEDLVPVVTPTIGSITDRLREDWQLVDVMQELNWEKYERLGLTETYKDKDGREIRRIKDWTKRNDHRHHAMDALTIAFTKLAFIQYLNNLNARSDKGSSIYGIEQRYLYRDSHGKLRFRAPMPLDQFRAEAKRQLEDIFISIKAKNKVMTQNVNKSKIKGGTRRKVQLTPRGQLHNETIYGHTLHRVTEVVKVDGKMTFERAQLVAKKMYREAILARLADFGGAPKKAFTGKNLPKKNPIWLNEEHAEQVPPRVKLVYYEDYYPIRKPVSPDLKIDKVIDVGVRRILEERLNEFGGDAKKAFSNLEENPIYLNKEKGITIKSVRIRGVLSAISLHEAKDHFGRVITDSRGKHREVDFVQTASTHHIAIYRDADGSLQDVAVSFLDATTRKRLGQPVVDTDYKSSEGWKFLFSMKQNEYFIFPDVEHGFDPSEIDIFDPRNKAEISKRLYRVQKMSKTDGGRDYFFRHHLETTVEDNNALMGIAFKRIRNVKALEDIVKVRVNHLGDILPAKEN

SEQ ID NO: 6651 - protein, 1396 aa, synthetic construct
  REGION 1..1396: note = Synthetic
MKKILGLDLGTTSIGWALVNEAESSEEKSSIIKLGVRVNPLTTKEQSDFQEGKPISTNADRTLKRGMRRNLQRYKLRREKLIELMTDLGWIDESSVLAEQGPETTFETLRLRAKSVDEEVSLLELARILLSINSKRGYKSSRKAKNDDEGALIDGMSIAKKLYDEGLTPGQFVYNRMSEGKYSVPDFYRSDLVAEFDRIWDEQKKYYPALLTDELRENLRGKNKGQVWKICESAWNIVGKKRDKKGRELSLENYQWRTEALSAELPLEDLTCVLQEISSQINLSSGYLGKISDRSKELFFGKETVGQYLMRHFDENPHFSSKNVVFYRQDYLDEFERIWETQTKFHPELTPELKHKFRDRIIFYQRPLKSQKSLVSICEFEHKEVKVLVDGVAKTKVVGPRVCPKSSPLFQEFKIWQILNNLKVNGERIPKDKRDILFEELSWKGGMKKSGVLKLLYGTASRDLDLNYKEVEGNNTLSSFVKTWLNMLETTGLDITGYEKQPAVKLIPLLRQQFLQQGWDASLLENNILALGDKFEHHPLYRLWHLLYSYEGDKSKTGNASLIKKLQEGFGFDEDSARILAGISFTPDYGSLSAKAIRKILPFMENDGQEYSEACASAGYRHSAKSLTKDEIANRVLKERVELLPKNSLRNPVVEKILNQMINVVNAVIDEYGKPDEIRIELARELKKSAKERDQMTSAIAKSTKEYEELAEKLRSEFGILNVSRNDIIRYRLWKELENNGYKSLYSNKYIPKEKLFSKDVEIEHIIPQARLFDDSFANKTLEYSDVNREKGNSTAMDYVHNKYGAEEAENYRQRVQKLYNDGFIGKTKKEHLLMRESEIPDGFINRDLRETQYIAKKAKEILEELVPYVVSTTGSITDRLREDWQLVNVMQELNWDKYSALGLTEVREDRDGRRIRKIKDWTKRNDHRHHAMDALTIAFTKRSYIQYLNYLNARLQKDCGDEAIINLDEYVLEDLNNVEKTQIAAVVRAIERSQLYRDGGKLRFCPPMPLDEFRAEAKRHLEAALVSIKAKNKVVTRNTNITQKAGGTNRKVQLTPRGQLHNETVYGKTKQYSLAEEKVGSSFTLEKIATVAKKAYREALLARLEEFGGDPKKAFCGKNSLDKNPVWLNPAHSASVPVRVGVVGMTETYTVRKEISKDLKLDKVVDAGIRSILKARLEEYGGDAAKAFSNLDENPIWLNREKGITIKRVTISGVSNATALHDRHDNVGDVILDGDECRMPSDYVSLSNNHHIAIYVDSDGNYQEQVVSFFEATARATDGVPIVDRDFKKDEGWSFLFSMKRNEYFVFPNPQTGFDPNEVDLMNPDNYSQISPNLFRVQKLATNNYTFRHHLETNVEENVLLRDSTWKRIQTTNYLKGIVKVRVNHLGEIVAVGEY

SEQ ID NO: 6652 - protein, 1050 aa, synthetic construct
  REGION 1..1050: note = Synthetic
  REGION 1041..1050: note = misc_feature - Xaa can be any naturally occurring amino acid
VTNLAKRCEYPNNYSKLAGKDHRVLNSTTYHNATTPRMKTILGLDLGTTSIGWALVKEAEPFSDEKSEIVRLGVRIVPLTVKEKTSFENGKSITTNADRTQKRGMRRNLQRYKLRRQALIEELKDAGWIDDDFIFSETGPGSTFRTLRLRAKSASEEVTLGDLARTLLQINKKRGYKSSRKAASSDDGQAIDGMAVAKEMYDKGLTPGEYVYQRMLEGKYAIPEFYKSDLQDEFDRIWTLQKSFHSELTDELYRKLSDRNKSQTWAICREELGIQGLKSKFTGKDRLREAYRYRHLAASQEVDLEVLTCALQDINGQKASLSGLLSKISDRSKELYFNNLTVGQMLLKRIEDNPNNSLRNIVFYRQDYLDEFERIWTEQSKYHAELTPELKKRLRDIIIFYQRPLKSQKGLISLCELETRKVEVTVDGVKKEKNIGPRVCPRSSPLFQEFKVWQTINNILVNGTALDDEEKSVIAKELMFKDKLKDSDLLKLLFKTTKGLSVNFKEIDGNRTMATLMKACFKIAGNLGYDDTALAKLSSEDQIDRIEEIFKEQGFNTEFLHFDSSLASPEFENQDSYRLWHLLYSYEGDKSASGNESLVKCIMDLCSMDEGSAKILAACTFLPDYGSLSAKAMRKILPYMKDGLEYSAACTMAGYRHSKRSLTKEELDTKEYSDRLSILPKNSLRNPVVEKILNQMINVVNSVIDVYGKPDEIRIEMARELKKSAKEREEAQRDIASATAENQKIIEILKGEPFYLPFPTRNDIIRYRLYQELAQNGYKTLYSNTYIPKDKLFSKEFDIEHIIPQALIFNDSFANKTLESRQCNLEKGKATAMDYVKSKYDEAGVQTYHNRVNGLIGKGISKTKAKWLLMEGKDIPEDFINRELRDSQYIAKKAREILESLVKFVVPTTGSVTARLREDWQLVNVMQELNWEKYARLGLTGVREDKDGRRIPFIQDWTKRNDHRHHAMDALTIVFTRRQFIQYLNHLNSKIDAVSWDKKDLDLRDYDLDDIKFGDMSAGDRYGIVKALQDRFLYKDGNDKXXXXXXXXXX

SEQ ID NO: 6653 - protein, 1404 aa, synthetic construct
  REGION 1..1404: note = Synthetic
MIQRRKILGLDLGTNSIGWALVEEKRGSDKKLLDGRIIKLGVRVNPLTVDEKSNFEKGKPISTNANRTSKRSSRRNLQRFKLRREHLFNSLLKAGIITRDSILAENGNGTTHQTLRLRAKAAREKIELEELARVLFALNKKRGYKSSRKTKTQEDGVAVDGMSTAKILYDNNLTPGQFALEQLKEGKKYIPDFYRSDLQEEFDRVWLHQKAYYPEILTDALYKELKDKNKKQTWAICKEPFSIEGIKLNGNKHEQKIQRYQLRVDALSHQLSLEHLVIVLQEINSDKNKSSGYLGAISDRSKILYINNQTVGEYLWKQIEENPHIALKNQVFYRQDYLDEFEKIWETQTKFHKELNPALKEEIRDTIIFYQRKLKSQKGLLSFCEFESWEAIKRDKEGKPILNKSTGQPKMQITGHRVIPKSSPLFQEFKIWQNINNLRFIPKNEGTEGQYTLGEEDKQLLFDELNIRGSLSEKEVLNVLGLSDKEWKTNQPVQDRNKKTVRPIEGNRTNQALYNVYQAIAEREGYGFDWSIKSASEIKAELKAIFPEIGIDAEILDFDANKEGELFDKQPSYQLWHLLYSAEDDQKVSEEDRLIYGNADVNLKKALHSKFGFKPEYATMLANISLQEDHGSLSARAIRKILPFLQAGHIYSEACQLAGYNHSNSLTKEERKAKGLKGKLEVLPKNSLRNPVVEKILNQMINLINQVCDEYGKPDEIRIELARELKKSAKEREEAISSINTATKKNEEIRKIIRKDFGFTPTKNDVIRYRLWQELQHNGGRTIFTNQKIEYRELYSKNIDIEHIIPKALLFDDSFSNKTLAFRSVNLKKGDRTAIDFIEEDYLSEVNAYKNRVEMLYKAEAISKAKYQKLLMPANKLPDGFIERDLRNSQYIAKKAKAMLEEVFESVVPTTGSITDQLRADWDLINVMKELNLPKYKSLGLTKVEKRWDSGREKEKEVEVIKDWTKRNDHRHHAMDALTVAFTSHNHIQYINYLNARRDENHKKHSNIMAIEQLIKKDRKFEPPMNNFRQEAKKHLEQILVSFKTKNKVVTQNINKAKGSHKNRIQLTPRGQLHKETVYGQILRPSKKPTKLNSKFSIEQLALVVHPEQKAIVEAHLEKFNKSPELAFSTKTLKKSPLEYKGQPLKEVYCFDIIYTIRKEVNPDNFKDQKSIEKVVDVKQRELLKSRLAESGGNAKAAFSDLDKNPIWLNKEKGIRIKRVTITGVSQVEALHNKKDHFGKEILDENGNSQPADFVSTGNNHHIAIFRDKEGKLQESVVSFYEAVARINNGLPVIDKTLNADMGWQFLFTMKQNEMFVFPGEDFDPSEVDLLDEKNSAQISKHLFRVQKIASKNYFFRHHLETTVETIKVLNGVAYHSQLGLNSIEGIIKVRINHLGKIVHVGEY

SEQ ID NO: 6654 - protein, 1432 aa, synthetic construct
  REGION 1..1432: note = Synthetic
MKKILGLDLGSSSIGWALVNEGANDEEKSSIIKLGVRVNPLTVDEAQNFEKGKSITTNADRTLKRGMRRNLQRYKQRREALVEVLKKHEFITAGTLMSEQGNKTTFETYRLRAKAVEEEISLEEFARVLLMINKKRGYKSSRKAKGDEDGVLIDGMDVAKKLYDEDLNPGELCLQLLEAGKKTLPDFYRSDLQDEFDKIWNFQKQFNPESFCDTAKEEVRGKNRTQTWTILSKYFVWTEGDSVWNNEEARTEERIKEYKLVGIKRTTKGYEQKLENYRWRVQALSEQLNPEIIAIVLQEINGQISASSGYLGAISDRSKELFFNHQTVGQSLMSELDKNPNGSLRNKVFYRQDYLDEFNTIWEKQSLYHKELTVELKKEIRDIIIFYQRRLKSQKGLISTCEFEQREIIVEKDGKRKTKIIGCKVIPRSHPLFQEFKIWQTLNDVEVYVADRRTKRKQDRKSTTLFSDTEDILLVEGKRYLYQEEKELLAKELFVRENMKKAEVLKLLFEDPKELDLNFKQIDGNRTGFALFSAYSKMIEKYGYESVNFKNSADEIIEKLQIIFADLGWNTELFSIDLSKDDKELEKQPYFRLWHLLYSFEGDNTPTGNGKLIEALMRLCSVEKEYASVLANVSFQEDYGSLSAKAIKKILPYLKEGNQYDVACEYAGYRHSKSSLTREEIDNKVLKNRLEILPKNSLRNPVVEKILNQMVNVVNAVIDTYGKPDEIRVELARELKKGAKEREELTKSIAQNTREHEAIRQLLQTEFGMMHVTRNDIIRYKLYEELKDNGYKTLYSDQYIPREKVFSKEIDIEHIIPQARLFDDSLSNKTLEYRAVNIEKGNKTAYDFVKEKYGNDGLRRYLNHCEALFKDKKTKLKKLKMEDQDIPDGFIDRDLRNTQYIAKKALSMLSEISRRVVATTGSITDELRKDWQLVDIMKELNLPKYEALGFVETFKDKDGRIIKKIKDWSKRNDHRHHAMDALTVAFTKDVFIQYFNNKNAFWMSGSKEHANITAIKNKYFEKGKALAPIPLEQFRTEAKHHLENILVSIKAKNKVVTNNINRTKKKNGENLKLQQTPRGQLHLESIYGSYRQCIIRDEKVNASFDASKIANVSKSAYRNALLKRLEAYDNDPKKAFTGKNSLDKNPVYLDENKMEKVPDRVKIVEFETVYTIRKPIDPKLSIDKVVDARIRTLLKKRLEEYGGDAQRAFSNIEENPIWLNKEKGISVKRVAIRGISNAQALHDKKDKDGNPILDKEGKGIPTDFVNTSNNHHVAIYRKPVVDKMGQVILDENGSPRYELGEDVISFFEAVARVNLRQPVVDKDYKRSEGWQFLFSMKQNEYFVFPNEKTGFNPKEIDLLNPENYALISPNLFRVQKIGLNDYTFRHHLETSIQNNSNELKFITWIRCGKNGINGVIKVRVNHIGQIVSMGEY

SEQ ID NO: 6655 - protein, 1471 aa, synthetic construct
  REGION 1..1471: note = Synthetic
MEKTNKKILGLDLGTTSIGWAYVIEDENLLQSEIKQIGVRVSQLDNFVSTKTGKESKDPLKDFNSGKGISPNSGRTLKRSARKNLDRFQLRRKELFEVLKKANIIQNDTTLNENGKSTTHETWRIRATAAKNKIELHEFARVLFAINKKRGYKSSRKAKNEEEGQAIDGMGIAKKLYDEKITPGELVFQRLLIGIKSIPDFYRSDLQQEFDKIWNIQKTYYPDILTDTFYHEIKGKGQKATSTLFWVRYQFNTADIKGLDDNLKTEKTIKFSKREQKKLQAYKWRSDAVHQQLEKEQIAFVLADINGNINNSSGYLGAISDRSKNLYFKKITVGEYLFEQIKANPHSSLKNQVFYRQDYLDEFEKIWSVQSKYYSELTDELKEEIRDVIIFYQRKLKSQKGLISICEFEEKEVVINKNGKSISKKIGPRVIPKSSPLFQEFKIWQNLGHIILRNKNVSTKTLIDNSQSDLFEEKPQDFILDFEAKKILFEELNLKGNLKINDIFKILGHNPKDYQANFTEIEGNRTNQALYNAYLKILEIEGYNEELLKLSDQDSIEINSLKTSASEIKNMVKSIFEVLGINTGILEFDAELKESEFEKQASYQLWHLLYSAEDDNKKYSEEDILMFGNSDIGLKKQLCSKFGFKPDHAKIIANVSLQGDYGNLSCKAIRKIYPFIKETEFSEACVMAGYRHSKNSLTKEENESRVLKDTLELLPKNSLRNPVAEKILNQMVNLINTLIEKNSEKDATGKIIRYFKFDEIRIELARELKKNAKERAEMTANINAAKIAHDGIIKKLQNEFGIKNPTRNDIIRYKLYEELKNIGYKDLYTGTYIPQEKLFSKDIDIEHIIPQSKLFDDSFSNKTIVYRTINLDKGNQTAFDYISSRYSEEKLKEYQSRIEELYGLGSEKGISKAKYQKLLKKESEIGDGFIERDLRDSQYIAKKAKELLFQISRNVVSSSGSITDRLREDWGLINIMKEINLPKYRSLGLTEMEERKYGQKVEVIKDWTKRNDHRHHAMDALTVAFTKHSHIQYLNHLNARKNENNKYHKIIDAIEQKETKVIVDDTGNKKRVFKEPIENFRQIAKEQLEQILISHKAKNKVVTKSNNKVKGSDKIQQCLTPRGQLHKETVYGRYQYYSSKEVKVGATFDHKLIDQVSNPLYKMLLLERLAENNNDPKKAFSGKNSLAKNPIYLDREKKSIMPELVKLVWLEEDYSIRKSVTPDNFKDSKSIEKIIDPIVRRVIADRLQQYEGDSKKAFSDLDQHPIWLNKEKGIQIKRVAISGVKNAEPLNYKKDHFGNYILNNEGRRVPVDFVSTGNNHHVAIYRDGNGGLQEKVVSFFEAVERVNQGLEVVDKIYNSSLGWQFLFSMKQNELFVFPNEKTGFNPAEIDLLDPRNKSLISANLFRVQKIATKNYMFNHHLETLSISGEILKNKKELSGIIYYFIQTPNNLNGIIKVRTNHLGDIVSVGEY

SEQ ID NO: 6656 - protein, 1015 aa, synthetic construct
  REGION 1..1015: note = Synthetic
VIFYQRRLKSQKGLISYCEFESRKVDVEINGRIVQKIRGCKVAPVSSPLFQEFRIWQKINNIIVTNKETGEQGTLEQDDKVRLAECLRVKDKLSDKEILKLLFKKPKDLEMNFKSIEGNETLGKLYSKFLEVVSLAGNSDYEYSKLRQEELMNILRTEFARNGFNTAVLEYDPSLPKEEYERQPLFRLWHLLYSYEGDKSQTGNASLINKIAEICGMPENLAKIIASVSFKQDYASLSHKAMRKILPYMMDGNEYSLACEYAGYRHSKQSLTKEEIENKVLKDRLDQIPKNSLRNPVVEKILNQMVNVINTVGDRYGKPDEIHIELARELKSSQEERARATESIASNNKENDRIRMILENEFHLAYVSRNDIVKYKLYEELKNNGYKTLYSNQYIPADKLFSREIDIEHIIPQAVLFNDSLSNKTLEFRDINLEKGKDTAFDYVKNKYGESGLEDYKLRVNHLFESGGISRTKRDNLLRDSKNIPEGFVERDLKGTQYIAKKAREILLEYVRVVVSTSGSITDKLREDWGLVNVMKELNMPKFEAAGFVETITTSDGKDIRKIKDWTKRNDHRHHAMDAITIAFTKLAHIQYLNNLNAKGDKSSSIYAILQKETYLSGSKRLIIPPLPLDQMRREVRRQLESILVSIKAKNKVMTENINRIRIKDGVKNVKCLTPRGLLHKEQVYGQRKRYETYDVAVNGKMTEDVIATVASSETKAALALRLAQFKGDPKKAFTGANSLDKNPVWLDANHSRKVPAKVKCVRFVNVYSIRKNIDPSLSVEKVMDGRVRRILKDRLAEFGNDPKKAFVNLDENPIWFNKEKGIILKSVTIAENFDLDPIRIKRDNLGRVICDAEGNHIPSDYVNFRNNHHAAIFEDADGNIQEHIVSFYEAVRRKSAGLPVVDKEYNADKGWKFLFTMKSNEMFVFPNERTGFDPRAVDLMDPENYSAIGPNLFRVQAVSTRDYWFRHHLETSLGADKKLKDITWKRITNIEIFKQLVKVRINHIGEIVSVGEYD

SEQ ID NO: 6657 - protein, 1484 aa, synthetic construct
  REGION 1..1484: note = Synthetic
MKKILGLDLGTNSIGWAVVKEAETADEHSSIVKLGVRVNPLTVDELTNFEKGKSITTNADRTLKRSMRRNLQRYKLRREHLIEILKANGFISDETILSENGNRTTFETYRLRAKAATDEISLEEFALVLLMINKKRGYKSSRKAKNTEGSRKAKNTEEGKLIDGMEIAQRLYDENLTPGQLSLELLKSGKKYLPDFYRSDLQAEFDKVWNFQSQFYSFLTNDLKDELKGKNEKATWAICAPSKDKNAEDSRFVWHWKETESIWNEEAASNETVEVDKTLIGAKRSGTTVEQKVENFEWRSKALSEKLSPEQLIVVFQKINGQINNASGYLGDISDRSKELYFNHQTVGQYQMAQLDKNPNYSLKNQVFYRQDYLNEFETIWETQAKFHKELTPELKKEIRDVVIFYQRPLKSQKGLISFCEFESRQIEVEVDGKKKLKTIGCRVCPKSSPLFQEFKIWQRLNDVEVSGMIVPNQQLDLFGFSKDNTYGKRRLLQEEKEMLFAELNCKEKLSKKEVLNLLFPMQKDVDMNFKELDGNRTQAQLFQAYQTIAERSGHDVEDLLKKSAIEMLNCVSDIFCTIGINTDILTFNSALEGKEFEQQPMFRLWHLLYSFEGDNSAIGNEKLIEKLHDTFGFEKEYAAVLANVVFKDAGDYSSLSTKAIRKILPHLKDGNDYSVACEYAGYRHSKHSLTKEEIQNKVLKDKLELLPRNSLRNPVVEKILNQMINVVNGIVSEYGKPDEIRIELARELKKSAKEREELSKSINETTRLHEELVKKLQNEFGLSHVSRNDIIRYKLYMELESNGYKTLYTNTYIPREKLFSKEFDIEHIIPQAKLFDDSFSNKTLEARQANLDKSNTTAFDYVASKYGDEIANGEYKTRIESLYKDGKISKTKRDKLLMKEADIPSGFINRDLRDSQYIAKKAREILEELVRFVVPTTGSITDRLRDDWQLVDVMQELNWKKYEQLGMTEIIEGRDGQRIRRIKDWTKRNDHRHHAMDALTIAFTKRSFIQYLNNLNARVQKGVYDWIDLDMVEIANLSKEDKTKEIYAIERKELYRDNHGKLRFYPPMPLNEFRTEAKRQLENTLISIKAKNKVVTRNINISKKKSGANKKVQLTPRGQLHLETIYGSSKRYVTKEEKVNASFDADKIQTVASQRYREALSARLNQFGGDAKKAFTGKNSLEKNPIWLNVQHTDKVPEKVKTVGFETIYTIRKEVSPDLKLDKVVDTHVRQILQARLDEFGGDAKKAFSNLTENPIWLNKEKGISIKRVTITGISNGEPLHSKRDKDGNLILDNEGAKQPVDFVNTGNNHHVAIYRKPKLDKNNQPVLDENGDIVYELDENVVSFYEATTRATLGLPIIDKDYKKEEGWQFQFTMKQNEYFVFPRYDADGNMTFNPLEHDEAWFKNPENYAEISPNLFRVQKIATKNYFFRHHLETTVAEPKELKGITYKPQLGLNGIGKDGNAIIIKVRVNHIGQIVYVGEY

SEQ ID NO: 6658 - protein, 1421 aa, synthetic construct
  REGION 1..1421: note = Synthetic
MKKILGLDLGTNSIGWALVNEGENENEQSTIIKVGVRVNPLTVDEQTNFEKGKSITTNADRTLKRSGRRNLQRFKLRKENLIEILTTNGWISSDTILSENGNKTTFETYRLRAKAVTEEISLEEFARVLLMINSKRGYKSSRKAKSQDEGQLIDGMEVAKNLYENAITPGQFVLQILKAGKKYIPDFYRSDLHAEFDKVFDKQITYHPDFLNEELKEELRAKKRDAIWAICAKKFKENGFELVGTKRKGNTAEQKVENYVWRAKALTEKLELEEFVIVLQQINSQINSSSGYLGSISDRSKELYFNKQTVGQNLMAQLDANPHTKLKNQVFYRQDYLDEFEKLWSTQSVFHNQLTAELKEEIRDVVIFYQRKLKSQKGLISICEFENRQVEVEIEGKKKTKTVGMKVCPKSSPLFQEFKIWQVLNNIQVIDKSDTKHFLEQEEKELLYAELSIKDKISKTDALKLLYKNPKELDLNFKDIEGNRTQAALFKVYQRIIELSGHGEYDFSKLPASETLEIVRSIFSGLNYNTDILNFDSSLEGKAFENQALYQLWHLLYSFEGDDSISGNDKLVAKLTELYGFEKEYANMLANINFQDDYGSLSTKAMRKILPHLKEGFSYGGNSERPEEPSACEYAGYRHSKSSLTREELDNKVLKDKLEILPKNSLRNPVVEKILNQMINVVNASIEAYGKPDEIRIELARELKKSAKEREDATAAISKTTAEHEAHRVILRKEFGLTNVSRNDIIRYKLYKELEFTGYKTLYSGTYIPQEKLFSKEFDIEHIIPQSRLFDDSFSNKTLELRSINIEKGNDTAIDFILKKYNEDGNTAFLGRIGEMYKAGKLSKTKYNKLKMKGEDIPSDFINRDLRDTQYIAKKAKNILEELVKEVVSTTGSVTDRLREDWQLIDVMQELNWDKYEKQGLTEVIQNRDGHRIKRIKDWTKRNDHRHHAMDALTIAFTKRSHIQYLNNLNARSDKAGSIYGIEQKELYRDDKGKLRFRMPLENFRSDAKKHLENTLVSIKARNKVATININVSKKQNGVNKKIQLTPRGQLHLETVYGSIKQYVTKEEKVNASLTKEQIEKVAKKSYREALLARLAEFDNDPKKAFTGKNSLDKNPVFIDEARTTKVPEKIKTVTTETVYTIRKDISPDLKIEKVIDVNIRKILDGRLNEFGGDSKKAFTNLDENPIWLNKEKGIAIKRVTITGISNAVSLHEKRDKDGKLILDKDGNKQPIDFVNTGNNHHVAIYRLPVLDKVGLAVYDEENNQKYELQENVISFFEATTRVNQGLPIIDKEYRKSEGWQFLFSMKQNEYFVFPKIEKREKVNEETGEITEEEIITFNPKEIDLLNPDNYHLISPNLFRVQKFGSLLSGFWFRHHLETKIDTDKSLKGITYKVIQSTKNLEPIVKVRVNHIGQIVTVGEY

SEQ ID NO: 6659 - protein, 1398 aa, synthetic construct
  REGION 1..1398: note = Synthetic
MKKILGLDLGTTSIGWALVNEKENDNEKSEIIRLGVRVNPLTVDEKTNFEKGKSITTNADRRMKRSMHRNLQRYKLRRKNLVECLLAHHIIKDDTPLFELGNNTTFQTYRARAKAVTEEISLEDFARVLLMINKKRGYKSSRKVKDGEEGELIDGMEIAKRLYDENLTPGQLLLDLHNKGKRNRPTFYRSDLQAEFDKIWEFQSTFYPNILTDEFKSSIHGFNKSQTSGAFYGVHQISTARNNGKEGYVQALMWRTEALKRQLGIEEIAYTLADINGAINNSSKRLAMISDRSKELYFNHLTIGQYLMQLLNENPNHSLTNIIFYRQDYMDEFEAIWEKQAQYHPELTLELKKEIRDIIIFYQRDLKSCKNLVGYCELEHSEREITIDGKTKTILMGCKVCPKSSFLFQDFKIWQMLNNLQVSVVGRQRKKIKKDKTQPSLFDDVETGALNRFLTQEEKDILYNELSIKEKMSKREVLKLLFDNSNSLDLNYKEIEGNRTMATLFKAYQDIISLTGNGEYDFAKMSSKEVLTITTEIFKGLGYKTDYLTFNPLLEGKSLEKQPSYRLWHLLYSYTGDKSATGNEALMKKIQELCGFEKEYATILANISLALDYGSLSAKAIRKILPYMMKGYEYSEACSLAGYKHSARSLTKDELVNKKYKSHLDEIRRNSLRNPVVEKILNQMINVINEIIKTYGKPDEIRIEMARELKKSKEEREFLDAAIRKNTAESEKLRKELEEEFGIQHVTKNDILRYKLYNELKMNGYKTLYSNTYIPREELFSKRFDIEHIIPQSRLFDDSFSNKTLEVRDINIEKGNKTAYDYVAEKYDEQGIVDYESRVEELFSNNAISRTKRNNLLMKEADIPSDFLNRDLRDSQYIARKAREILEELVPFVVTTTGSVTSRLREDWQLVNIMQELNWDKYDALGLTEHYTDKNGNIVKRIKDWTKRNDHRHHAMDALTIAFTKRGIVQYLSNMNARSDKSGSIYGIEQKELHRNEKDHKLVFNAPMPLDEFRAEAKKHLKSILVSIKAKNKVVTKNINRAKMKDGRQQKIQLTPRGALHNETVYGKIRNYEAEYRKVDGKFTEDVILRVCNQRQREALLSRLTEYDNDPKKAFTGKNSLEKNPIWLKADHSYAVPLKVKLYKIVDVFTIKKAVDKDLKIDKVIDLKIRSILQARLNEYNGDASKAFANLDENPIWLNQEKGIAIKRVKIRAKVSSETSVPLHVKKDLLGNILKSSDGIALPTDYVNTASNHHVAIFIDAEGNWHEHVVSFYEATASALLGLPIIDKNFKSEEGWKFLFSMKQNEYFVFPNEKTGFVPTEIDLTDPKNYAQISPNLYRVQKFSSSFYVFRNHLETNVEEIKEQKGMSWFWVTSIKKLQGAVKVRINHLGNIVSIGEY

SEQ ID NO: 6660 - protein, 900 aa, synthetic construct
  REGION 1..900: note = Synthetic
MKRILGLDLGSSSIGWALVNEAESKNERSSIVKLGVRVNPLTVDESINFEKGKSITTNADRTLKRSMRRNLHRYKLRREALIEVLKECKFITEDTILSENGNRTTFETYRLRVKALTEEISLEEFARVLLMINKKRGYKSSRKAGGAEEDTLIDGMDIARKLYDANLTPGELCLQLLSAGKKVLPDFYRSDLQNELDRIWEKQKEYYPGILTAALKEELRGKKRDAVWAICANAFVWKETYTEWNNEESKNEQIEKEHKLEGIYSKRKRDEAKKENLQWRVSGLKEKLSLEQLVIILQEINTQINNSSGYLGTISDRSKELYFNKQTVGQYLMDILDNNPNASLRNIVFYRQDYLDEFNVLWEKQAEFHKELTGELKKEIRDIIIFYQRRLKSQKGLISFCEFESRQIEVKIDGKRKIRTVGNRVIPRSSPLFQEFKIWQILNNIEVTAVGNKNKQRMQNGSNEPDDTEQLELNGRRYLYQEEKELLAKELFVRDKMTKLDVLRLLFDNPEELDLNFKTIDGNKTGYLFFQAYSKMIEMSGHEPVDFKKPIEKIVEQVKSVFVLLNWNTDILSFDSNKELDKQSYYKLWHLLYSFEGDNTPTGNGCLVQKIMDSYGLGKEFAKILANITFQEDYGSLSAKAIHKILPHLKEGNQYDVACEYAGYRHSKSSLTKEEIANKVLKDKLEVLPRNSLRNPVVEKILNQMVNVINAIIEAYGRPDEIRVELARELKKNAKEREKLTKSIAETTKTHEAHKKLLQEEFGLKNVGRSDILRYKLYKELESRGYKTLYSNTYIPREKLFSKEFDIEHIIPQARLFDDSFSNKTLEARNVNIEKGNRTAYDFVKEKFGESGTDNSLDCYLNNIEVLFVSGKISKTKYTKLEYTDLQRRSSMNYSNAYKI

SEQ ID NO: 6661 - protein, 1416 aa, synthetic construct
  REGION 1..1416: note = Synthetic
MAKKILGLDLGTTSIGFAKVIEGKQPEDSSIEKIGVRVNPLTTDEQTNFEKGKPVSANAERTLKRGARRNLDRYQLRRDNLIEVLKKNKIIDDDSVLAEDGKNTTHSTYALRALAASHKIDLDAFARVLLAINKKRGYKSSRKAKNEDEGQIIDGMEIAKRLYEEKLTPGQLAYQLLKNGKKYLPDFYRSDLHAELDKVWDFQKQFHPDILTNEFKKHLEGKGQRATSAAFWGWHKFNTAENKAKNREEKKLQAYEWRSMATSKQLSKEEVAHVITDINNDLNKSSGYLGAISDRSKELFFNKQTVGQYLYKQLQKNPHTRLKGQVFYRQDYMDEFEQIWETQANYYPELTKELKSEIRDICIFYQRKLKSQKGLISFCEFESREIETQKNGQTAKRKIGLRVSPKSSPLFQEFKIWQVLHNLEFRNKNTKERYTPDQEAKQKLFDELNIKGNLKSTTALKLLGHKPKEWEANYDTLEGNRTNKALYDAYLKILELEGYDEDLFKLISNDDIDVSLIEKPAAEIKAMISTIFDSLGIDKAILDFDAEKDGKEFEKQASYQLWHLLLSYEEDDSASGNEKLYELLKIKFGFKKEHSQVLAQIALSADYGNLSAKAMRKIYPYIREASYDKACLQAGYNHSAASLTKEQIENRPLKPRLELLKKNSLRNPVVEKILNQMVNVVNTLIEEENIKNRALGLPEDFHFDEIRIELARDLKKNAKERAELSANMSDSKRKHEDISKVLIKEFGIPNPTRNDVIRYKLYQELKNNGYKDLYTNTYIPKEILFSKQIDVDHIIPQMKLFDDSFSNKTVVFKKDNLDKGNKTAIDYIESKYGSKAVIEFIERISHLFELGKKNPEEGISKAKFQKLQKKETEIGEGFIERDLRDSQYIAKKAKNMLLEICHRVVSTSGQITNRLREDWDLVNIMQEINISKYRALGLTEMIEKKDGGKKERIIDWSKRNDHRHHAMDALTIAFTKHSHIQYLNHLNARKNEAHKMHAVIAAIEINETELISDDSGSKKRKFKSPIPNFRALAKEHLESVLVSHKAKNKVVTKNKNRIKNKAGELVKTELTPRGQLHKETVYGKYRYYESKEEKVGPKFDEATISMVANPVHKELLLQRLVANGNDPKKAFSGKNALSKNPIYVDEAAEESVPEKVKLIWFEEDYSIRKDVSPENFKDEKTIEKIIDGAVKNILKGRLSKYNNNPKEAFSDLDKNPIWLNEQKGISIKRVRISGVKNAEPLHFKKDHLGKDILDKDGKPIPVDFVSTGNNHHVAIYKDSDGNLQERVVSLFDAVQLINAKQPVIDKQYNQGLGWQFLFTMKQNEYFIFPNEKQNFNPNEINLLDPVNAKLISPNLFRVQKIATKNYFFRHHLETTVEEKKELRDIAYKPQLGLNAISNIVKVRINHIGQIVKIGEY

SEQ ID NO: 6662 - protein, 1393 aa, synthetic construct
  REGION 1..1393: note = Synthetic
MKRIIGLDLGTTSIGWAVVDEKENDNEKSAIVKLGVRVNPLTVDEQSNFEKGKAITTNADRRMKRSMRRNAQRFKLRRERLIKTLLEYGIVHPDTPLYEAGPRTTFQTLRNRAKAATEEISLEDFARVLLMINGKRGYKSSRKLNDADEGAIIDGMDVAKELHDRRITPGQYLLELFNANNRRKPDFYRSDLQDEFDRIWATQSAYYPNILTSQFKQALNGLSLKQSADAFKNTYDILTAQNSGKEAYGQYLRWRTDALAKQIDIEQLAYVLCNLNGAINNAGNYLGMIGDRSKELAFKGITIGQKLINIIDENPNESLKNIVFYRQDYINEFDTLWAKQSSFHPELTKELRNKIRNEIIFFQRPLKSCKNLINLCELEQTTKEITTKEGKTKTVTIGYRACPKSSPLFQEFKIWQRLNDVQVIVKGSNARRSKKQQALVSNPDEFPRYLTIDEKNILHDELVIRSKMTKAEAIKLLFGNQSELDLNFPTLEGNYTIADLFNACAEIVNLTGHDAIDTKRLPAKDAIAAIREIFTSNGWKSDFLTFNPTLEKKEFENQPSYRLWHLLYSYAGDNSRTGNDALIRHISEMCQLPGEYAKVFANINFAPDYGNLSAKAMRNILPHMIQGMGYSEACDAAGYNHSKRSLTKEELEAKNYADHIDILPRNSLRNPVVEKILNQMINVVNELVATYGRPDEIRIEMSRSLKQNQTERDKAIKDIATNTRESERISQILKTEFHIAYPSRNDIIRYRLYEELKANGYKTLYSNTYIPREKIFSKEFDIEHIIPQSRCFDDSFSNKTIESRAVNIAKGNMTAYDYVASTQGEEGAKAFHDHIISLFKDKVLSKSKTEKLLITEDKIPNGFINRELRDSQYIARKAREILESMVPDVVSTIGSITSRLREDWQLVNVMQELNLPKYQALGLTEDRTDKEGHTRTIIKDWSKRNDHRHHAMDALTIAFTKRSIIQYLNNLNARSDKNSIINNIETEELYRNSKDKLLFNPPMPLDEFRAEAKRHLEDILVSIKAKNKVVTPNINKAKKRNGNQHKVQLTPRGALHQETVYGKILQYETEEVKVSGKMTEEVILCVCNRRYREALLQRLNSNGGDAKKAFTGKNALEKAPIYIDMAHSEKVPEKVKTMKLVPVMTTTTAVGPDLKVDKVIDAGIRRILQQRLAEYGGDAKKAFVDLDRSPIWQNKEKGIAIKRVKIFAHLTVDVALPIREKRDIAGRLMRDIEGGNIPTDFVKTGSNHHVAIFKDANGEWQEHIVSFYEATATVLLGLPIVDKEYRKADGWQFLFSMKQNEYFVFPNEKTGFNPSEIDLLDPKNYALISPNLFRVQKFTSGNFYFRHHLETNVEDNYKLKDTTWKSIRSLKNLNGIVKVRVNHIGQIVAVGEY

SEQ ID NO: 6663 - protein, 887 aa, synthetic construct
  REGION 1..887: note = Synthetic
MSGHGEYDFNKMNTDQILDIVRTVFTSLGIRVDILNFDTDIDGDEFEKQPIMKLWHLLYSFEGDNSKTGTENLLKKLNKEYGFEKDYGKVIANISFQDDYGSLSSKAIKKILPHLKEGNGFDVACLLAGYRHSKSSLTKEELENKELKDKLELLPKNSLRNPVVEKILNQMVNVVNQVIDTYGKPTEIRIELARDLKNNAEERKNMTEAISRTTKEHEEYRDIIKKEFGFLSVSKNDLIRYKLYLELKENGFKTLYSNTYIPREKIFDKNFDIEHIIPKAKLFDDSFSNKTLELRTANIEKSEMTAYDYVKNKYSEEGLKDYLNRIDLLYKSKAISETKYKKLKMQASEIPSDFIDRDLRDSQYIAKKARQILLEISKEVVSTSGQITDRLRKDWQLVDIMKELNWDKYDKLGMTEIVENKDSERIYRIKDWTKRNDHRHHAMDALTIAFTKHNYINYLNNLNARADKSSNAYAIEQKELYRDSHGNLKFIPPMPLNDFRVQAKQQLEDILVSIKAKNKVVTRNINTTKQKGGTNKKLQLTPRGQLHLETIYGELKQYVTKEEKIGSSFNEEKINMVAKKSYREALLRRLRENDNDTKKAFTGKNSLDKNPLFIDALQTFKVPEKVKLVEFETGYTIRKEISPDLKIDKVIDVGIRRKLEERLKKYDNNPKKAFSNLEEDPIWLNEEKGIQIKSVKIRGVSNAVPLRSKRDNKGELILDKDGNTQKVDFVNTGNNHHVAIYKDEKDNLQENVITFFEATARANADIPIIDKSYNHDKGWQFLFTMKQNEYFVFPNEETGFNPKEIDLLNPINYSLISPNLYRVQKLSTKNYMFNHHLETTAVNGDMLKTKKQLSGVTYRFIQSLPYIKDIVKVRVNHIGHIVGVGEY

SEQ ID NO: 6664 - protein, 1488 aa, synthetic construct
  REGION 1..1488: note = Synthetic
MFSQRNNPYCELLSSLNVKIENLLYFPNYLAKNLTFMNKKILGLDLGTNSIGWAYVTEGETQNESEIKQIGVRVNPLTVDEQTNFEKGKPITTNADRTLKRGARRTLDRYQLRREELRKILLQHSIITQNTLLSEDGKGTTFSTWEYRSKAANEKITLEAFARVLFAINKKRGYKSSRKAKNEEDGKAVDGMGLAKKLYDEKITPGQLVFQRLMEGKKNVPDFYRSDLQAEFDKVSSFQKQFYPEILTDELYQALKNQGKENTRKRILAIAKVYTADIKELEDSLKNVNTIKLHARDQKKLQAYKWRSDAVSKQLEKEQMAYVLTEINNNLNNSSGYLGAISDRSKELYFNHQTVGQYLYQQLLTNRHTKLKNQVFYRQDYLDEFEKIWTTQASFHPQLTEALKEEIRDIIIFYQRKLKSQKGLISFCEFESKEIDVSTGSTSKKKTVGMRVTPKSSPLFQEFKIWQNLNNVLVRKKGSKKRVVKSQQQPELFETEQEIFNLSGEAKQAIFDELNIKGNLSSAAIISILGYKPTDWEMNYTQLEGNRTNQVLYNAYLKILEQEGYNEDLLKLSDKDEIDVKELKTPAAEIRQMVKAIFEVLEINTDILVFNPELEGKDFENQASYQLWHLLYSAEDDTKKYSHEDIQLYGNDNIGLKKQLCAKFGFKPDHTKILANVVFQDDYGSLSTKAMRKIYPYIKESKYSDACELAGYRHSKNSHTREELASRTLKPKLDLLKKNSLRNPVVEKILNQMVNVVNTIIDKENDVLEKERKEPNFQFDEIRIELARELKKNAKERAEMTTNINAAKSAHDSIVKLLQTEFGVPNPTRNDIIRYKLYEELKNTGYKDLYTNTYIPRDILFSKQIDIEHIIPQSRLFDDSFSNKTVVYRTDNLAKGNLTAYDFIAQKGADALKAYEERVENLFKQKENGISKAKYKKLLMPESEIGDGFIERDLRETQYIAKKAKEMLFEITRSVVSTSGQITDRLREDWDLVNIMKELNLPKYRALGLTEMEERKYGQQVEVIKDWTKRNDHRHHAMDALTIAFTKHGYIQYLNYLNARKNERHKLHGNIIAIETKETEMQIDDQGNRKRVFKLPIKNFRQIAKEHLENVIVSHKAKNKVVTKNKNKVRGSNKVQEALTPRGQLHKETVYGRYQFYEQKEEKVSGKFDKETIKKVSNPLFKQLLLQRLEENGNDPKKAFTGKNTLEKNPIYLNVEKTEVVPEKVKLVWLEEDFSIRKDVTPDLKIDKVIDKAVRTVLEDRLKDFGGDAKKAFVDLDKNPIWLNKEKGISIKRVTISGVSNAVALNNKKDHHGKEILDAKGKPTAVDFVQTGSNHHVAVYRDEHGNLQENVVSFFDTVERVNQGLPIIDKTYKLSEGWQFLFSMKQNELFVFPNEKTGFNPNEIDLFDSNNKKLISPNLFRVQKFSKVTYGNSAVREYVFRHHLETTVDDKKELKEFTYKNIKSLGYFEGIIKVRTNHLGDIIGVGEY

SEQ ID NO: 6665 - protein, 1382 aa, synthetic construct
  REGION 1..1382: note = Synthetic
MKKILGLDLGTASIGWALVNEAEYDNEINSIIKAGVRVNPLSSDDQSNFEEGKSITLNAERTLKRSARRNLQRYKLRRDELIKILEEAGIIDSNLPLTEEGNFSTFKTYENRALAATERIDLYEFAKVLLMINKKRGYKSSRKVQNQDEGQLIDGMGVAIKLYEEGITPGHFVYSILKAGKKIIPDFYRSDLRDEFERIWNFQAEYYPDILTEEFKELVFGKSLKETSFHFREKFGLYTADNKGKDKRLQKYRWRCECVEQQMPIDVVAAVFCDVNSNINASSGYLGAISDRSKELYFNKQTIGQYLWGQIQNNSHMRLKGQVFYRQDYLDEFEVIWEQQAKHHPKLTNELKSVVRDVVIFYQRRLKSQKALLSFCEFESKEVVLSADGKMKKITFGARVCPKSSPIFQVFKIWSILNNIEVKDLESKTRFKLEIEQKQLLFDELNYLPKLSAKDALKLLFDKHSSSFELNYKDLEGNRTNAAILEKLYEIVNLSGHEITGYSKLNSANKVVAIMEILSSLGVNSNILDFNPLLEGEDFQKQPLYLLWHLLYSYEGDNSKTGNDSLLQALKDKYGFSSDFAVLLSNISFSDDYSDLSSKAIRKILPHLMDGLTYDKACLYAGYNHSKSLTADESKNRTLEPMLELLPKNSLRNPVVEKILNQMVNLINGVVNEYGKPDEIRIELARELKKSADERKRMTEAINKSKSEHEEYREILTKEFGLRYVSRNDLIRYKLYKELEFNGYKTLYTNTYISQDKLFSKEFDIEHIIPQARLFDDSFSNKTLEVRSANIEKGDATAYDYVYNKYGEEGLVRYKSVIDDLYRKDKISRTKRTKLLMTGDEIPNDFIERDLRDSQYIAKKAKQMLEKVFRTVTTTTGSITDKLREDWQLINVMQELNWERYNVLGLTYYEANNEGKPLPRISGWSKRDDHRHHTMDAITVAFTKRSHIQYLNNMNARSDRSSSIYGIEKKELFRDDKGKLRFKPPMPLETLRAEVKRHLEHTLVSIKAKNKVVTTNVNKTKKRKGHNTQIALTPRGQLHLETVYGKINRYKTTKVKVGGSFNYETIQGVANKKHREALLKRLSDFDNDTKKAFTGKNSPEKNPIYIDEHHSAQLPSRVKMVEFENVYTIRKEVSPDLNIDKVIDVKVKDRLKERLSEYGGDSKKAFTNLDENPIWLNESKGIKIKRVTISGISNAEALHEKRNKYGELVLDENGYPIPVDFVNTGNNHHVAIYADSKGDWHEKVVSLYEAVVRANQGLPAVDKLYNSHEGWSFQFSMKQNEYFIFPNESQGFYPKEIDLLNQDNYSTISPNLFRVQKFTNKDYFFRHHLETTVQRRDSKGKPIDEKPLKGVISKRINSLSALRGVVKVRINHLGIIVQVGEY

SEQ ID NO: 6666 - protein, 1395 aa, synthetic construct
  REGION 1..1395: note = Synthetic
MKKILGLDLGTNSIGWALVNEAENDNEKSSIIKLGVRVNPLTVDELTNFEKGKSITTNADRTLKRSMRRNLQRYKLRKENLINILKQNGWISDQTILSEHGNKTTFETYRLRAKAAIEEVTLEEFSRILLMINRKRGYKSSRKAKSTDEGQLIDGMEIAKKLYHENLTPGQLVLELVKAGKKYSPDFYRSDLQSEFDRIWDFQKQFYPEVLTDEFKKQLAGKGKQNTTKIFLAKYGIYTAANKGANKKLEATQWRVDALSKQLSKEELAFVISDLNGNVNNSSGYLGAISDRSKELYFNKQTVGQYLMEQLAQNPHARLKSQVFYRQDYLDEFNALWETQAKFHNELTPELKGEIRDVIIFFQRRLKSQKGLISFCEFERKQIEVEVEGKKKLKTIGMKVCPKSSPLFQEFKIWQILNNIQVNDKESHAKRFLEQEEKEMLFLELSIREKLTKADALKILFKNHKELDLNYKDIEGNRTQAALFNAYNDIFELSGHDKIDFSKCSANEIVNSVKEVFTALGINSEILFFNSLIEGDKFDKQPIYQLWHLLYSFEGDNSNSGQDKLIETLSSRYGFEKEFAKRIASITFQPDYGSLSTKAIRKILPYMREGNEYSVACVHAGYNHSKSSLTKEELDKKVLKDKLDILPKNSLRNPVVEKILNQMINVVNAVNESYGKPDEIRIELARELKKSAKEREELTTAINQTTAEHDKYRLELQKNFGLSHVSRNDIIRYKLYLELEPFGFKTLYSQTYISPDKLFSGDFDIEHIIPQSRLFDDSFSNKTLETRSINLEKGNDTAIEFIEKKYGKEELANYIAHIEGLFKNNPTKQGKLKKLKMKGDEIPDDFISRDLRDTQYIAKKAKSILEEFVRDVVSTSGSITDRLREDWQLINVMQELNWYKYDKLGLTETIIGRDGQEIPRIKDWTKRNDHRHHAMDALTIAFTKRSHIQYLNNLNARSDKAGSIYGIEQKELERDSKGKLRFKAPMADFRSEAKRHLENTLISIKAKNKVTTININTTKKKGGTNKKKQLTPRGQLHDQTVYGSNPWSRIELSSKISKNEIDNICSDNLKVYIKEHIKQRGSIAKAFTEEELLKLRYNNKPLREVEINIPCYTQRIDIIKFFTDSQRTVSSKIKNLKSVLDIKIREILNNRLDEYGGDFMKAFSDLETNPIWLNKEKGISIKRVTITGISNAQALHDKKDKDGKLILDNEGKPQPVDFVNTGNNHHVAVYRDEKGNLQENVVSFFEATERVNQGLSVIDKEYKKKEGWEFLFSMKQNEYFVFPRTEKKDKVHEETGEIYQIEETVFNPKEIDLLDPDNYKLISPNLFKVQTISKVMYGNSVIRDYKFRNHLETTVKDVKELRDLAFKQYKTLAFCDEIVKVRVNHIGQIVTVGEY

SEQ ID NO: 6667 - protein, 1372 aa, synthetic construct
  SITE 1101: note = misc_feature - Xaa can be any naturally occurring amino acid
  REGION 322..325: note = misc_feature - Xaa can be any naturally occurring amino acid
  SITE 770: note = misc_feature - Xaa can be any naturally occurring amino acid
  SITE 1066: note = misc_feature - Xaa can be any naturally occurring amino acid
  SITE 1313: note = misc_feature - Xaa can be any naturally occurring amino acid
  SITE 306: note = misc_feature - Xaa can be any naturally occurring amino acid
  SITE 47: note = misc_feature - Xaa can be any naturally occurring amino acid
  REGION 15..16: note = misc_feature - Xaa can be any naturally occurring amino acid
  SITE 54: note = misc_feature - Xaa can be any naturally occurring amino acid
  SITE 1337: note = misc_feature - Xaa can be any naturally occurring amino acid
  SITE 1095: note = misc_feature - Xaa can be any naturally occurring amino acid
  SITE 1316: note = misc_feature - Xaa can be any naturally occurring amino acid
  REGION 329..330: note = misc_feature - Xaa can be any naturally occurring amino acid
  REGION 751..752: note = misc_feature - Xaa can be any naturally occurring amino acid
  SITE 22: note = misc_feature - Xaa can be any naturally occurring amino acid
  SITE 37: note = misc_feature - Xaa can be any naturally occurring amino acid
  REGION 33..34: note = misc_feature - Xaa can be any naturally occurring amino acid
  SITE 314: note = misc_feature - Xaa can be any naturally occurring amino acid
  SITE 43: note = misc_feature - Xaa can be any naturally occurring amino acid
  REGION 1..1372: note = Synthetic
  SITE 758: note = misc_feature - Xaa can be any naturally occurring amino acid
  SITE 517: note = misc_feature - Xaa can be any naturally occurring amino acid
  REGION 317..318: note = misc_feature - Xaa can be any naturally occurring amino acid
  REGION 1069..1072: note = misc_feature - Xaa can be any naturally occurring amino acid
  REGION 1062..1063: note = misc_feature - Xaa can be any naturally occurring amino acid
  SITE 1296: note = misc_feature - Xaa can be any naturally occurring amino acid
  SITE 1303: note = misc_feature - Xaa can be any naturally occurring amino acid
  SITE 1340: note = misc_feature - Xaa can be any naturally occurring amino acid
  SITE 778: note = misc_feature - Xaa can be any naturally occurring amino acid
  SITE 514: note = misc_feature - Xaa can be any naturally occurring amino acid
  SITE 1035: note = misc_feature - Xaa can be any naturally occurring amino acid
  SITE 18: note = misc_feature - Xaa can be any naturally occurring amino acid
  SITE 8: note = misc_feature - Xaa can be any naturally occurring amino acid
  SITE 1037: note = misc_feature - Xaa can be any naturally occurring amino acid
  SITE 1290: note = misc_feature - Xaa can be any naturally occurring amino acid
  SITE 60: note = misc_feature - Xaa can be any naturally occurring amino acid
MKKILGLXLGTTSIXXAXVNEXEHSEEKSNIIXXGVXVVPLTXDEQXNFEKGKXITTNAXRSLKKSMRRNLQRYKLRRTNLIECLKENRIITDETIFSEQGNFTTFQTYRNRAKAATEEISLEEFARVLLMLNKKRGYKSNRKTTSDEGTLIDGMSIAQELYENNITPGEYVYALLKSEKKYVPDFYRSDLEIELNRIWDAQKPYHGDILTDDFKVQIQGRSKTNTTKIFLAKYGIYTAENKEKDKRRQAYKWRVEALQSQLTREKLAFVIAEVNGAINNSSGYLGAISNRSKELYFNQQTVGQYXMVQLQKNXHFXXKNKXXXXQDYXXEFEKIWECQTLYHPELTPDLKKEIRDIIIFYQRPLKSQKGMLDICEFENRTIEMEIEGKKKLKTVGLKVCPKASPLFQEFKIWQILNNLEVTDTRTFEHRRLEQEEKELLFEKLTVKEKLSKSDILKVLYGKTKDLDLNYKEVGGNYTMAAIWQACLKIVAMTGHDECDATKLKAAEIKRIVRXVFXDLGYKTDFLLFRPELEGKDFYEQPSYKLWHLLYSYEGDNSKTGTEKLIEKITALTGLEKEYASILSNITFKDDYGNLSAKAIRKILPFMKEGNEYSLACEYAGYRHSKSSLTKEEIENKALVDHLELLPRNSLRNPVVEKILNQMINVVNEITATYGKPDEIRIELARELKKSAKEREQLTDAINKANTQYEKYKEILEKEFGIPHVSRNDILRYRLYLELKENGFKTLYTDTXXPQEKLXSKEFDIEHIIPXARLFDDSXSNKTLEKRDANIEKSNSTAYDYVLSKYEKQGAEKYKTKIDDLYKSGVICKAKHDKLLMTESDIPEGFIDRDLRNSQYIAKKAREILGQMVKFVVPTTGSITDRLREDWQLVDVMQELNWDKYDKLGLTETYLDKDGREIYKITDWTKRNDHRHHAMDALTIAFTTHAIIQYLNNLNARSDKSSSIYGIEKSCLYRDKHGKLRFNPPMPLEELRQAAKSALENILVSIKAKNKVMTQNVNKSKTKEGYKKKIQLTPRXQXHNETIYGNTKRYTTKEVKVGASMTXXLIXKVXXXXYREALLARLATFGGDSKKAFTGXNSLDKXPIYLNEHQTECVPNKVKIVELETIYPIRKAIDKDLKIEKVIDAGIRKILEQRLKEYGGDATKAFSNLDENPIWLNKEAGISIKRVKITGIANATPLREKKDHHGNFILDKEGKRQPVDFVNTGNNHHVAIFRDENGGLQEHLVSFYEATARVSLGLPVVDKEYKQSEGWTFLFTMKQNEYFIFPNKETXFDPQEXDLMNPDXYEEISKNLYXVQXLSSKYYCFRHHLETMINDNNXLKXLTWLRITSFSGLEGIIKVRINHIGQIIHVGEY

SEQ ID NO: 6668 - protein, 1371 aa, synthetic construct
  REGION 1..1371: note = Synthetic
MKKVLGLDLGTTSIGWAMVNQAESGDERSSIIMTGVRVNPLTTDEKDSFEKGKAITTNADRRRRRGMRRNLQRYKLRREHLLSVLRREGWISEDTVLSEQGAGSTYQTFRLRAEAPSREITMDELSRVLLMINRKRGYKSNRKADKGEEGHLIDGMSVARELYDDGLTPGEYSLRLLESGKSALPEYYRSDLVAEFERIWSVQSSWWPDILTEDFKKSIEADGRNGVSKKFLGRYSIYTADNKGKDKKKTALEWRVKALSEMLDKETLAYVIADVKGAIQSSSGYLGEISDRSKELFFDDVTVGQYLWRHIEQDPNYSTRNKVFYRQDYLDEFERIWECQKRFHPEMTDALKTEIRDVVIFYQRRLKSQKNLISFCEFEHRDIVVEEGGVRKVKTCGCRVAPRSSLLFQEFKIWSVLNNVTLTDRATGECLQLSAEDRKKLADFLAVNDKITVPEMLRLLGRASRGYDVNYKEIQGNLTMSALYRKFLEVVSASGHGEYDLRKLSYSGAYKLLCEVFSALGFGTDYLTFDASLPKEEYERQPMFKLWHLLYSYEGDNSKTGDESLIGKVSEICKMPLEYARIIASVKLLDDYASLSHKAMRKILPHLKDGCTYDEACARAGYNHSSSVTKEENEARELKDRLEILPKGALRNPVVEKILNQMVNVVNTVLDEYGRPDEIHIEMSRELKQNAKQREQATQSIADNTKRDEGIVKILQTEFHLPYVSKRDILRYRLYDELKSNGYRTLYSNQYIPKDLLFSPSIDIEHIIPQALLFDDSYSNKTLEFGDVNRDKGKETALDYVSRKYGPAELDAYRLRVIDLCSQGVISARKRDRLLMKQSEIPSDFVNRDLTNSQYIARKSVEMLGEIVRDVMPTTGSITALLREQWQLVDVMKELNLPKYRQAGKTFTVTKSDGQSLEKISDDWTKRNDHRHHAMDALTIAFTRRSHIKVLNTLNALPGSEDLALKEAVTMRLPNHKWIFAPPMPLGELRAAFKSALESTLVSIKAKNKVATRNVNKSKVKDRTIAVETLTPRGQLHKEQVYGRRMVYETFDVTVGGKMDAAMVASVASKAEREALARRLEAFGGDPKKAFTGKNSLDKNPLYVDALQSVTIPVKVKCVRMKDVYSIRKEIGPDLSVDKVVDGRVRKLLEARLAEYGGDPKKAFVNLEEKPIWVDEARGIKLKRVTIAENFDLCAIRDKRDKDGNLVLDAAGNTIPNDFVNPRNNHHVAIYEDAEGNYQEQVVTLLEALARKTAGLPVVDKDFHKDLGWKFVFSLKLNEMFVFPNPKTGFIPADVDLMDPANYAQISPNLFRVQKLSCRDYCFRHHLETALDNVTELRDVTWKRVTNLANLRGVVKVRIDHIGRIVAVGEY

SEQ ID NO: 6669 - protein, 1453 aa, synthetic construct
  REGION 1..1453: note = Synthetic
MIINMKRNILGLDLGTTSIGFAHIIESSTAEDSQIIQIGVRVNPLTTDEQTNFEKGKPVSINADRTLKRGARRMLDRYQQRREHLIDTLIKANIITKETILAEDGKSTTFETWRLRAKSVTEKIEKTELARVFLAINKKRGYKSSRKAKNEEEGQLIDGMAIAKRLYEENLTPGQLVYQLLKEDKKLIPDFYRSDLQSEFDKVWNFQKQFYPEILTDEFYLDLKGKGQRATSAIFWTKYGFNTAENKGNREEKKLQAYKWRSEAVSLELTKEEVAYVLTEINSNLANSSGYLGAISDRSKELYFNKETVGQNLYRQLQLNPHTRLKDQVFYRQDYQDEFEAIWKEQSKHHPELTDELKSEIRDITVFYQRKLKSQKGLVSFCEFESKEIEIEKNGKITKKTIGLKVAPKSSPLFQEFKIWQVLNNVLVRKKGSKKRTVKKESQPTLFEEEKEVFAFDLETKQKLFEELNLKGNLKASKIIEILGHKPSEWEINYAELEGNRTNKALYDAYLKILEFEGYDEDLLKLQGKDDINVSELKASACEIKDMVKHIFEVLHINTEILDFNAELEGKDFEKQPSYQLWHLLYSYEGDDSPSGNEKLYELLEKKFGFKKEHGQILANVTLSDDYGNLSTKAMRRIYPHIKEQTYDKAAALAGYKHSASSLTKEEIENRPLKDKLELLKKNSLRNPVVEKILNQLVNVVNTLIEKNKAIDPDFHFDEIRVELARELKKNAKERAEMTTNINAAKIAHDKIFKLLQTEFGVKNPTRNDIIRYKLYEELKNNGYKDLYTNTYIPREILFSKQIDIDHIIPQAKLFDDSFSNKTVIFRQTNLDKGNKTAFDYIESKFGEEKLEEFKLRIEALYQSGQKSKEEGISKAKYQKLLKKESEIGEGFIERDLRDSQYIAKKARNLLYEICRVVTATSGSVTDRLREDWGLVNIMQELNFEKFKSLGLTEMVEKKDGTFKERIVDWSKRNDHRHHAMDALTVAFTKKSFIQYLNNLNARRSNQFNEGIRNTEDQKSIETSNLKISTRDVMGIEQKELHRDEEGKLRFNLPITNFRKIAKEHLENVLVSHKAKNKVVTKNKNKIKSKNGERVKVELTPRGQLHKETIYGKYQYYVNKEERIGAKFNKETIEKVSNPVYKKLLLQRLSENGNDPKKAFGGKNAFSKNPIYLDENKKEIMPETVKLTWLEEDYSIRKDVTPENFKDIKTIEKVLDAKVKQILLDRLKEFGGNPKLAFSDLDKNPIWLNKSKGISIKRVTISGVKNVESLHFKNDHLGNDILDEQGNKIRSSFVSTGNNHHVAIYRDEKGNLQDKIVSLFDAVQLVNAGEQIIDKQYNQGLGWQFLFTMKQNEYFVFPNEKTGFNPNEIDLLDPKNKKQISPNLFRVQKLSKVEYGNSSVREYVFRHHLETTVDEKKELKEITFKNIKSLGYLKNAQKVRINHLGDIISVGEN

SEQ ID NO: 6670 - protein, 1373 aa, synthetic construct
  REGION 1..1373: note = Synthetic
MKKILGLDLGTNSIGWALVNEADNEREKSSIIKIGVRVNPLTVDEQQNFEKGKSITTNADRTLKRSMRRNLQRFKLRKENLIEILKKQKFINDETILSENGNKSTFETYNLRAKSATEEITLEQFARVLLMINKKRGYKSSRKAKSQDEGQLIDGMEIAKKLYNDNLTPGQFVFQILKEGKKYIPDFYRSDLQAEFDKIWSFQKQFNPDILTEEFNKQIIGKGKVNTTKIFLAKYGIYTIDNKGADKKSQAYNWRVEALTNQLTKEELAFVISDLNGIISNSSGYLGSISDRSKELYFNKQTVGQYLIAQLKENPHTQLKNQVFYRQDYLDEFNTIWETQAKFHKELTNELKEEIRDIIIFYQRKLKSQKGLISFCEFESKQIEINIDGKKKLKTVGSKVCPKSSPLFQVFKIWQILNNIQVIEKSTGKSKFLEQDEKEILFKELNFKDKISKTDALKILYKNYKELDFNFKENIEGNRTQATFLKAFQSIIELSGHEVSDFSKIKTDEILEIVTPIFEGFGFNTNLLQFNSNLKGKDFEKQAVYQLWHLLYSFEGDNSNTGNEKLIQKISELYGFEREYAIIIANISFQPDYGSLSTKAIRKILPHLKEGIEFSLACEYAGYRHSKNSLTKEEKNKKILKDKIDILPKNSLRNPVVEKILNQMINVVNATIETYGKPDEIRIELARELKKSAKEREDLTNAINKSTLDHEKYKALLQKEFGLSNVSRNDIIRYKLYLELEHNGFHTLYSNTYIEPNKLFSKEFDIEHIIPQSRLFDDSFSNKTIESRSANIEKGNETAFDYVSNKNGEVGLKDYLKNIEDLFNNGKISKTKYNKLKMKGDEIPSDFIARDLRDTQYISKKAKSILEDLVKDVVSTGGSITDRLREDWQLIDIMKELNWDKYDKLGLTEVIENNDGHKINRIKDWTKRNDHRHHAMDALTIAFTKRSYIQYLNNLNARSDKSGSIYGIEQKELYRDKNNKLRFKPPIPLDDFRAEAKKQLENTLVSIKAKNKVATININNTKKQGGENKKKQLTPRGQLHLETIYGSIQQYVTKEEKVGANFNKELIEKVANKKCREALLKRLIEFDNDPKKAFTRKNSLNKNPLYIDTIKTYKVPEKVKTVTTETIYTIRKDINPDLKIDKVVDKKIKNILELRLKEFNGDAKKAFSNLDEKPIWLNKEKGISIKRVTITGISNAIALHDKKDKEGNFILDNQGKKQAVDFVNTGNNHHVAIYKDEKGNLQENVITFYEAVERVNQGIPIIDKTYKQNEGWQFLFSMKQNEYFVFPNEKTGFNSNEIDLLNPENYHLISPNLFRVQKIATKDYFFRHHLETNVENITTTKDLTWKRLGINGIINILKVRINHIGQIVSVGEY

SEQ ID NO: 6671 - protein, 1455 aa, synthetic construct
  REGION 1..1455: note = Synthetic
LIGTNVEKLLLVSKIIINFTQIFKLITMKRILGLDLGTTSIGFAYVVEGETPEKSLIKEIGVRVNPLTTDELSNFEKGKSISVNADRTSKRSARRNLQRFKLRREVLIKILKENKIITENTVLAEEGKGTTFQTLKLRAQAAKQKVSLSELARLFLIINKKRGYKSSRKAKNEEEGQLIDGMSIARKLYEQNLTPGQFVYELINKGNKSIPDFYRSDLQNEFDRVWDFQKQFYADILTDEFYIELKGKGQKATSAAFLSKYKIYTAENKGSREEKKLQAYLWRAKAISEKLSKEELAYVITEINNNLNNSSGYLGAISDRSKELYFNKQTVGEYLWEQIQKNPHTSLKNQVFYRQDYLDEFEKIWSTQAQFYPDILTNNLKKEIRDTVIFYQRKLKSQKGLIGFCEFESKEIEVIKEDGKLVKKLIGSRVAPRSSPLFQEFKIWQNLHNVTVRKKDSRKRKALETAQELFVDEDKEIFILSLEQKQLLFDELNLKGNLSSSKILELLGLSSKEWELNYKQIEGNKTNRQLYDAYLKIIDLSGHSISDYVKVKSTKSDIQLDDLNIPSLEIKNIVKQIFETINISTDILEFNAELKQKEFEKQASYQLWHLLYSYEGDNSKSGNEKLYKLLEDKFGFKEEYAKILADIIFLTDYGNLSTKAIRKIYPYIKENGFSEACKLAGFKHSKDSLTKEENQQRVLKQRLEPVKKNSLRQPVVEKILNQMVNVVNSLIDKYRKEDENFAFDEIRIELARELKKNAKERAELDTQVRDGKARNEKIIAILKSSEFGIPNPTKNDITRYRLYEELKDNGYKDLYTNRYISRSDLFTNKIDIEHIIPKSRLFDDSFSNKTIAFRDVNLKKGDRTAYDFIESNYNSELENYLSRVEDLYQKNIISKAKYQKLLKKESEIGDGFIERDLRETQYIAKKAKEMLLQITKSIVSTSGSITDRLREDWDLVNVMKELNLPKYRALGLTEMQERKFGQKVEVITDWTKRNDHRHHAMDALTVAFTKHTHIQYLNYLNARKDENHKEHNVIINIQNLETEKIKDKNGNEKRVFKEPIPNFRQVVKAYLESVLISHKAKNKVTTKNKNKISGKNNRSQDTLTPRGQLHKETVYGKYHYYVSKEEKVGVKFDSETIEKVANPLFKNLLKYRLEENNNDPKKAFTGKNSLEKNPIYLDDSKQKVMPEKVKLVWLEVDYSIRKDINPDNFKTEKLIDKILDEGIKKILKERLKEYDNDPKKAFSDLDKNPIWLNKEKGIAIKRVTISGVKNAEAIHTKKDHLGNEILDKKGNPIPADFIQTGNNHHIAIYRDNKGNLQEKVVSFFEAVARAKQGLPIIDKTYNQHLGWTFLFTMKQNEMFVFPNKETGFNPNEIDLLDPKNKKIISPNLFRVQKLSTKNYMFAHHLETKAIDGDMLKNKKELSGICYHSIRSTEKLNNIIKVRINHLGDIVSVGEY

SEQ ID NO: 6672 - protein, 1387 aa, synthetic construct
  REGION 1..1387: note = Synthetic
MKKVLGLDLGTGSIGWAVVNQAENDNEKSSIVKLGVRVNPLTVDEKGNFEKGKSITTTADRTLKRGMRRSLQRFKQRRNMLVDILIKNNIINDDTVLSEVGNNSTHETLELRAKAARHEVTLQEFARVLMAINKKRGYKSNRKANNDEEGELIDGMAVARHLYNEGITPGQYVYQLLKSHKSYKPSFYRSDLRAELDLIWNKQHDYYPDILNDDSRRVIEGKGKNDTRKYFFAAHHIEAAEVKDRKIRQLSYYEWRADAANRKLDIEQLVTVICEINGDIAASSGYLGAIGDHSKELEINKITVGEYLFQLIKQNPHNSLKNIVFYRNDYISEFNTIWATQAKYHKELTPQLKEKIEKEIIFFQRRLKSQKGLISFCELEGKEICLANGKKVTTGPRVCPKSSPLFQEFKIWQDINNVILENKSVKKSSKSKASIPSLFEESSIQRFTPLNQEQKIKLYNELYCSKELSAKEVLKCLDLSDKDYALNFKKLQGNITQVTLLNAYKGIVEMSGHDVENFDKMDAASKLHLLKAVFETLDAKSDFLFFDAGNNASEMQQNAMFKLWHLLYSYEDDNTPTGNGKLIDHISQLTGLSHDYAALLTRVNFVQDFGSLSTKAILKILPYMKNDGMVYSDACKAAGYNHSSQSITRDMNEARQLDKHLELLPKNTLRNPVVEKIINQMIHVVNNCIDEYGSFDEIHIEMARELKQSQQQREDTTKRLNAKTREVEEIKKILMSAPFNIANPRRNDVIRYQLYQELAPNGYKTLYSNTYISKEKLFSRDFDIEHIIPQAKVFDDSFSNKTLEARAVNIEKSNMTAIDYVKMKHGDQGVDEYLKRIAFLNTDGSRTKYKRLTTPDDKIESDFLNRDLSDSQYIARKAKELLLKVTRDVVATTGSITARLRDDWQLVDVMKELNWDKYDKLGMTSTIRDEHGHEIRRINDWTKRNDHRHHAMDALTIAFTRHSHIQYLNNLNAKDDASDKDSSIYGIEKKELLHGRKFKSPIPLDEFRAQAMRHLADILVSIKAKNKVATKSINKIKGGKQQSTLTPRGQLHNETVYAQRQRYATRDEKVGAAFNVEKINTVCRKSFRDALLQRLMQFGGDPKKAFTGKNSLSKNPLFVDDNHTAKVPDKVKTVVLETYYTIRKPITKDLKIEKVVDEGIKRILLNRKNEFGGDQAKAFSNLDENPIWLNKEKGIAIKSVSIKGVNVAVPLHTKRDNNGNIIIDEMGNAIPTDYVSTSSNHHIAIFEDPDGNLQEHVVSLFEAAARKNQDLPVVDRDFNKELGWKFLFTMKQNEYFVFPDESTGFDPSGIDLFNPGNYSLISPHLFRVQKLTKGDYFFRHHLETNVNDEKKLKNITWFRINSTNGLKGIVKVRVNHIGQIVKVGEYL

SEQ ID NO: 6673 - protein, 1391 aa, synthetic construct
  REGION 1..1391: note = Synthetic
MKKILGLDLGTTSIGWALVNEKENDNEQSSIIKLGVRVNPLTTDEQKNFDEGKPITTNADRTVKRGMRRNLQRYKLRRDTLLSVLKEQGFISDDTILCEQGNRSTFQTLQLRAKAATEEVSLADLARILLLINKKRGYKSSRKVDADTDGKSIDGMSVARTLYENNLTPGEYAYGRLQQGKKYIPDFYPSDLRAELNRIWECQRQYYPEILTDALRENLHGKNEKQTWAICHEPFGIVGMKRNGNKAEQKVENYRWRKEALTKQLGLEELAIVLQKINSQINGTSGLLGAISDRSKELYFLKQTVGQYQWNELQKNPNYSLKNQVFYRQDYLDEFERIWETQRKFHPELTDELKHELRDIVIFYQRPLKSQKGLVGFCELESSQKEIIKDGKRKTVTVGLRCCPKSSPLFQCFKIWQNINNINVTGNIVPERQCDQSSDEIINKYGTRPLMEEEKQKLFRELNLKERMSAAEILKLLFPDERNLKLNFKEVKGNTTMSAFVNACRQVIYMSGHDDIDFSKESAQHTTGIIKEVFGTIGAHADFLTFDPCLDGKAFAMQPAYRLWHLLYSYTGDNSATGDERLKERIADICGLDKEYASAFASIALQDDYGSLSAKAMRKILPFMMDGNKYSVACEYAGYRHSKRSLTKEELDNKPLVNTIPLLKRNSLRNPVVEKILNQMINAVNTVSETYGKPDEIRIEMARELKKSAKEREQMTKDINDAKKKNDEYKQVLQSEFGITNPSRNDVIRYRLYKELEQNGFKTIYTQTYIPKDKLFSKEFDIEHIIPQARLFDDSMSNKTIEARQANIEKGSATAYDYVLGKYGKQGAEEYKQRVDKMMEDGKISKTKQKKLLMREQDIPEGFIDRDLRDSQYIARKAREILESMVRTVVATTGSVTDRLREDWQLVDVMKELNWDKYDRLGLTETITDHDGRQIRRIKDWTKRNDHRHHAMDALTIAFTRYSFIQYLNNMNARSDKSSSIYGIEQKELSRDSHGKLRFVPPMPLNEFRSEAKKHLEDILVSIKAKNKVMTKNPNKTKCAKGKTKTTLQLTPRGQLHNETIYGRIRQYATKEERVGSAFNAEKIATVANKRLREALAARLRQFDGDPKKAFTGQNSLEKKPIYLDAAHTVCVPPKVKTVTLEPTYTLRKEVNKDLNVEKVIDPHIRRILKERLKEYNNNAKEAFSNLEENPIWLNKERGIAIKRVTISGVSNAIALHDKHDHHGKKLLDSEGRPMPTDFVSTSNNHHVAIFRDAEGNLQEHIVSFFEATMRASQHLPVIERDYNKELRWQFLFTMKQNEYFVFPNEKTGFNPNETDLLDPKNYAEISRNLFRVQKLSSKYYVFRHHLETTVEEKKELLGEKWKRIQTLNNLNGIVKVRVNHIGQIIAVGEY

SEQ ID NO: 6674 - protein, 1371 aa, synthetic construct
  REGION 1..1371: note = Synthetic
MKKVLGLDLGTTSIGWALVNQAESSGEHSSIIATGVRVNPLTTDEKDSFEKGKAITTNADRRQKRGMRRNLQRYKLRREHLLSVLRREGWISEDTVLSEQGARSTYQTFRLRAAAPAEEISLEDLSRVLLMINRKRGYKSNRKTDKGEEGHLIDGMEVARTLYDEGLTPGEYSLRLVNEGKRVLPDYYRSDLVAELEKIWSSQKVWYPDILTDEFKNSIENDGRNGVIKKFLSRYSIYTADNKGKDKKKTALEWRVKALADQLDKETLAYVIADLKGAIQGSSGYLGAISDRSKELVFDNLTVGQYLWRQIEQDPNYSTRNKVFYRQDYMDEFERIWVCQKRFHPELNDELKSEIRDVVIFYQRRLKSQKNLISFCEFETRDITVEEAGVQKVKKCGCRVAPRSSLIFQEFKIWSVLNNISVKSKTDGSTVEVTDEMKRRLFDYLSVNDKITVSDMLRLFELKPKGYDVNYKEIQGNLTLAELYRKFFEVVSASGNGEHDLAKLSYSGAYKILFEVYSALGFSTEILTFDASLPKKEYECQPLFKLWHLLYSYEGDNSKTGDASLIRRVAEICRMPEEYARIIASVKLLDDYASLSHKAMKKILPHLKDGCAYDEACARAGYNHSSSMTKEENEARVLKDRLEVLPKGALRNPVVEKILNQMVNVVNTLADEYGKPDEIHIEMARELKQNAKQREKATKDIADNTKRDEEIVKKLQEEFGLKYVSKKDILRYRLYEELKSLGYKTLYSGQYIPKDRLFSNSIDIEHIIPQALMFDDSYSNKTLEFSDVNRDKGKETAFDYVSRKYGPAELDAYKLRVHELYSHEVISARKRDRLLMRQSDIPSDFVNRDLTNSQYIARKSTEMLGEFVRDVMPTTGSITALLREQWQLVDVMKELNLPKYRQAGKTFTVTKSDGQSLEKISDDWTKRNDHRHHAMDALTIAFTRRSHIKVLNTLNALPGSEDYSLKEMVTTVLPNRKRIFTPPMPLGELRSAFKSALESTLVSIKAKNKVATRNVNKSKVKNGTIAVETLTPRGQLHKEQVYGRRKVYEPFEVTVGGKMDAAMIASVASRAEREALKRRLEAFGGDPKKAFTGKNSLEKNPLYVDELQSVAVPAKVKCVRMKEVYSIRKEIGPDISVDKVVDGRVRALLKARLDEYGGDPKKAFVNLEEKPIWMDESKGIKMKKVTIAENFDLCAIRDKRDKDGKLILDSAGNTIPSDYVNPRNNHHIAIYEDADGNYQELVVTLLEALQRKTAGLPVIDKTYHEDLGWKFVFSMKLNEMFVFPNPATGFDPSEMDLMDPANYAAISPNLFRVQTLSSGDYRFRHHLETSIESDKELKDVTWKRLKSLSSLKGIVKVRINHIGQIVAVGEY

SEQ ID NO: 6675 - protein, 1092 aa, synthetic construct
  REGION 1..1092: note = Synthetic
MLLKRIEDNPNNSLKNIVFYRQDYLDEFERIWTVQSKYHTELTHELKKRLRDIIIFYQRPLKSQKGLISLCELETKDIEVAIDGVKKMKNIGPRVCPRSSPLFQEFKIWQTINNIFVNGAALDDEDKSVIAKELMFKDKLKDSDLLKLLFKTTKGQSVNFKEVDGNRTMATLMKACFKIAENLGYDDIGLSKLSSEDQMVRIEGIFKEQGFKTGFLHFDSSLASPEFENQDSYRLWHLLYSYEGDKSASGNESLVKCIMDLCSMDEGSAKILATCTFLPDYGSLSAKAMRKILPYMKDGLEYTAACAMAGYRHSKRSLTKEELDTKEYSDRLSLLPKNSLRNPVVEKILNQMINVVNSVIDVYGKPDEIRIEMARELKKSAKEREEAQRDIASSTAESQKVIEILKGEPFFIQFPTRNDIIRYRLYQELAQNGFKTLYSNTYIPKDKLFSKEFDIEHIIPQALIFNDSFANKTLESRQCNLEKGKETAMDYVKSKYDETGVQAYCDRVNGLIGKGISKTKAKWLLMEGKDIPEDFINRELRDSQYIAKKAREILESLVKFVVPTTGSVTARLREDWQLVNVMQELNWEKYARLGLTGVREDKDGRRIPFIQDWTKRNDHRHHAMDALTIAFTRRQFIQYLNHLNSKIDVVSWDKKDLDLRDYDLEDIKFGNLSAGDRYGIVKALQDKFLYKDGNDKYRFVPPIPLDEFRRQAKEQLSDILISFKAKNKVCTRNVNVTKNKGGANRKTQLTPRGPLHNETIYGSSLEYVTKENEKIGSSFDTERITTVCKKKFRDALARRLEEFGGDPKKAFTGKNSPEKNPIWVDEHHSEQVPAKVRTVTMGQRFTGRKPIDATLKIEKVIDKRIREILQARLDEFDGKAAKAFSNLDENPIWLNKEKGIAIKRVTVSGPANPVPVRFKRDKDGKPIIDDAGKTIGADFVTPGNNHHIAIFRDSSGKLQEHPVSFLEATIAKSHGIDVIDRNYNKDEGWEFLFTLKQNEYFVFPNSETGFNPLDYDLTDHRNYAEISPNLYRVQSISTNDYFFRHHLETTSEKNNSLYGITWKRIRNASALEGLVKVRIDNLGRIVAVGEYD

SEQ ID NO: 6676 - protein, 1372 aa, synthetic construct
  REGION 1..1372: note = Synthetic
MKRILGLDLGTTSIGWAIVNEAENENETSSIIKLGVRVKPLTVDEQNTFETGKSITTNSDRTLKRSMRRNLQRRKLRRKNLIECLKENDIIENDTILCEEGNKTTFQTYRDRADAAVNEISLEAFARVLLMINKKRGYKSSRKAKSAEEGQLIDGMAVATELYERNLTPGMFVTELLKKGKRYVPDFYRSDLVAEMERIWQFQKQFHADILTDDVRKQLKNKKKQQTENIFLKNFGISSADNKEKDKRRQAFQWRADAVRKELTREELAYVIADVNGAISNSSGYLGAISDRSKELIFNHQTVGQYLMERLNADPHFSLKNQTFYRQDYLDEFETIWETQAKYHKQLTPELKKEIRDIIIFYQRPLKSNKGSIDVCYFENHQKTITEHGKTRTKRVGLKVLPKSSPLFQEFRIWQILHNIVVSETSSGNKRPLYQEEKELLFAELNIKEKLTKNEVLKLLFSKPRSYDLNYEEVEGNHTLAAIYSACQEIISMSGHGEYNFQKLPANDINKVVYGVFSGLGFKTDFLTFDSSLEKHDLEKQPMYRLWHLLYSYEGDNSNTGNRSLIEKIRSITGLDPEYANILANVSLQQKYGSLSAKAVRKILPYMKEGFNYSDACEKAGYRHSDSLTREELEHKEYKNHLDLLPRNSLRNPVVEKILNQMINVVNEIVKVYGRPDEIRIELARELKKSAKEREQMSKDIREGTKRNEELRKEIETKFGIKNVTRNDILRYRLYLELAPNGFKTLYSKTRIPEEKVFSKEFDIEHIIPQARLFDDSFSNKTLEARQINIDKSNKTAIDFIRERYGENYTEEYKQSVEDLLKSGAISRAKRNKLLMTEADIPSDFIDRDLRNSQYIAKKAREILLNMCMFVNPTIGSITDRLREDWQLINVMQELNWDKYDRLGLTETITDHNGKPLRRIKDWTKRNDHRHHAMDALAIAFTRPEFVQYLNNLNARSDKAGAIYAIEKKYLERDKNGKLRFIAPIPLAEFRAEAKRKLEEILISIKAKNKVTTQNVNVIRTREGKIKRTQQTPRGQLHNESIYGHIQRYTTREVKVNGSFDEQMISLVSKKAYREALLSRLHEFDNDPQKAFTGKNSLDKTPIWLDRNHTWAVPLKVKITEMQDEYPIRKDIAPDLKIDKVIDTGVRSILQRRLDEYSGDARKAFSNLDENPIWLNKEAGITIKRVRIKGIANATALRSKKNHKGEFICTADGKKQAVDFVNTGNNHHIAVFRDETGKLQECIVSFLEVTERKAQDLPAIDKDYRKADGWTFEFTMKQNELFVFPNEETGFDPSEIDLLNPDNYALISPNLYRVQKLATHDYYFRHHLETTVEDKETLKNIAFKRIKSLAKLENIVKVRVNHIGQIVEIGEY

SEQ ID NO: 6677 - protein, 1394 aa, synthetic construct
  REGION 1..1394: note = Synthetic
MKSILGLDLGTTSIGWALVKEAENESEKSEIVKLGVRLVPLTVDERTDFEKGKSITTNADRRLKRGMRRNLQRYKLRREALIEELKKEHWIEDGFCFSEEGPGSTFRTLEIRAKSAFEEVSLQELARILLQINKKRGYKSSRKSDSSDDGHAVDGMDVAKYMYDNDLTPGEYVYERILNGQYRIPEFYKSDLQLEFDKVWNFQKAFHPQLSDELYEKLKDKNKSQTWAICRETLGIQGKKSSSTGKERTKESYYNRQLALRKELDLETLTCVLQDINGQKSSLSGLLSAISDRSKELYLAHMTVGQMLVRRLHDNPNASLKNIVFYRKDYMDEFEKIWSVQSQFHPELTPELKKRLRDIIIFYQRPLKSQKGLVNLCEFESRTFNKCVDGAVKKITIGPRVCPRSSPLFQEFKICQTINNILIDGQCLDDDERADLVSELTYRDGMTDSEILRLLHKSPKEHRVNFKKVDGNKTMSALLKACEKIINSLGYDVDLSKGPARDKLFKIEEILGKEGVKTDFLHFDSSLSSPAFESQDSYALWHLLYSYEGDKSTSGDKSLVDKIKSLCSMDEGSAKIMAGCVFSSDYGSLSAKAMRKILPYMKDGLEYSAACAMAGYRHSKSSLTKEELASKEYVDHLKLLPKNSLRNPVVEKILNQMINVVNSVVDAYGKPDEIRIEMARELKKSASEREQAQKNISAASKVNESIVATLKGSPFFIDSPSRNDVIRYRLWEELKPNGYKTLYSGTYIPKESLFSKEFDIEHIIPQALLFDDSFANKTLEARWCNLEKSNKTAMDYVLSKYDEAGVQAYLDRVDSLVKDGISKTKISRLKMKGTEIPDDFINRELRDSQYIARKAREILESMVKFVVPTTGSVTARLRDDWQLVNVMQELNWEKYSKLGMTSYRQDRDGRRIPVIEDWTKRNDHRHHAMDALTIAFTRRQFIQYLNHLNAKIDVTDKSDIELRDYNLDDVDFSAKSPRDRFGIVRALQNKYLYKDEKQKYRFVPPMPIDELRMEAKRQLDSVLVSFKAKNKVCTKNVNVIKSRNGNKRCPQLTPRGPLHNETIYGKNLEYVTKDEKVGSSFDMEKIATVCKKSYREALLRRLNEFGGDAKKAFTGKNALDKNPIWVDEHHSAKVPGRVNTVSMEPVYTIRKAVDSSLNIDKVIDRRLRAVLQARLDEYGGNASKAFSNLDENPIWLNKEKGIAVKRVAIDESVIPIPIRNKRDKDGQFVLDYKNNPVQSDFVKTGGNHHAAIFLTPSGKLQDVVVSFNEAVMRKSLGLEVVDRNYKKDEGWQFLFTLKQNEYFVFPNPEAGFSPKDYDLMDPANNAVISPNLYRVQKIAKCNYMFRHHLETNVEEDSRLRNISWINIRTPSGLEGAVKVRVDNLGRIVAVGEYD

SEQ ID NO: 6678 - protein, 1423 aa, synthetic construct
  REGION 1..1423: note = Synthetic
MSTEAKKNLGLDLGTTSIGWAVVTEAEQSTIERVGVRVNPLTTDEQTNFEKGKPVSINAERTLKRGMRRNLDRYQLRRDNLIETLKEHHLIDDNTILAEDGKATTHETWQLRALSASHQIPLDAFAKVLLAINKKRGYKSSRKAKDQDEGQIIDGMTIAKRLYEENLTPGQLAYQLLKEGKRHLPDFYRSDLNAELDKVWSFQKSFYPEILTNEFKKHLEGKGQRATSAAFWGNYGFNTVENKGTRDEKRLQAYGWRGRAPQQQLSKEEVAYVITEINNDLHKSSGYLGAISDRSKELYFNNETVGQYLYKQLKQNPHTRLKGQVFYRQDYLDEFERIWEVQASYYPQLTDKLKEEVRDIIIFYQRKLKSQKGLISICEFERKEVEVNKNGQKTKKTVGLRVAPKSSPLFQEFKTWQVLNYLELRNKTTKEILKPDIEAKQQLFNELNIKGNLPISSIIKILGYKTKEWEANYSVLEGNRTACSLYEAYLKILELEGYDDDLFKLAGSDEINISKIDKTSTEIRQIVQTVFELLNINTAILDFDAEIDGKAFEQQASYQLWHLLYSYEGDNSISGNEKLYELFKQKFGFKKEHTQILANVAFSDDYGNLSSKAMRKIFPYIKELTYDKACLEVGYKHSASSLTKEEINNRPLKPRLELLKKNELRSPVVEKILNQMVNVVNALIDDENSKLKAQGLPEDFHFDEIRIELARDLKKNATERAEMSANINAAKIRHDNIAKALQAEFGIKNPTRNDIIRYKLYQELKNNGYKDLYTNTYIPREILFSKQIDIDHIIPQMSLFDDSFSNKTVVFRKDNQDKGNKTAYDYILDQYGEQAVTEFVTRITLLFDLGKKNTEEGINKAKFLKLQKRMSEIGDGFIERDLRESQYIAKKAKNMLLGICRSVVSTTGEITARLREDWDLVNIMQEINMPKFRALGLTEMIEKKDGGEKERIKDWSKRNDHRHHAMDALTIAFTKHNHIQYLNYLNARKDKDHKLHGNIIAIETKETELKYDDLGNRKRKFKPPMPNFRVVAKEHIERVLVSHKAKNKVVTKNNNKTKSKTGENVKGELTPRGQLHKETVYGKYRYYESKEEKIGTRFDGTVINMVANPLYKELLLKRLLANNNDPQKAFTGKNALNKLPIYLDNTQQAVVPEKVKLIWLEDNYSIRKDVTPENFRDVKTIDKILDAGVKRLLQKRLEAFDNDPKRAFSELDKNPIWFNQSKGISVKRVTISGVKNAESLHFKRDHFGNFILDKKGRKIPSSFVSTSNNHHVAIYRDAGGNLQDRVISLFDAVQLVNAGLPIIDKQYNKGIGWNFLFTMKQNEMFVFPNDKTGFDPLAIDLLNPDNYQLISPNLFRVQTISVVKYGNNTVRDFKFRHHLETLLEDRKELQGITFQQLKSLAPLEKIVKVRINAIGQIVKTGEY

SEQ ID NO: 6679 - protein, 1380 aa, synthetic construct
  REGION 1..1380: note = Synthetic
MKKILGLDLGTNSIGWALVNEAENNTEQSSIVKLGVRVNPLTVDEQSNFERGKSITTTADRTLKRSMRRNLQRYKLRRENLIEILRINGLVSDDTTFSENGNRSTFETYRLRARAATEEISLSEFARVLLMINKKRGYKSSRKAKNQEEGQLIDGMGIAKKLYDENLTPGQLVLGLLLENKKHVPDFYRSDLISEFGRVWNFQSQFYPEIFTKEFRNEIEGKGQRVTSAAFWKKFGFNIAENKNTRDEKRLQAYKWRSKAIDSQLLKEEAAYVITEINTNLNSSSGYLGSISDRSKELYFNKLTVGQYLMSQLEMNSHTRLKNQVFYRQDYLDEFDVIWEKQSTFHEKLTPELKHEVRNIIIFYQRRLKSQKGLIGFCEFENRQIEILVDGKKKKRTVGFKVCPKSSPLFQEFKIWQILNNLEVFEKNNNKRRLLDQEEKDLLFKELTLKNKLTKADVLKLLFANPIELDLNYKEIEGNRTQAVLFEAYFRIIELTGHGEFDFSKMNYAQISSTVKSIFTGLNYNTDILFFNSELEGIEFERQAAYKFWHLLYSYEGDDSKTGNEKLVNKITELFGFEKEYAVILANVSFQQDYGSLSSKAIRKILPYLKAGNDFSEACKYAGYRHSKSSLTKEELDTKVLKDKLEILPKNSLRNPVVEKIINQMINVVNTVVDAYGKPDEIRIELARELKKSAKEREDLTNAINIATIEHEKYRAILQSEFGISNVSRNDIIRYKLYLELESRGFKTLYTNTYIAQEKLFSKEFDIEHIIPQSRLFDDSFSNKTIETRAANIDKGNYTAYEYVLAKYGQNGLIEYLDRLEELYKAGKISRGKYNKLKMKGEDIPDDFIARDLRDSQYIAKKAKAILEELVKEVISTTGSITDRLREDWQLIDVMQELNWGKFEMLGMTETIENRDGHKIRRIKDWTKRNDHRHHAMDALTIAFTKRSFIQYLNNLNARSDKAGSIYGIEQKELYRDERGKLKFKPPIPLNDFRYEAKKHLENTLISIKAKNKVATININETDKKNGTNKKKQLTPRGQLHLETVYGSIKRFISKMEKVGSAFNEEKIATVAKKSYRIALLKRLIEFDKDPKKAFTGKNSLDKNPLYLNDLQTLQVPEKIKTVGVVTIYTIRKDITPDLKIEKVIDKKIRELLQVRLNEFGGDSKKAFSNLDENPIWLNEEKGISIKRVTITGINNAVALHDKRDKDGVLILDTEGKKQAVDFVNTGNNHHVAIYNDDKGILQENVVSFFEATMRVNQGLPIIDKDYRKDEGWEFLFSMKQNEYFVFPNEKTGFNPKEIDLLDSKNYFLISPNLFRVQKISTKNYVFNHHLETKAVDGDTLKSKKYLIGITHYFIQTPTNLKDLIKVRVNHCGNIVSVGE

SEQ ID NO: 6680 - protein, 1363 aa, synthetic construct
  REGION 1..1363: note = Synthetic
MNTKKILGLDLGTTSIGWALVNESIDPQQRSEIIKIGVRVNPLTVDEKDNFSKGADITTNADRALKRSMRRNLQRYKLRRDELTALLKSKGWISDDTILAEHTNRSTFETWQLRAKAAKEHISLEEFARVLLMINKKRGYKSSRKAKSNDEGELIDGMTVAKQLYEQGLTPGQFSYQLLMQGHKHLPDYYRSDLRDELLKIWTVQAAFYSNILTQELYETLIGRNERQTWAILAKAWNLAGIKINEKGEALKKELYRLRSNATQEKLNLEYLAVVLQKINGQINASSGYLGAISDRSKELYFNNQTVGEFQWTELQNNPHHSLKNEVFYRADYMDEFERIWEQQALYHSELTPELKRELRDVIIFYQRPLRSQKGLIGYCEFEKKQKEIMIDGKKKIVTSGCRVSPKSSPLFQEFKIWQILNNIVLSWEDENHHKQKRELTNDEKNRLHEKLNTLDKLSKADALKLLYGKPATALDLNYKEIEGNRTIAAFYRAYLSIVNMNMPEGKEIKKPEYEIIRAHFEKHGINTDILSFNSNVSADALQNEPLYKLWHLLYSYEGDKSNTGIESLIHIISERYGFTEDQAKIIANIKLVEDYGNLSTKAMRNILPYMREGKKYDEACEYAGYKFSKQSLTREEIDSKELKALLDILPKNSLRNPVVEKILNQMINVVNNIIEEYGRPDEIRIELARELKKNAEKRKETTKSINDEKNLQEKYRQILHDEFGLEHVSRNDIIRYKLYLELEKRGYKTLYSNTYIPRERLFSKDFDIEHIIPQAKVFDDSFANKTLELCQINIEKSNMTAIDFIASKYGEQGVAEYIARIDNLAAEHAISPAKAKYLKMREEEIQSGFLNRDLSDTAYIARKAREILLDVVPEVHTTSGSITNRLREDWQLVNLMQELNWDKYNAIGQVEYYTDHDGRRIGNIKDWTKRNDHRHHAMDALTIAFTRPEYVNYLNNLNARSDKSGIIFAVEKKYLHRNEHGKIVFLPPMPLDQFRAEAKKQLEAILVSIKAKNKVVTRNVNKSKTKSGYKRTEQLTPRGQLHNETVYGSRKKYVTKMEKVGSAFDVAKIMTVAKPAEREMLLQRLQKNGMNPKKAFTGKNALDMRVKTVSLETEYTIRKAVAPDLNVDKVIDQHVRQILEARLAEYGNDPRKAFANLDENPIYLNKEKGITIKRVAITGVSNAVALHDKKDNQGQYILDAEGNRIPTDFVNTGSNHHVAIYQDAKGEWQEHVVSFYEATMRSNQELPVVDKEYNKDLGWTFLFTMKQNEYFVFPNDNTNFNPQDLDLTDPANYAAISPYLYRVQKLTQGDYWFRHHLETQTDSTKKELRDITWKRITSPKGLKGIVKVRINHLGEIVAVGEY

SEQ ID NO: 6681 - protein, 1370 aa, synthetic construct
  REGION 1..1370: note = Synthetic
MKRILGLDLGTTSIGWALVDEATEDNEKSKIIKLGVRANPLTTDELTDFEKGRPLSVNADRTLKRGARRNLQRFKLRRNNLVEILTKHCIISKDTSLTEIGKNTTHQTLSLRAKAARKKIELEELAKVFLAINKKRGYKSSRKAKNEEEGNLIDGMAIAKELYDKKLTPGQYVYELLNQGKKYIPEFYRSDLQAEFDAIWGFQKQFYPEILVDTLYKELLGKNKTQTWAICEKPFGIVGIKQEGKTNEKRLQRYQWRVKGLTEQLESEYLAIVLQEINNNLNKSSGYLGAISDRSKELYFNNETVGENLYNQLLKTPHTSLRNQVFYRQDYLDEFEQIWETQANFYTELTSTLKQEIRDVIIFYQRKLKSQKHLISNCEFEKHHKAVPRSSPLFQEFKIWQVLNNLEFKNKTTKEVQVPDKDLKQLLFEELNLRGNLKPNEIMKIVGLPTKEWSLNYKEAIEGNRTNQALYSIYQQIAENEGYGFEWPKKSAKEIKEELKIIFPQIGIKPSILDFDAELDGGVFDKQESYQFWHLLYSSEDDSKILEKDKLVYGNSNVALKKKLDLKYGFKPEYGNLLVNITFQPDYGSLSARAIRKILPFLKSGNEYSEACQLASYNHSHSMNNEERANRSLKDKLELLKKNSLRNPVVEKILNQMINLINLVIETYGKPEEIRIELARELKKSASERADTTKYINTATKKNEEVRKIIAKDFGIPNPTRNDVIKYKLYEELSENGHKTLFTNQYIPREKLFSKEIDIEHVIPKAMLFDDSFSNKTLAYRNVNLKKADRTAFDFIENDYNNDLENYKSRVGVLYKKGKGSISKGKYKKLLMSKENLPDGFIERDLRNSQYIAKKAKQLLEEVFRTVNTTTGRVTDKLREDWDLINVMKELNLPKYRTLGLTEMQERKEGKKVEQIIDWTKRNDHRHHAMDALTVAFTSYSHIQYLNNLSASRDKENSTLYGIRNKITKQYVNKNGGRKRRFVPPMNNFREDAKQHIEGILISFKAKNKVVTKNKNRTKLGGKDKYNEKTQLTPRGQLHKETVYGKSKRAMEKATKLNKRFSLEQAKMIVDKDIRVLVLGHLKKHQNNPEIGFDTKILKKEPLIYKDESLKEVRCFEEIYTIRKDISPDLKVDKVVDEGVKKVLQQRLVEFDNKPKEAFSNLDKNPIWLNKAKEISIKRVTITGVSNAEPLHFKKDHLGIEILDKNNQKQAVDFVSTGNNHHVAIYRDSKEKLQEKVVSFYEAVARVNEGLSIIDKEYNSDQGWEFLFTMKQNEMFVFPSEDFDLQELDLMDEKNAPLISKYLFRVQKISTKNYLFAHHLETKAINGEDLKNKKMLSQVTYHSIRSTEPLDGIIKVRTDHIGKIVQIGEY

SEQ ID NO: 6682 - protein, 1396 aa, synthetic construct
  REGION 1..1396: note = Synthetic
MSKTILGLDLGTNSIGWALVEEAETNHESSKIIKLGVRVIPLTVDEQTNFEKGKPISTNTERTLKRGARRNLQRYKLRRENLIEILISNKIINQDTPLTEIGKNTTHQTLMLRAKSAQDKVDLVDFAKILLAINKKRGYKSSRKSKSSDEGIAIDGMTVAKILYEKNITPGQYVYESLINGNKIIPDFYRSDLRNELKKIWDKQSMFYPTLLTNDLYHAIEDKNKSQTYKILESPWKLEGLKQSGKKDEQRLERYKWRQQALSEKIELEKLSVVLQEINNEINKSSGYLGAISDRSKILYLNKITVGEYLYNQILKNPHTSLKNKVFYRQDYLDEFEQIWETQAKHYPHILTKELKEEIRDVVIFYQRKLKSQKGNVSFCQFESKQEQYVDNSTGKTKYRTIGQRVAPKSSPIFQEFKIWQNINNLNYINEKENQIIEVRNLDDYIREEIFEELNLKGPLTPTDILKIISKHIFINKISDWRCNFEKIEGNTTNKALLSIYQKIAEAEGYGFDWDKKSAKEIYEELEYIFTVIGVNKEILKFDSNSNDFDKQPYFLLWHLLYSAEDSDKASEEDRLIYGNNDTKLRKILHKKYGFKPEYAKMLSSITLEQDYGSLSTKAMRKITPFLQAGHPFAGKATNISEVGACELAGYNHSKSETADDLNRKTLKDKLELLPKNTLRNPVVEKILNQMINLVNQIIDEYGKPDEVRIELARELKKTASERDKMNREIADATRRNENIKNLLIKDFGIPNPTKNDIVRYRLWDELSVRGYKTIFTDKYIPKEKLFSKDIEIEHIIPQALLFDDSFSNKTLAYHEENQLKSNRTAYDFICQDYFLNKTDYENKVSDWYKSKSISRAKKNKLLMTYSEIPDGFIDRDLRNTQYISKKAREILLEVFKTVIPTTGSITDRLREDWGLINIMKELNLDKYRALGLTELEERFDVGSEKIKKVEVINNWTKRNDHRHHAVDALTVAFTTHNHIQYINNLNARRDTSHKKHDIIFAIEKTITERINGNIIFKEPIPNFRTVAKKEIESILVSYKAKNKVTTNNINKTKLQGKERYKKTLQTTPRGQLHKETIYGRSLRPMEKAIKINKKFSIEKLNLIIDKKERDAVLSHLSKYSNNVNIAFDTKVLKSNPILLNGEPLKEVKCFEEIFTIRKPISTDLKIDKVVDAGVRRALEERLKEFNGSSKDAFSNLEDNPIWLNKDKGVSIKNVTIIGVNSAIPLHYKKDHTGKEIISDIGEKISSDYVQTGNNHHVAIYLDKNGELQESVISFYEAVERKNQELPIVDKSYNNHLGWKFLFTMKQNEMFVFPSKDFDPTEVDLLNPENYELISRNLFRVQKIGTKDYTFRHHLETTVTNNLDFTFKRIRTPNGLKGIEKVRINHIGRIVQVGEY

SEQ ID NO: 6683 - protein, 1372 aa, synthetic construct
  REGION 1..1372: note = Synthetic
MKKILGLDLGVASIGWALVSEAEKENEVSSIIKLGVRVNPLTVDESSNFEKGKSITTNADRTLKRSMRRNLQRYKLRRENLIEILKQHGFISDDSILSEHGNNTTFQTYHFRAKAATEQVTLQQFAKILLMINKKRGYKSSRKAKSQDEGQLIDGMEVARRLHEENLTPGQLTYRLLTNGKKFIPDFYRSDLQTELDRIWDFQKQFYPDMLTDDFKKKIEGQGKENISKYFLAIHGVYTADNKDKDKRLQASKWRVDGLMKQLTAEEVAFVVRQLSGAIKESSGYLGAISDRSKELIFNKQTVGQSLMEQLVKNPHTRLKNQVFYRQDYLNEFETIWETQAKFYPILTPELKSEIRDVIIFYQRKLKSQKGLISFCEFESKQIEIIEDGKKKIKINGMRVCPKSSPIFQEFKIWQVLNNIEITDKDNILAKRFLNQEEKETLFDELSLKKELKGTDALKLLYKNHKELELNIETIEGNRTQAALFEAYQRIIELSGHGKYDFQKMRSKDVLDIVKSVFEGLSYNTAILKFDSALEKDAFEKQAFYQLWHLLYSFEGDQSNTGNEKLIQKLSDLYGFEKEYAHVLANVSFQDDYGSLSTKAIRKILPFMKEGNEYSVACGYAGYRHSKNSLTNEEKENKAYRDRLEILPKNSLRNPVVEKILNQMVNVINSIIDTYGKPDEIRIELARELKKNAKQREKMTRDINQAAANHEEYRKILKAQFGLSRVSRNDIIRYRLYDELKNNGYHTLYSNTYISPDKLFSKEFDIEHIIPQSRLFDDSFSNKTLELSSINRDKGNDPAYDYVSRKYGAEGLDEYKKRIDILYQQGIIKKAKYTKLMMPFSEIPEDFINRDLNDTQYIAKKAKEMLEELVKDVVSTTGSITDRLREDWQLVDLMQELNWDKYDKLGLTEIIENREGHKIKRITDWTKRNDHRHHAMDALTVAFTKRSLIQYLNTLNARSDKNSEIYEVETKYLKRDTKGKLRFIPPMPLNIFRAEAKKQLENILISIKAKNKVVTVNVNKTKKSGGVNKKKQLTPRGQLHNETIYGSIQCPNVREEKVGGGFDEAQIAKVASKRYREALLARLAAFGNDTKKAFTGKNALTKNPIYLGERQMECVPEKVKIVDVETIYTIRKEISPDLKLDKVIDSGIQAILKVRLDEYGGDAKRAFSNLDENPIWLNKDKGISIKRVTIRGINNANSLHDKKDKDGNLILGKNGKKQPVDFINTGNNHHVAIYKDNEGNLQEVVVSFYEATMRANQKLQIVDKTYKQSEGWCFLFTMKQNEYFVFPNPNTGFDPHGIDLKDPDKYAEISPNLFRVQKFTNKDYFFRHHLETNVENNNSLKGITWLRLGLNGINNVLKVRVNHIGQIVDVGE

SEQ ID NO: 6684 - protein, 1378 aa, synthetic construct
  REGION 1..1378: note = Synthetic
MKKILGLDLGTNSIGWALVNERESENEKSSIIKLGVRVNPLTVDEQRNFEQGKSITTNADRTLKRSMRRNLQRYKLRRENLLDVLKDNGLIFDDSILLENGNKTTFETYRLRAKAATKEISLEELARVLLMINKKRGYKSSRKAKSNDEGQLIDGMEVAKLLYENNLTPGQFTLQILEKGNKYIPDFYRSDLEQEFDKVFDKQNLFYPEILSQELKEELRRKKRDAVWAICAKTFKEKGFELVGTKRQGKVADQKLENYKLRASALTEKLDLEQFVIVMQQINAQLNASSGYLGAISDRSKELYFENQTVGQYQMAELDKNPNYSLRNQVFYRQDYLDEFERIWETQAGFHNELTPELKKVIRDIVIFYQRQLKSQKGLISFCEFESRQIEVEIEGEKKLKTIGYRVCPKSSPLFQEFKIWQILNNLEVQDKSTNVSRRLEQEEKEILFAELNLKDKISKVDVLKLLYKNHKNLDLNYKEIEGNKTNNAFFKAYQSIIELSGHGEYDFSKMQASEIMDIVESVFKGLGWNTDILHFNFSLQGKEFENQAAYKFWHLLYSFEGDNSKLGNEKLINKITELYKFDKEYAIILANVTLQPDYGSLSTKAIRKILPYMKDGCEYSVACQYAGYRHSKNSLTKEELDNKVLKDRLDILPRNSLRNPVVEKILNQMINVVNTIAATYGKPDEIRIELARELKNNAKEREEMTAAINKTTAEHEKYREILQKEFGIQNVSRNDIIRYKLYLELKDNGFKTLYSDTYIPQEKLFSKEFDIEHIIPKAKLFDDSFSNKTIEARGVNINKRDVTAYDYVLEKYGENDDKGYKTKIENLFKKGSISGTKCRKLLMREADIPSDFIERDLRDSQYIAKKAREILEGMVKFVVPTTGSITSRLREDWQLIDIMQELNWNKYKKLGLTETIEDKDGRIIRRIKDWTKRNDHRHHAMDALTIAFTKSGIIQYLNNLNARSDKSSSIYGIEQNELSKDNHGKPKFNPPMPLDEFRTEAKRQLENILISIKAKNKVVTKNINITKKEEGTNKKIQLTPRGQLHNETVYGRIKKYATKEEKIGSAFDAIKITTVANKKYREALLARLTQYGNDATKAFTGKNSLDKNPIFLNEQHTETVPIKVKTVEFEDVYKIRKEVSKDLKLEKVVDSKIRKILENRLKEFGGDANKAFSNLDENPIWQNKKKGIAIKRVSIYGVSNAEALHDKHDQFGKPILDKEGKTQPADFVSTSNNHHIAIYRDLDGNLKENVVSFYEATMRANIGNPIVDKDYKKAEGWQFLFTMKQNEYFVFPNKETDFDPNVIDLLDPDNFAVISPNLYRVQIISSKDYTFRHHLETTVVNNIKDYTFKRIRNTMSLEGILKVRVNHIGQIVSVGEY

SEQ ID NO: 6685 - protein, 1454 aa, synthetic construct
  REGION 1..1454: note = Synthetic
VSSFQQQIYNYFFYPTLRKTVRLIFLLMVNYRPNYKDTFMTKNILGLDLGTNSIGWAFVKENSNDKAQSSIEKIGVRVNPLTTDEQTNFEKGKPITTNAGRTLARSARRNLQRYKLRRENLIQILLKNKWITKENILAENGNHTTFETFRLRALAAEQRIEINELARVLLMINKKRGYKSSRKVNNTEEGQLIDGMDIAKKLYIDQLTPGQYVYQLLSEGKKKVPDFYRSDLQKELDDIWNFQQTFYSDIFTNNLKEEIHNKSKVTTWAILKTPFNLIGIKREGKRDEQKLENYKWRVEALSKQLNLEQLAIVLQEINSQIYNSSGYLGAISDRSKELVFNNQTVGQFQYEQLQKNPHARLKNQVFYRQDYMNEFETIWEKQTEFHQELTTNLKEEIRDIIIFYQRKLKSQKGLISFCEFEQQEIEINGKKKTIGLRVSPKSSPLLWEFKIWQILHNVKLQNKETKEVYSLNQEDKQMLFEELNLKGNLSATEVLKLLYDKPKNWELNYKELEGNRTNQNLYNVYLSILDIEGYDIRKELKLKLNKDDISLSDIDKSANKIKKIIHTIFNHLKIDTKILDFDAQLDGKAFEQQSSYKLWHLLYSYEEDDSPTGMDSLYRLLSEKFGFTTEQAKILGNVAFQPDYGNLSTKAIRKIYPFIKEHEYSVACEYAHYRHSKNSLTREELEKRITKDKLDILPKNSLRNPVVEKILNQMINVVNTIIDTENDKLEKEGKPRDFKFDEIRIELARELKKNAKEREELTKAINSSKIEHEKIIKILQNEDGIKYPTRNDIIRYKLYQELKNNGYKNLYTNTAVKRKDIFTKEYDIDHIIPQSRLFDDSFSNKTLVPRDVNLKKGNRTAYDYILSDYGEDKLNEFETKIESLYKEEGISKAKYKKLLIKGSEIGEGFIERDLRDSQYIAKKAKEILFQITKSIVSTSGSITDRLRQDWGLVNIMKELNLEKYEIAGLVEIQEDKNGQPKKVIKDWTKRNDHRHHAMDALTVAFTKRSFIQYLNNLNARRNDEYEGISNSNDKKSIETNNLKISSKDALDIEEKETHKVKDGKGNYKRVFNEPISNFRQLAKQHLEAILVSHKAKNKVVTRNINKIKGTDKLQLGLTPRGQMHKETVYGKIKQPVFKDEKISAKFDVETIQKVANPEFRSLLLQRLQENDGDPKKAFTGKNSLIKNPILLNDRTPLPEKIKLIWFEDNYVIRKEVGPDLKIDKVIDEGVKRILQDRLNKFNSDSKKAFSDLEQNPIWLNEEKGIAIKRVTISGVNNVEALHHKKDHLGNEILDNDGKKIPVDFVSTGNNHHVAIYEDEKGNLQENVVSFYEAVARVNEDLPIVDQNHNKHLGWKFLFTMKQNEMFIFPSNDFNPNEIDLLDRENQTIISKHLFRVQKFSEKDYWFRHHLESKILDLKELNEITFIRKRNPKSISNIIKVRTNHLGEIIAIGEY

SEQ ID NO: 6686 - protein, 1426 aa, synthetic construct
  REGION 1..1426: note = Synthetic
MKKILGLDLGTNSIGWAVVNEAENETEQSSIVKLGVRVNPLTVDELGNFEKGKSIPTNAERTLKRSMRRNLHRYKLRRANLIEILLEHHWIDENTILSEQGNNSTFETYRLRAKAATEMISLSEFARVLLMINKKRGYKSSRKAQSGDEGQIIDGMSVAKKLYEENLTPGQYSYSLICAGKKKLPDYYRSDLQCEFDRIWNFQKQFYDDKLTVELKENLVSKNSNQTWAICAKPWNLVGLKRNLKRDELKKENYKLRCDALSEKLDLEYLAIVLQEINGQINASSGYLGSIGDRSKELYFNNQTVGQYQMAELIANPNYSLRNQVFYRQDYLDEFEKIWEKQAQHHKELTPELKSEIRDVIIFYQRPLKSQKGLVSFCEFESRQIEVEVDGKNKIKTIGMKVCPKSSPVFQEFKILQVLNNIIVSNKETKEKFFLNEEEREALLNELKYKDKLSKKEVLKFLYKDDKGLDMNFKEIEGDRTQFALFKVYQAIIENSGNGEYDFSKMNSKKALEIVSDVFSAIGVNTAILSDFKSEYNDFENHPYFKLWHLLYSFEGDKSVTGYDNLVNALMKKYGFDKDGAVMLANVSLQPDYGSLSTKAMRKIIPFLRDGKEYSEACSMAGYRHSARSLTKEEIEKKELVDRLQILPKNSLRNPVVEKILNQMVNVVNQITDTYGKPDEIRIELARELKKSAKEREEMTKQINANSKLHEDYIKILHDEFGLQSISRNDIIRYKLYLELEKNGYHTLYTNTYIPKEKLFSKEFDIEHIIPQAKVFDDSFSNKTLEKRDANIAKGNLTAADYVATLGQTAKEDFFQRVMSLFNAKAISRTKMTNLLIKEEDIPSGFVNRDLRDSQYIAKKAREILESFVKVVVPTTGSVTDRLREDWQLVDIMKELNWNKYDKLGLTYYETDKDGRTIGKIQDWTKRNDHRHHAMDALTIAFTKHSYIQYLNNLNARVQKGVDEYFDLDMVEISKLDKEQRTAAVYAIERKELYRDSNHKLRFRPPFPLDEFRREAKKQLENILVSIKAKNKVVTKNINVIKQGGGKKGRIVQLTPRGQLHLETVYGSHKQYFIKEEKIGASFTEQKIMLVSNKAYRDALIRRLHEFGGDAKKAFTGKNSLEKNPIYLNEEQTMRVPDKVNLVTFETVYTIRKPISPDIKLDKVVDKGVRSILEARLAEFKGDAKKAFSNLEENPIYINKEKGISIKRVTITGINNAQALHAKRDKDGKIIYDADGHSIAADFVNTGNNHHVAVFRKPKLDKNNVQIIDEKGNPQYELDEHIVSFYEAVARANQGLPIVDKEYKKEEGWQFLFTMKQNEYFVFPRYETYVDESGNKVQKMTFNPLDYNEEWYKNPENYHLISPNLFRVQKFSSKDYVFRHHLETVVDDNNILRDTTWKRISNVDGLNGIVKVRVTHIGQIVSIGEY

SEQ ID NO: 6687 - protein, 1375 aa, synthetic construct
  REGION 1..1375: note = Synthetic
MKRILGLDLGTTSIGWAFVNEADSENEVSAIVRTGVRVIPLSTDEQQDFTKGNTITINADRTLKRGMRRNLQRYKQRREAVIEILTKIGFITKETALSEQNKTTHSTYELRAKAPSEKISKEDFARVLLMINKKRGYKSSRKANNQEEGQLIDGMAVAKRLNNEKLTPGQLSYCLIKEGKKLLPDYYRSDLQGEFDAIWNFQKQFYPNYLTDFHKEALQGLNKTTTGQYFEKKIGTERAENKGATKKLQEYEWRTNAISGKLSLPQIAYILTEINNQINQSSGYLGAISDRSKELYFNNLTVGQFQYNLIKTKPHTSLKNQVFYRQDYMDEFDAIWKEQSKYYPELTEEIRKELRDITIFYQRRLKSQKGLINICEFESVERDVTVGNTTKKKLVGPRVAPKSSPVFQQAKVWQNINAIRVSLKSNENEFFSIEDETKQLLFNELNLVESMKDRDFLKWLFKDSKNNAKDWKINFESIEGNRTQSALFSVYKKIVELEGYDKIDYGKPTKEIIEILRTCFEEIGIDPKIFNLDMGIVGNNFSKQPGYQLWHLLYSYEDDDSTTGTESLLNKLQSNFGFNREHAQLLAAVTFQEDYGGLSVRALRKIYPFLEEGKMYDEACKLAGYNHSNSITAEENKERLLQDRLEILKKNSLRNPVVEKILNQMINVVNAIMDDPDMGRPDEIRVELARELKKTAKQRKEMTQAIGKATKEHIEYREKIKKEFGLSYVSRKDLIKYKLYLELKSIGFKTLYSGTYIKPEELFTNKFDVEHIIPQSVLFDDSFSNKTIELRDVNLEKGNETAFDYCERKGWAKQFDSRVQEVFAQKGIFYGKLKKLLMSKADIPEGFLNRDLGNSAYIARKASELLKGITRTVSATSGTITDKLRSDWELINVLQELTWDKYEKLDLTFYEYNKEGKALPRIIDWTKRNDHRHHAMDAITVAFTKPAFVQYLNNMNADSNKDPIIYAIKEKYTYRDNEGGRKFKKPFDSIREEAKKHLASILVSHKTKNKVVTLNKNKTKIKGKEKYKTKIELTPRGQLHKETIYGKNHIYDVKEEKINASFDKEKIGTVTKPIYREALLKRLELFDNDPKKAFAGKNALTKNPIFINGSETNVPDKVKTQTVQSQFTIRKEITPDLKIDKVVDEGVKRILQDRLKLFNGKPKEAFANLDENPIWLNKEKGIQIKRVTITGVSNAEPLHIAKDLNGKEIFDGEGKEIPVDYVSTGNNHHVAIYRDDRGNLIEEVVSFYEAVTRKSMRHPIVKKNHEKGWEFMFTMKQNEMFVFPKNGFNPDELDLMDLKNKSEISENMFRVQKISTKNYVFNHHLETEAVGAETFKTKKMLADVAYRSCRSEKHLEGAVKVRINHLGNIVHVGEY

SEQ ID NO: 6688 - protein, 1002 aa, synthetic construct
  REGION 1..1002: note = Synthetic
MKKILGLDLGTTSIGWALVNEAETESEKSSIIRLGVRVNPLTIDEKGNFEKGKAITTNSDRQQRHSARINLQRYKLRRQNLCDCLQIGGLLGSESMYEEGKASTFETYKLRAKAATEEVALHEFARILFMLNKKRGYKSNRKANSKEDGQVFDGMTIAKKLYEENLTPAEYSLQLLNKGKKFSPSYYRSDLESELNRIWEEQKKYYPEILTDDFYQQLEGKTKVNTTKIFLAKYGIYTADLKGLDKKMQPLKWRIEALNKQVDKEVLTFVVSDLKGQIENTSGLLGEISDRSKELYFNKQTVGQYVWASLKENPHVSIKNKPFYRQDYLDEFEKIWETQAAFHKELTPELKKEIRDIIIFYQRPLKSKKGLISICELEQKKEKVIIEGKEKEILIGSKVAPKSSPMYQEFRIWQNLNNVLLIDTEINESRPLDEEEKALLYNELSVRAKLSETEALKTINKKGKHWDLNFKELEGNRTQAVLFECYNRIITQTGHEECNFKKISAEDIRHYVATIFKNLGFNTDILDFNPSLEKHELEKQPMYQLWHLLYSYESDKSRTGNESLLNKLEANFGFPQEYASVLADATFEDDYGNISVKAIRKILPHLHDGYDYSEACERAGYNHSVRSLTKEELAQKVYKDRLDLLPKNSLRNPVVEKILNQMINVINAIIVEYGKPDEIRIEMARELKSSAAKREERTKSINQNAAENKRITEILQTEFGLSYISRNDIVKYKLYQELEANGFKTLYSNTYIPKEKLFSKDFDIEHIVPKARLFDDSFGNKTIEARDVNLAKSNKTAFDFVKEKYGEQGIEEYKKKLDTLLKENAISSGKYKKLMMSEADIPSDFINRDLRNTQYIARKAYEILGELVKTITPTTGKITDRLREDWQLIDVMKELNFEKYDRLGLTEVIEDRDGRKIKRIKDWTKRNDHRHHAMDALTIAFTKPSYIQYLNNLNARSDKSGSIYAIETKELHRENNTLRFNAPMPLNEFRKEAKRHLSAILV

SEQ ID NO: 6689 - protein, 1403 aa, synthetic construct
  REGION 1..1403: note = Synthetic
MKTILGLDLGTNSIGWAYVKEAENNLEMSSIEKIGVRVNPLTTDEQTNFEKGKPITTNAGRTLARSARRNLQRFKLRRENLIQILKTHQWISDETILAEDGNKTTFETFRLRADAAERTLELHELARVLLQINKKRGYKSSRKVNNTEEGSLIDGMDIAKKLYHDNLTPGQYVLNLLESGTKKTPDFYRSDLQSEFDKIWHFQQQFYPELMTETLKEELIGKGKVATWAVLKTPFNLVGIKRNGKRDDIKLENYQWRNLALSVQMDLEQIAIVLQEINGQLANSSGYLGAISDRSKELYFNQQTVGQYQYAQLKKNPHARLKNQVFYRQDYMDEFEKIWEVQSKGREAIFSNALKEELRDVIIFYQRKLKSQKGLISFCEFEQREIEVNGKKKTVGLRVIPKSSPLFQEFKIWQILHNVKLKNKETKEIYILSQEEKQMLFDELNVKGNLSASEVLKLLVDKPKNWEINYKTFEGNRTNQSLYNAYLTILENEGYDVREELKLKMNKDDITLADIDKSATEITEMVRIIFKDLGIKTELLDFNAELEGKAFEQQLSYQLWHLLYAYEEDNSPTGMETLYHLLEQKFGFKKEQAKVIGSIALQDDYGSLSSKALRKIYPFIKENEYSVACDLAGYRHSKHSLTKEELDNRELKSRLDILPKNSLRNPVVEKILNQMVNVVNTIIDTENDQLEKEGKPRNFKFDEIRIELARELKKNAKERAKMTSEINRATIENEKIKTIISRDFSHIQNPTRNDVIRYKLYQELSSNAYKDLYTDTKIDYHKLYSKEYDIDHIIPQSRLFDDSLSNKVLVPRQSNLDKSNNTAYDYISSKGENSLIKFQAVIDSLLKENKISKAKYKKLLMKGSEIGEGFIERDLRDSQYIAKKAKEILFQITKSVLSTSGSVTDRLREDWGLINVMKELNLEKYRLAGLTEMRTTKEGNPKEIIIDWTKRNDHRHHAMDALTVAFTKHSHIQYLNNLNARRNEQSDKKKNIEGIELKETHVVKDGKGNSKRIFNEPIPNFRQIAKQHLEGVLVSHKAKNKVVTKNINRIKGSDKVQIALTPRGQMHKETVYGKIKQYTFKEEKIGAKFDEATIAKVSNPQFRTLLLKRLAENNNDPKKAFTGKNALSKNPILLKNGNELPEKVRLMWLEDDYTIRKDIGPDLKIDKVIDEGIKRILQARLQEFGGDAKKAFSDLEQNPIWLNKEKGISIKRVTISGVKNAEALHTKKNHLGNPILDESGQEIPVDFVSTGNNHHVAIYEDEKGNLQEKVVSFYEAVARVNEGLPIIDQTYNAHLGWTFKFTMKQNEMFIFPSDDFNPQEIDLLDRKNQTLISKHLFRVQKISSKDYMFNHHLETKAIDGEILKTKKSLIGVTHYYIQTPSKLKNIIKVRTNHLGEIIHIGEY

SEQ ID NO: 6690 - protein, 1386 aa, synthetic construct
  REGION 1..1386: note = Synthetic
MKKILGLDLGVTSIGWALVNEAESKSEKSSIIKLGVRVNPLTVDEQNNFEEGKSITTNATRRSKRCARRNLQRYKLRREQLINILKQNNLITNQTILYETGNASTFETLKLRAKAAAQEISLEEFARVLLMLNKKRGYKSNRKCSNSEENGQAIDSFSIAQQMNDEDLTPGQCILSLIQSGKYHFPDFYASDLKAEFDKIWNVQKQYYPALLTDSLHEELDNKESKATWSILSKSFDLVGIKRETKGKEQVKENYIWRVQGLEEQLAPEQLAIVLQSINGQIKTASGYLGKISDRSKELHIHHMTVGQFLVSKLEKDPNCSLKNKVFYRQDYMDEFETLWETQRKFHPELTEDLKKEIRDVIIFYQRRLKSQKDLVCFCELEQKMVDKKINDKTVKINIGPRVCPKSSPLFQEFRIWQNLNNLKIDEKYLSLTDKQTLHDELEFRCKLKPADIYKILGLSGKGHSMNFEEIEGNRTMSTLYTAYAQMIEASGNGEYDFSKIRHTDAEKITTEVFECLGWNTDILHFDTTLEGSKLLQQPTCQLWHLLYSYEGDNSRTGIEKLINIIKERYNIAEEYAQILAKITFEPDYGRLSTKALRKILPYMQQGMEYSEACSSAGYQPSKSSCTKEETNQKIYLDKLEEIRKDSLRNPVVEKILNQMVNVINAIIDEYGKPDEIRIELARELKKSQKEREKDSKSVRDGHKRNDEITKYLKEHFGFENPSRNDIIRYRLYQELAGNGYKTLYSDTYIPEEEVFSKNFDIEHILPQARFFDDSFSNKTLESRSINLEKRDQTAYDFVSLKYGQEGLAKYETKIETLYKNGTIGRIKKERLLTTQKDIPQDFIERDLRDSQYIAREAKRMLEELVPTVVSTSGAITARLREDWGLVDVMQELNWSKYEKAGQTAVMERHGQKFNRIENWTKRNDHRHHAMDALTIAFTKRSYIQYLNNLNARIPKEEEWDGYVDLSAYSVNNLPDADSSKVVRYIESNQMYRDNKNKLRFIAPLENMRAEAQKELENILVSIKAKNKVGTIHTYYNHGKPYSQITPRGQLHKETVYGRSMRYVTEDVKIGSKTTYEVLSSVAKKIYREALTNRLSQFGNDPKKAFTGKNSLEKNPIYLDNAHNEKVPSIVKMVKMEPIYTIRKPIDAQLNLEKVVDVKIREILLKRLEEYGGDKQKAFSDMDKNPIWLNEEKGIQIKRVAINSGEKPEAIHSKRDQSGNLIYNASHQTIPSDYVCTGSNHHIAIYEDADGNLQEHVVSFLEASVRVNELHLPVVNEDYNKDLGWKFQFTMKQNEMFVFPDEETDFYPEDIDLLDERNYSRISPHLFRVQKLSSKFYVFRHHLETNVEENKNLKDTTWKALRNCNALKGIIKVRINHLGKIVHIGE

SEQ ID NO: 6691 - protein, 1371 aa, synthetic construct
  REGION 1..1371: note = Synthetic
MKKILGLDLGTTSIGWAFVQEGENNDSSIVRLGVRVNPLTTEELNNFEKGKAFTGNAERTMKRSARRNLQRYKQRRENLISILKENNIISKDTILAEDDKGSTHSTYANRAKAVSEQLSLESFAQLLLMINKKRGYKSSRKVNNEDEGKIIDGMGVAKRLYDEGLTPGQLCFQLLKEGVKALPDFYRSDLNSEFDKIWKKQGEYYPDIFTSDFKKEIQGKAQRATNAMFWSQFGFNTAENKGTREQKRLQAYEWRSKGINSQLSKEEAAFVIAEINNNLNNSSGYLGAISDRSKELYFNKETIGQYLYKQLQNNPHTKFKNQVFYRQDYLDEFDCIWEKQNTFHPSLTPILKNEIRDVIIFYQRKLKSQKGLVSICELENETVQLNNNGVKTSKLIGRKVAPKSSPLFQEFKIWQNLHSLRIKNKNTDTVHEFDLQAKELLFNELNLKGNLTKNAALNAVGYLSKDWELNYATLEGNRTNFSLYEAFFKMMELEGQEEIKWVQMNPVEIKSIVSDFFEVHGINSNILFFNGELESKEFEKQASYQLWHLLYSYESDNSNSGNELLYSLLLKKFGFKKEFAQILATIPLQQDYGNLSAKALRKMFVFIKENNYSESCKAAGYNHSSFLTKEENANRILKEKLEILPKNSLRNPIVEKILNQLVNVVNAIITDPSLGKPDEIRIELARELKKNAKERAEATLSINQANILHLSIASILQKEFNITNPTRNDIIRYKLYEELKNNGYKTLYSDTYIPREKLFSKEFDIEHIIPKARLFDDSFSNKTIAPRQENINKKDETAFDFVSNTLGNDKLVDYLARIEMMHNFKEGGISKAKYKKLLLKGVNIGEGFIERDLRDSQYIAKKAKQILEEICRTVNTTTGSITSKLREDWDLINVMQELNFDKYKKLGLTELIQQKDGNTKERIVEWTKRNDHRHHAMDALTVAFTKRSHVQYLNNLNARSDKSGSIYGIEQKETYKDSDGKRRFKLPLNNFRTEAKKQLENILVSIKAKNKVVTKNKNKTLSKKDEKIKIELTQRGQLHKETVYGKIKQYVTKDEKVGANFDETTIQLVADSKQRSALLQRLKENNNDPKKAFTAKNSLDKNPLFIDNDKTNPVPVKVKLVWFEDDYIIRKEINPDLKIEKVIDTGIRRILQARLDAFGGKAKEAFSNLEMNPIWLNEKSRIAIKRVAISGVKNAEALHNKKDNLGKTILDANGNALPVDFVSTGNNHHVAIYKDAEGVLQEKVMSLYEAVERVNQGLPVIDKLFNADLGWQFLFTMKQNEYFIFPNDTYSLKDIDLLDPKNYKLISPYLFRVQKISSKNYFFRHHLETNVEEPRLLNGVTYKSQLGIKGLVGISKVSINHIGQIVKVGEY

SEQ ID NO: 6692 - protein, 1388 aa, synthetic construct
  REGION 1..1388: note = Synthetic
MKKVLGLDLGTTSIGWALVNEAENTNEKSSIVKLGVRVNPLSVDEISNFEKGKSITTNAERTLKRGMRRNLQRYKLRRESLIETLKSNGFISDATTLSENGNHTTFETYNLRAKAATEMISLEQLARVLLMINKKRGYKSSRKVKEVDEGSLIDGMEVAKKLYNENLTPGQFCLQLLQAGKKYLPDFYRSDLQSEFDKVFDKQLSFYPNFLSVELKNELQGKKRDAVWAICAKEFKEKGFELVGTKRQGNASQQKFENYEWRAKALSEKLDLEQLVIVLQQINIQLNNSSGYLGAISDRSKELYFNQQTVGQYLMEKLDADPHYSLRNKVFYRQDYLDEFEKIWQTQSIYHKELTPDLKSEIRDIIIFYQRRLKSQKGLISFCEFESREIELVVNGKTIRKTTGLRVSPKSSPVFQEFKIWQNLNNTKVTDKKNSASRFLDQDEMNTLARELFIKKELSSSEALKILFKNHKDLELNFKKIEGNRTISEFFKAYQSIIELSGHGKHEFSKMSADEIISLVQDIFSALGYNTNILLFDALTEGHDIQQQALFKLWHLLYSYEGDNSKTGTESLIEKISAITGFPKEYAAIVASISLQDDYGSLSTKAMRKILPHLKEGFAYGGRKERQEEPSACEFAGYRHSASSLTKEEIKNKTYKNRLENLPKNSLRNPVVEKILNQLVNVVNGVIDAYGKPDEIRIELARELKKSADEREEMTTAINKTTTENEQIRKLLKSEFGLDHVSRNDLIRYKLYRELETRGCKTLYSNTYIPKEKLFTNDFDIEHIIPQSRLFDDSFSNKTLERRDINIEKGNETAYDYISNKYGAEMLSEYTQIVDDLLKAGKISLTKCRKLKMKGKDIPDDFIERDLRDSQYIARAAKGMLEKIANDVVTTTGSITDRLREDWQLVDVMQELNWEKYDKLGLTEIIEGREGQRIKRIKDWTKRNDHRHHAMDALTIAFTKRSHIQYLNNLNARSDKSGSIYGIETNELFRDDRGKLRFKPPMPIGQFRALAKKHLDNTLVSIKAKNKVVTKNINITKKKNGTNKKIQLTPRGQLHNETIYGSNKVYTTKEVKIGASFDETLIAKVSKKIYREALLKRLHEFGNDPKKAFTGRNSMSNNPVYVDAARTIVVPEKVKIVDIETIYTIRKDVGPDLRIDKVVDKKVRQKLEERLREYDNNPKQAFSNLDEYPIWLNHQKGIALKRVTITGIANAQALRDKKDKDGNLILDENGKTIPADFVNTGNNHHVAVYRDKEGNLQENVVSFFEATTRASLRLPIIDKDYRKDEGWEFLFSMKQNEYFVFPNEKTGFKPNEIDLLNPENYALISPNLFRVQKIATKDYFFRHHLETTVENNNNLKGITWLRCGLNSIEGIVKIRINHIGLIIAIGEE

SEQ ID NO: 6693 - protein, 1167 aa, synthetic construct
  REGION 1..1167: note = Synthetic
VGIKRGVKREELKLENFQWRVKALSERMNPEELAIVLQEINEQISNSSGYLGAISDRSKELYFNRQTVGQYQMAVLDNNPNIGLRNMVFYRQDYLDEFNTIWEKQAEFHKELTEDLKKEIRDIVIFYQRRLKSQKGLINICEFERRQIEVEIDGKKKIKTIGSRVIPRSSPLFQEFKIWQTLNDIEVSVLGVKNKRKKQDDNSTTLLDSAENIDSLKLNVSRPLDADEKSLLAKELFIRDKLTKSDVLKLLFNNPQNLNLNFKNIDGNRTGSALYQAFSKILEISGHESINFKKSADEIVEQVKTIFSALGWNTEVLCFDSEKELDKQPYFKLWHLLYSFEGDSTPTGDGNLIQKIADLCGFEKDYASILANITFQEDYGSLSTKTIRKILPHLKDGNQYDVACEYAGYKHSKSSLKKEEIKNKVLKDKLELLPKNSLRNPVVEKILNQMVNVINAIITTYGKPDEIRIELARELKKNAKEREELTKSIVDTTKTHEGIRAILQNDFGMSHVSRNAIIRYKLYEELKDNGYKTLYSNTYIPKEKLFSKDFDIEHIIPQARLFDDSFSNKTLEVKSINIEKGSKTAYDFVEEKYGEQGLQEYLNRCEVLFRDKKTKLRKLKMQESEIPEGFIDRDLRNTQYIAKKALSMLNEICRRVVATTGAITDELREDWQLVDVMKELNWEKYKVLGLVEYFEDNDGRLIGRIKDWTKRNDHRHHAMDALTVAFTKDVFIQYFNNKNASLKPDTNEAAIRNKYFQNGKAIPPMSLDEFRAEAKKHLNDTLISIKTKNKVVTINLNRTKKKNGINKKQQQTPRGQLHLETVYGSHKQYVVKEEKVNASFDAAKIATVNKPAYRDALLRRLQENGNDSKKAFTGKNSLDKQPVWLDAKQNECVPEKVKTVMLETVYTVRKPIDEKLNVDKVVDARIRKLLQDRIKEYGNAKSAFANLDENPIWLNKEKGITIKRVSVFGISKAQSLHEKKDKDGNFILDKDSRRIPVDFVNTGNNHHVAIYRKPVLDKKGQAVFDENGELKFELEEVVVSFFDAVTRVNLSQPIIDKDYKRSEGWKFLFSMKQNEYFVFPNEKTGFDPKEIDLLNPENYALISPNLFRVQKIASKDYVFRHHLETVVADRKELQEITWKRISSLSILNRIIKVRVNHIGQIVMIGEY

SEQ ID NO: 6694 - protein, 1432 aa, synthetic construct
  REGION 1..1432: note = Synthetic
MKKILGLDLGTTSIGWAFVNESDNNEEKSSIVKLGVRVNPLTTDEQTNFEKGKSISSNADRTLKRCARRNLQRYKLRRENLIEILKENKFISNETLLSENGNFTTFKTYENRAKAARGLYKDEEKITLEDFARTLLMINKKRGYKSSRKAKGQDEGQLIDGMEVAKKLYEDNLTPGQFVLEILSNGKKYIPDFYRSDLQTELDKIWNFQKQFFNDVLTDEFKEQLRGKGKQATSKIFLGKYKVYTADNKGAEKKKQAYQWRVDALTKEVTKEILAYVITEVNGDLNNSSGYLGAISDRSKELYFNKQTVGQYFWQQLTDWKNACEIARKEKQSCPPAPRFKNQVFYRQDYLEEFTTIWEQQAKHYKELTSELRDEIKEVIIFYQRKLKSQKGLISFCEFESFKKEIVVDKKKKIKTIGARVCPKSSPLFQEFKIWQVLNNLKIENKKTKEKSVPSIELKQLLFDELNIKGNFKKAEGLKLMFDKPNEWDLNFKELQGNSTNAALYNAYQNIINVSGHGEYDFTTMKASEIKELVQGVFKGFKIDAEILNFNSDSDKIENQLSYQFWHLLYSFEEDDSKLIEKLKTNFGFENEYARIIANITFQDDYGSLSAKAIKKILPHLKEGNTYDVACAYVGYNHSNSLNKEEKENRILKDKLEVLSKNSLRNPVVEKILNQLVNLVNTAIVEYGKPDEIRIELARELKKSAKEREQLTESITNAKAEHDEHRKILKAEFGLTNVSRNDIIRYKLYKELEHRGYKTLYTNTYIAPELLFTKNFDIEHIIPKSRLFDDSFSNKTLEKREANIDKADETAFDYVSRKFGDAELEKYLSRVEDLFKNEKISRTKYKKLQMKVSEIPKDFIDRDLRDTQYIAKKAKAMMEEVFKEVTTTTGSITDRLREDWQLVDIMQELNWNNYEVLGMTDEFTNRDGNVIKRIKDWTKRNDHRHHAMDALTVAFTKRSHVQYLNNLNARSDKSGSIYGIELKELYRDEKGKLRFKPPIPLNNFRNEAKKHLENILVSNKAKNKVVTKNKNAFKIKNGEKIKIELTPRGQLHLETVYGSVKQYKTEFVKVGSNFDLENINKVAKKKYREVLLKRLEEFENNPVKAFTGKNSLSKKPIYLDELQTNKVPEKVKLLSQIIVYTKRVAISPDIFKDSKKNDDFINRVDDIYDNSIKEALKKHYEQTKKEVELFNQTVTKDKDKKKVLETAFSNLDEKPIWLNREKGLSIKRVTTTGIINGEPLHYKKDKEGNFILDEKGNKINVDFVSTSSNHHTSIYIDEEGNLQDEVISFYETVIRVNQELPIVDKYYNKDKGWKFLFTMKQNEYFVFPNEKTGFNPNETDLINPENYHLISPNLYRVQTMLKKTYGASVIRDYQFRHHLETVVQRKNNDGRSINETPLKDIIYRRYKTLPELEKIVKVRLNHLGKIVQVGEY

SEQ ID NO: 6695 - protein, 1384 aa, synthetic construct
  REGION 1..1384: note = Synthetic
MKKILGLDLGTNSIGWALVNEAENKEETSSIIKLGVRIIHYDNFVNTKTGKEVKGDPVDSFKSGKGISPNAGRTQKRSMHRKLQRYKLRRKTLVELLTKYGFITDTTVCSENGNRTTFQTYRLRSKATTDKITLEEFSRVLLMINKKRGYKSSRKVQSNDEGQLIDSMSVAIQLYENEQTPGQFSLSLLRQGKKHLPAFYRSDLQSELNRIWNFQRQFYPDILTDEFREQIKAKGKLDTSKIFLGKYKIYTADNKGRDKQLQTYQWRSEALSKQLSLEEIAFVISDVNGAIHNSSGYLGDISDRSKELYFNKQTVGQYLMAELDKNPNYSLKNKVFYRQDYLDEFEKLWETQALYHPELTPEIKQEIRDIIIFYQRPLKSKKGLIDFCELESKQIEVTCDGKKKLKTVGLRVCPKSSPLFQEFKIWQVLNNIQVSEGKNHKRFLEQEEKERLFAELNWKEKLSKTEVSQLLYVKPTGIDLNFKEIEGNRTQAALLNIYLKIIEASGHDIANLSKASMPEVIKIVKTIFNGLGYNTDILSFDSSLEGKEFEEQPMYRLWHLLYSFEGDESKTGNEKLVNKLTELYGFEKEYAILLANITFQSDYGSLSTKAMRKILPFMKSGHEYSLACEYAGYRHSKRSLTKEELDKKVYIDKLSLLPRNSLRNPVVEKILNQMINVVNSIVDTYGKPDEIRIELARELKKSAKEREDMTNNIRKTTNEHEEYKVILQKEFGLANVSRNDIIRYKLYLELKDNGYKTLYSNTYIPREDLFTKKFDIEHIIPQAKLFDDSFSNKTLESRSINIAKSNATAYDFVKNKYSEQELSDYVERIHILFKNGSISKAKHDKLLMEEANIPSGFIERDLRDSQYIAKKAREILEDLVKFVVPTTGSITNRLREDWQLVNVMQELNWEKYNKQGLTEIYEDKDGRKIRRIKDWTKRNDHRHHAMDALTIAFTKQSFIQYLNNMNARSDKSGSIYGIEQKELYRDEHNKLRFNPPMPLNVFRAEAKRQLENILVSIKAKNKVVTQNTNKSKKKNGLNTKVQLTPRGQLHNETIYGSIKQYVTKMEKVGSGFDAEKVSQVANKEYREALLHRLTLFGNDPKKAFTGKNSLDKNPIYLNELQTRQVPTTIKTVSLETIYTIRKEISPDLKIEKVIDVQIRRILEARLKEYQGNAKQAFSNLEENPIWLNKEKNIAIKRVTISGISNATSLHDKRDHNGNLILDEKGRKQPVDFVSTSNNHHVAIYRDANDNLQENIISFFEATTRASLGLPIVDKEYKKSEGWTFLFSMKQNEYFVFPNKETGFDPSEIDLTDPDNYARISPNLFRVQKIATKDYTFRHHLETTVNTTKELQGLTWLRISSLNNLDKLAKVRINHIGQIISVGEY

SEQ ID NO: 6696 - protein, 1469 aa, synthetic construct
  REGION 1..1469: note = Synthetic
MSKKTILGLDLGTTSIGFAHVIEGEDIQQSEIKQIGVRVVPLTVDEEQNFEKGRSITTNAERTLKRGARRNLDRYQDRRENLIEVLQKAKIIDKETPLAEDGKNTTHQTWALRAKAAVEKIEKDELARVLLAINKKRGYKSSRKAKNEDEGQIIDGMAIAKRLYEENITPGQFVFQCLMEGKKSIPDFYRSDLQAEFDKVWNFQKQFYPEILTDQFYEELKGKGQRATSAAFWSTYKFNTADIKDLEDSLKNEQTIKLNKREQKRLQSYKWRSDAISKQLDKEEVAYVLTEINNNLNSSSGYLGEISDRSKELYFNQQTVGQYLYQQLQENPHTRLKNQVFYRQDYLDEFEKIWEVQSKYHPELTEELKTEIRDIIIFYQRKLKSQKGLISFCEFESKEIIVDGKKKTIGLRVAPKSSPLFQEFKIWQNLNNVLIRKKGSKKRVAKNENQTSIFEDEKEIFELDLEAKQQIFEELNLKGNLTAKKIIELLGYKPADWEMSYSQLEGNRTNQALYNAYLKILEIEGYDIKDILRVKSNKDEVELDDLKVSASEIKNMVRDIFKVLGIDTEILEFDAELDGKDFEKQASYQLWHLLYSYEEDDSHSGNEKLYELLEKKFGFKREHAEILANVALQDDYGNLSTKAMRKIIVHLKQGFAYGGRKDRPFEPSACEYAGYRHSKHSLTKEEIASRELDDTLELLKKNSLRNPVVEKILNQMVNVVNALIEKNSKRDENGKIVEYFKFDEIRIELARELKKNAKEREEMTSGINKAKSENDKIRERIRKDFPNVPNPTRNDIVRYKLYQELAFNGYKDLYTNSKVEYHKLFSKEYDIDHIIPQSRLFDDSFSNKVLVPRQANLDKSNQTAFDYMSTKGEQDFSTYISNVEALFKEKVITKAKYQKLLKKTTDIGDGFIERDLRESQYIAKKAKEMLLKITKSVVSTSGSITDRLREDWGLINVMKELNLPKYRALGLTEMQERKFGQKVEVIKDWTKRNDHRHHAMDALTMAFTKHNHIQYLNYLNARKNENHKLHGNIIAIEIKELHRDEEGKLRFNLPIPNFRQAAKEHLENVLISHKAKNKVVTKNKNRIKTKKGEKIKIELTPRGQLHKETVYGKYHYYDSKEEKVSAKFDLETIQKVSNPVYKQALLERLSENGNDPKKAFSGKNSPSRNPIYLNELKTETLPEKVKLVWLEADYSIRKDVTPENFKDEKSINKVLDEGIRRILKDRLKQFDGDAKLAFSDLEKNPIWLNKEKGISIKRVSISGVKNAEPLHYKKDHFGKEILDDEGNKIPVSFVSTGNNHHVAIYKAPVLDRKGEIVLDEKGQPKYVLQENVVSFFEAVERVNQGLPIIDKTFNQHLGWKFLFTMKQNEMFVFPNEQTGFNPDEIDLLDPKNKKIISPNLFRVQTLSIVKYGNSTVRDFKFRHHLESTLIDDKSLQGITYNQIKSLSPLDKIVKVRIDHLGDIVSVGEY

SEQ ID NO: 6697 - protein, 1432 aa, synthetic construct
  REGION 1..1432: note = Synthetic
MKKILGLDLGTNSIGWALVNEAESEKEKSSIIKLGVRVNPLTVDEQQDFQKGKSITTNASRTLKRSMRRNLQRYKLRRENLIEILKENGFICDDTILSENGNFTTFETYRLRAKAATEEISLEQFARVLLMINKKRGYRSSRKVKGTEDGTAIDGMDIAKKLYDENLTPGQYCMQLIKAGKKQLTDFYRSDLQTEFDRLFDKQMSFYPDILSYDLKKELRDKKRDATWAICAKAFKEKGVELVGIKRQGTTNEQKIENYTWRVKGLSEKLDLEQLVIVLQQINTQINNSSGYLGAISDRSKELYFNKQTVGQYQMAILEKNPNASLKNMVFYRQDYMDEFDTIWEKQAEFHEELTDELKREIRDVVIFYQRNLKSQKGLLSLCEFESRKMEVEIDGKKKIKNVGSRVIPRSSPLFQEFKIWQTLNNIEVFGKGKSKKKSHSSLSYETEDPLENGGQRELFQEEKELLAVELSIKKELKKSDVLKLLFKNAKELDLNFPSIQGNLTQATLFDAYKQIVEFSGHEIDVEKRPAAEIIRSVEEIFKALNIDTDILYFDSDKAPDQQKMYKLWHLLYSFEGDNSKTGNENLIIKLSELYGFNREYASVLANLTFQDDYGSLSAKAIRKILPYLKAGNKYHLACEYAGYRHSMSSMTTEELEAKIYKDRLEILPKNSLRNPVVEKILNQMVNVVNTLIDNYGKPDEIRIELARELKKSAKEREELTKHIAETTKLHEQYRDILSKPPFNLSYISRNDIIRYKLYEELKDNGYKTFYSNTYISPSAVFSGDFDVEHIIPQSRLFDDSFSNKTLELRSINLEKGNKTAHDFVKEKYGETGTENSLDSYLVRIEDLLKKGVISRAKFNKLKMQEKDIPNGFIERDIRDTQYIARYAKSMLGDLVKHVVSTTGSITDRLRDDWQLIDVMKEINWEKYNSLGLTEEFSNEEGHRIRKIKDWTKRNDHRHHAMDALTVAFTKRSYIQYLNNLNARRTNDELGISSAEKDDSDNFSISSEDMRLNTRDVLGIEKKELERDKKGKLRFKPPMPLNEFREEAKRHLKNTLISIKSKNKVTTKNINITKKLGGVNKKVQLTPRGELHKETIYGSKRQYVVKEEAVNGTFNATKIGTVTKPAYREALLNRLQESANDPKKAFTGKNNLSKNPLWINEQCTKQVPEKVKTVTFKTIYTVRKDVSPELNLDKVIDKKVKAKLEERLFKYNGDAKKAFSNLEENPIWLDKEKRIAIKRVTISGISNAVALHEKRDKEGKPILDENGNGKPTDFVNTGNNHHVAIYLDAEGNLQESVVSFYEAVCRRNLGLPIIDKSYKASEGWTFLFSMKQNEYFVFPNKQTGFNPNEIDLLDPDNYNSISMNLFRVQKISTKNYLFNHHSETRAITGDDLKNKKQLSGITYHLIQSLPPIASIVKVRVNHIGEIVSVGEY

SEQ ID NO: 6698 - protein, 1412 aa, synthetic construct
  REGION 1..1412: note = Synthetic
MGNHSDSIFLFNSFIEISYTVSIMKRILGLDLGTTSIGWALVEEAENSEESKIIKLGVRVNPLTVDEKINFEGGKPITTNADRTLKRGARRNLDRYQLRRDYLIKELKNAGFINEETPLTEIGKDTTHQTLALRAQAAHKKVSLKDLAKVLLAINKKRGYKSSRKSKDENEGVAIDGMAVAKILYNDNLTPGEYAYNLLQQNKKHIPDFYPSDLKSEFDAVWKKQKEFYPEILTEILYKNLEGKNKGQSWTICSKPFEIEGIKLEGDRTQQKAKRYELRKDALLEKISLEHLAIVLQEINNDINGTSGYLGKISDRSKVLYIDSLTVGEYLYNQIKKDPHTSLKNQVFYRQDYLDEFEQIWETQATFYPELTKELKVKIRDIIIFYQRPLKSQKGLLSFCLFESWQQEYFDKVKQKNRKRTIGQRVIPKSSPLFQEFKIWQNINDLEFKYTGKSKDSLDKQNSMYKLEEGDRSLLFEEVNLRGDLTAAAVLKLLGLSAKDWKINFKDGIKGNTSNEKLFNVYQEIAAREGYGIDWKKNTAQEILEELRNVFPIIGIDASLLEFKGNLKGNEYSKQSSYELWHLLYSAGDDSKVSEEDKLIYGNSDVNLKKKLHQKYGFAPVYAGMLANVNFPNDYGNLSARAIKKMLPHLQDGDNYYEACDKAGYNHSNSINSEKNDKRVLKDRLEILGKNSLRNPVVEKILNQMIHVINQVCDTYGKPDEIRIELARDLKKSAKERLEATKYINSATKLNLDIAKTIKQQFGFTPTKNDIVKYKLWKELEPRAYKSLFSNVQIKLQDLYSGKIDIEHILPKALIYDDSFSNKTLAYREVNLKKANRTAIDFITQDKNAEVDNYIERVEALYNKGKGSISRGKRDRLLKSATDIKEGFIERDLRNSQYIAKKGRTMLLEVFKNVTPTTGRITDKLREDWGIINVLKELNLPKYRAAGLIEIEERKNDKKIEKIKDWTKRNDHRHHAMDALAVAFTTHNHIQYINNLNARRDKTHDKHFIIANIENLITHRVEDDKGNSKRTFIKPMPSFRRESKKHLEAVLISFKAKNKVVTRNVNKTKKDGGYNTSLELTPRGQLHKETVYGRSKRSKDQPTKINKNLAFAEAKQIIHFGQRVLVLKHLEAFDNNPKIAFDTKTIKKHPLLWNDEPLKEVLCFEEIYTIRKDIAPGLKLDKVVDEGIRDILKKRKEAYGGNDKEAFSDLGKNPIWQNKEKGIAIKRVTITGVSNAEALHYKKDHLGTEILDKNDDPIPVDHVSLGNNHHVAIYEDNKGKLQEKVVSLYEAVERARQKLPIIDKQYNEHLGWKFKFTMKQNEIFVFPSEEFNPQEVDLMDQKNASLISKHLFRVQKIASKDYFFRHHLETELNNDKNLNNLVYHRFQSTTGLENLVKIRLNHIGQIVQIGEY

SEQ ID NO: 6699 - protein, 1012 aa, synthetic construct
  REGION 1..1012: note = Synthetic
  REGION 940..941: note = misc_feature - Xaa can be any naturally occurring amino acid
MKRVLGLDLGTTSIGWAVVDQAASQNEKSNIIQLGVRVNPITVDEQSSFENGKSITTTADRTLKRGMRRSLQRYKQRREHLVGLLKKHGIINDDTLLNENGNATTFQTYRLRAKAAHEEISLEEFARVLLMINKKRGYKSNRRADSQEDGELIDGMAVAKKLYNEHLTPGEFAYHILQSGKRFIPSFYRSDLQNEFDKIWNCQNQFYPQVLTAELKDKLTDRSKKDTENIFFAIHHISSATVKDRKTATLTVYKWRVQALRQQLDLEQVVAVLASLNGAIAGASGYLGHISDNSKELYFGHMTVGEYLMRGLEQDPHFRVKNRVFYRQDYLNEFEQIWETQRRFHPELTAELKEKIRDTVIFYQRKLKSQKGLIAYCELEGREITVKVDGKEKRVMTGPKVCPRSMPLYQEFKMWQVINNLRLQSKIDGTQVPLTMEQKKLLHDALNVEGDMQAARVLKVLALKPKDYGINCDEVPGNTTNAALFKKYKSIVEWTGHDVEKFDKLSASEKIALVESVFKALKFNTDFLGDGCDEQSKAFRLWHLLYSYEGDNSNTGIDKLVDHICSLTALPADYAKAVAQVKFDDDYGSLSAKAIKKILPYMQQGMMYSEACEAAGYRHSKSSLTREEIAAKQLLQHLEVLPKNSLRNPVVEKILNQMVHVVNACQDAYGPFDEIHVEMARELKLTSKQREERTKALNQRTKETEEIKQKLIKDFNVPHPSRNDIIKYRLYMELAPNGFKTLYTDTPISHEKLFTREFNIEHIIPQAKMFDDSFTNKTLETAEANLDKSKMTAYDYVLSRQGEEGAKRYKAKIEKLFGASNPKKCERLLMREADIPDGFLNRDLSDSQYIARKAKEMLGKITRVVVPTTGAITARLREDWQIVDVMKELNLEKYEKLGLVETYSDRDGRCVKRIKDWSKRNDHRHHAMDALAIAFTQPSXXGQRLCTHAQDPHQGRHLHSSHGGIQGRGTQASRGCAGFDQSKEQSGDAACEPHQGCRDTPGHTHASWPVAQ

SEQ ID NO: 6700 - protein, 1377 aa, synthetic construct
  REGION 1..1377: note = Synthetic
MNHTMKRILGLDLGTNSIGWALVDEAENKEEQSSIIRLGVRVNPLTVDEQKNFEQGKSITTNAYRRLKRCMRRNLQRYKLRRKNLINCLLSNGIIQETTFLCESGNRTTFETYRLRAKAVTDEISLEEFARVLLMINKKRGYKSSRKAKSADEGQLIDGMTIAKQLYDENITPGQFVLSLLNEGKKYIPDFYRSDLQSELDRIWKYQRQFYADILTDDFKEQLKGKSKQNSSKIFLGKYQIYTADNKGKDKRLQAYRWRVEALSKQLTIEEVAFVICEINGLINNSSGYLGSISDRSKDLVFNKQTVGQALMNGLIKDPHYSLKNQVYYRQDYMDEFEAIWETQAKYHSELTPELKKEVRDIIIFYQRPLKSQKGLIGYCELENSQIEIEVDGKMKMKTIGSRVCPKSSPLFQEFKIWQILNNIKVTEKSTGACRYLEQEEKDILFFELSVKDKLSKLDVLKCLFKNYKELDLNFKEIEGNRTQSLLFKAYQDIIAMTGHKEYDFSKMSAHDVIKIVTDIFTGLGYRTDMLNFDSSIEGHDFDKQPMYLLWHLLYSYEGDKSNTGIDSLLAKIEELTGLEREYAKRLANITFQPDYGNLSAKAIRKILPLIKKGTEFSSACKNVGYNHSKRSQTREELEDKVYKDHLDILPRNSLRNPVVEKILNQMINLVNSVIDTYGKPDEIRLELARELKKSAKEREEMMNSINKARAEHEKYREILQKEFGISNVSRNDIIRYKLYLELKDNGYKTLYSNTYIPQEKLFSKEFDIEHIIPQARLFNDSFSNKTLESRSVNIEKSNQTAYDYVLNKYGVKDIEDYKIRIENLYKTNAISKTKRNNLLMRSTDIPDDFIKRDLRTTQYIARKACEILEDVVKFVLPTTGLITDRLREDWQLVDVMQELNWEKYDKLGLTEVLEDKDGRKLYRIKEWTKRNDHRHHAMDALTIAFTKESFIQYLNNLNAKSDKSSSIYGIEQKELYRDKHGKLRFVPPMPLDIFRMEAKYHLENTLVSIKAKNKVVTQNTNKIKLKNGFKKKVQLTPRGQLHNETIYGSMKRYVTKEEKIGAGFTVERIAKVANQKYREALLKRLFEWNGDPKRAFTGKNSLEKNPIYLDELRTWRVPVKVKTVEQETIYTVRKAIDPDLKIDKIVDGRIRQILQERLKEFGGDAKKAFGNLDENPVWLNKEKGIVIKRVTITGASSVTPLHDKKDHRGQYMLESTGRKQPVDFVNTGNNHHVAIYRDGKGNLQEKVVSFYEATSRVALGLPIIDKAYKSSEGWNFLFSMKQNEYFVFPNEEIGFNPSEIDLTDAENYALISPNLFRVQKLTSKDYVFRHHLETIVDDKKELHGITWKRLSSLNNLDKIVKVRVNHIGQIVFVGEY

SEQ ID NO: 6701 - protein, 1434 aa, synthetic construct
  REGION 1..1434: note = Synthetic
MMKKNILGLDLGTTSIGFAHILEGETAEQSSIQKIGVRVNPLTTDDLTNFEKGRPVSVNADRTLKRGARRMLDRYQDRRKNLIDALIKTNIITNKTVLAEDGKNTTHSTYFFRAKSAVEKIEKEELARVFLAINKKRGYKSSRKAKNEDEGQLIDGMAVAKRLYEEDLTPGQLAFLLLKEGKKYLPDFYRSDLQAEFDKVWDFQKEYYPEILTDEFYKELKGKGQRATSAVFWTKYGFNTADNKAKSREEKKIQAYEWRKNAIHEKLTKEEVAFVITEINNNLNNSSGYLGAISDRSKELYFSNQTVGQYLYHQVKENPHTRLKNQVFYRQDYLDEFEKIWETQSKFHPELTAELKAEVRDIIIFYQRKLKSQKGLISFCEFESKEIEIEKNGQVNKRTIGLKVAPKSSPLFQEFKIWQVLNNVLVRKKGSKKRSAKKETQATLFEEEKEVFILDLETKQKLFDELNIKGNLTSSKIIELLGYKSTEWEINYSELEGNRTNKLLYDAFLKILELEGYDEDLLKLEGKDDIDVSELKVPVTDIKDMVKRIFEVLGINTEILEFDAELEGKDFEKQASYQLWHLLYSYQEDNSKTGNDTLFRLLEEKFGFKKAHGEILANVVFSDDYGNLSAKAMRRVYTYIKELQYDKACLEAGYKHSASSLTKEEIEGRPLKNTLELLKKNSLRNPVVEKILNQLVNVINTIIENNSKKDERGNITEYFRFDEIRIELARELKKNAKERAEMTTNINASKIDNDKIRAIIKKDFPNVKNPSKNDIVRYKLYQELSFNAFKNLYTDEKVNYEKLYSKDYDIDHIIPQSKVFDDSFSNKVLVPRQSNLDKGNKTAYDYMSNKAADSFEKYISTVETLYKEKKITKAKYQKLLKQESEIGNGFIDRDLRDSQYIAKKARNMLYEICRVVTPTTGSITDKLRQDWGLINIMQELNFDKFKKLGLTEMVEKKDGGFKERIVDWSKRNDHRHHAMDALTVAFTKHSHIQFLNFLNARKDDKHKEHNAIIGIESKETTWIYDDDGNRKRVFNLPIPNFREQAKKHLENVLVSNKAKNKVVTKNKNKTKSKNGEKTKIELTPRGQLHKETVYGKYQYYVNKDEKVSAKFDKETIDKVANPIYKKLLLQRLSENENDSKKAFAGKNVLSKNPIYLNEEKTETLPETVKLSWLEEDYSIRKDITPENFKDLKTIEKILDEGVKRILKNRLEAFGSDPKKAFSDLDKNPIWLNEGKGISIKRVTISGVKNAEFLHYKKDHLGNDILDKNDQKIPVDFVSTGNNHHVAIYRDKKGNLQDRVVSLFEAVQLANAGEPVISKDYNQGLGWQFLFTMKQNEYFVFPNKNTGFDPKGIDLLDINNKKLISPNLFRVQKISTKNYVFNNHLETKAIDGDILKNKKELSGILYNFVQTPSNLENIIKVRLNHLGDIVKVGEY

SEQ ID NO: 6702 - protein, 1418 aa, synthetic construct
  REGION 1..1418: note = Synthetic
  REGION 1271..1299: note = misc_feature - Xaa can be any naturally occurring amino acid
VKKILGLDLGTNSIGWALVNEAENENEESSIIKLGVRVNPLSVDEKTNFEKGRPLSTNADRTLKRGMRRNLQRYKQRRESLIEILIEYGIIQKDTPLTEAGKNTTHETLSLRAKAAKERIGLEDFAKVLLAINKKRGYKSSRKANNEEEGQAIDGMAVAKKLYDNNITPGQYVLELLFKDKKYIPDFYRSDLKDEFKRIWETQKQYYPDVLTTELYKELDGKNKSQTWAICQKPFQIVGIKRTTKGKEKNIETYQWRAEGLTEKLELEHLAIVLQEINNSINQSSGYLGAISDRSKKLYLNQQTVGENLYAQLVKNPHTSLKNQVFYRQDYLDEFETIWETQSKFHLQLTEDLKKEIGDVIIFYQRKLKSQKALISFCQFESWEQEYKEEESGKIKKRTVGRRVIPKSSHLFQEFKIWQNLNHLVFKNQETNQNIKVKDLEQDLRQGLFDELNMRGDLNPNDLLKILKSEFKIGKLSDWKCNFEKIEGNRTNAALYNIYQKISDFEGYGVDWKKKDARAIKEELASTFPEMGIEATILNFDAEADDFTNQASYQLWHLLYSAEEDDKVSEEDKLIYGNTSVSLKKKLDQKFGFKPEYATMLANMSLVSDYGNLSAKAIRKILPYLKDGHLYSESCGLAGYNHSNSLTAEELSKRALKPTLELLKKNSLRNPVVEKILNQMVNVVNQVIETYGKPDAIRIELARELKKSAKERAKMTKGIADATRRNEEIKKIITQRFGIPNPTKTDVVRYRLWQELEPRGHKDLFTDTYIPPEKIFSSEIDIEHIIPKALLFDDSFSNKTLSYKDINLKKANRTAIDFIKQDFQSEVEAYTARVETMLKGGHISKGKRNKLLMALTDIPDGFIERDLRNSQYIARKAKQMLFEVFPEVMATTGSITDKLREDWDLINVMKELNLPKYRALGLTEFEERLDKGTETLFKHEVIKEWTKRNDHRHHAMDALTVAFTTHNHIQYINNLNARRDTTQDNHPIIKNIANQITEVNSKSKRVFKAPMSSFRESAKEHIEAILVSFKNKNKVVTKNINVTKTKKGENKKIQLTPRGQLHKETIYGKSKRPMDKPVKINSRFSIAQASLIINQKEKEAILNHLKKYDNNADKAFTTKTLKDDPVILNDEPLKEVRVFEEIFTIRKDLNPENFKTLKHIDKVVDEGVKEAMKKRLAEHKGDFKTAFSDLEKHPIWLNEAKGISIKRATITGVSNAEPLHYAKNHLGNLIYDDLGKEIPVDFASTGNNHHVAIYQSESGELDDEVVSFYEXXXXXXXXXXXXXXXXXXXXXXXXXXXXXPIVKSQSKQGWPLKFTLKQNEMFVFPSEGFDPNEIDLMDENNQSQISNHLYRVQKLSKVEYGKSAVRDFVFRHHLETEVVDIKEMKDISWKAIKSLGHLQDIIKVRTNHLGQIVQIGEY

SEQ ID NO: 6703 - protein, 1412 aa, synthetic construct
  REGION 1..1412: note = Synthetic
MKRILGLDLGTNSIGWALVDEAENTSEKSEIVKLGVRVIQYDNFSKVDKSGKVSESKNPIADFIGGKGLSPNASRTQKRGARRNLQRYKLRRENLISILKDNNIINDDTPLTEIGKNTTHETLRLRALAAKEQIDLTDFAKVLLAINKKRGYKSSRKATSEEEGQAIDGMAIAKTLYEEGLTPGQYVLRLLKENKKYIPDFYRSDLKNEFKNVWESQKKYYPDILTDDLFKALEGKNKSQTWAICQKPFEIVGIKQKGTAAEKRLQRYQWRVEALTQKLELEHLAIVLQDINNDLNKSSGYLGAISDRSKALYFNGETVGEYLYKQVLKNPHTTLKNQVFYRQDYLDEFETLWETQSKYHPELTDDLKKEIRDVVIFYQRKLKSQKGLISFCQFESWEQTYVEKETGKHKARTIGRKVIPKSSPLFQEFKIWQNLNNLEFRNTEENKIIEFQKLDKETKEAIFEELNLRGDLKPNDILKILNKYILEIKKLSDWKCNFEKIEGNRTNKALYDVYQIIAENEGYGFDWAKKSAKAIKSELKSIFPEIGIDAAILDFDADKDDFDKQASYQLWHLLYSAEEDDKITEEDKLVYGNSSVALKKKLNLKYGFKPQYVAMLANMALQPDYGNLSSKAIRKILPYLKEGHVYSEACDLAGYNHSNSLTAEEQANRVLKPSLELLKKNSLRNPVVEKILNQMVNLVNQVIETYGKPDEVRIELARELKKSAKERADMTKSIADATKRNEDIRKTITKEFGIPNPTKNDVVRYRLWKELETRGFKDIFTNTQIKHEDLFSKKIDIEHIIPKAMLFDDSYSNKTLAFKKDNLKKADRTAYDFIAQDYQSDLENYELRVEELFKGGYISKAKRNKLLMTKSKLPDGFIERDLRNSQYIAKKAKQMLYEVFRNVVSTSGSITDKLREDWDLINVMKELNLPKYRALGLTEMEERKNGKKIEVIKDWTKRNDHRHHAMDALTVAFTTHNHIQYLNNLNTYHSLKDGGIDLENSPLYALKNTITKVYKDKNGNSKRKFIPPMPNFRSKAKEHIESILISFKTKNKVVTQNINKTKKGGGKYNAKVQLTPRGQLHKETVYGKIKQPQAKATKLNKRFTIEQAKLIIDKAQRELVLSHLAQFNNNGEQAFDAKTIKKQPLFYKGESLKEVMCFEEVYTIRKEIGPELKIEKVIDEKIKAVLKERLNEYGNNAKEAFSNLDKHPIWLNKEKGISIKRVTIKGVNNAEPLHTAKDHLGNEILDDNGQAIPVDYVSTGNNHHVAIYEDKDGKLQEKVVSFYEAVARVNEGLPVVDKDYNVNLGWKFKFTMKQNEMFVFPSENFEPKEIDLMDGKNAALISPNLFRVQKISTKNYMFSHHLETQATTGDDLKKLKMLSGKKYQFLQTPEKLDGIIKVRLNYLGEIVQVGEY

SEQ ID NO: 6704 - protein, 972 aa, synthetic construct
  REGION 1..972: note = Synthetic
MKRILGIDLGTTSIGWAYVLEAEAANEQSEIVRLGVRVVPLSVDEETKFEKGQSITTNADRAARKSMRRNIDRYQMRRDELVAVMREEGWITEETTLSEHGTRSTFESLRLRAEAVEKEVTLAQLARILLQINKKRGYKSNRKADSQEEGPVIDGMDVSKQLCERSMTPGQWVYERMQRGKMTVPAFFRSDLQQELDHIWTLQHACHSAWMTDELRVALTQADSRRAQQLMDAHGVIPETVKGKERRQILYGWRSAAAMGGLPAAQLAAVLIQIVRDINASSGYLGQIGDRSKELYFRHETVGQYMWRHIQANPHESLKTLVFYRKDYQNEFDALWASQARFHPELTERLRKRLRHILFFQRPLKSKKGLVNRCELVHYSIPENAADGRGRRRDVGPKVCPKSSPLFQEFRMWQVLNNLMLIHVPTQEVRPLADEEKEMLAAELCYRVRMKKNDVLKLLCDHWREWDLNYKELEGNRTLAAFYKVYEQVIAQTGHGEYDFEKMRAAKVRELVGGVFGGLGFEVGLLSFDAELDGLAYEQQPLYRLWHLLYSYEGDSSATGDKCLLKRLCALTKMDEDVARLFLTVHFEDDYGSLSTKAMRRILPFLKKGYMYDVACEQAGYCHSVRSRTREELDKRTYKDRLDLLPSKSLHNPVVEKILNQMIHVVNGVTSAYGKPDEIRIEMARELKSCAAERERRTASIAKATKENAEIEKILRQEFGLSYVSRNDIVRYKLYEELKENDYKTLYSNTDIPKEELFSKAFDIEHIIPQARLFDDSFSNKTLEARQVNIEKKDRTAWDFVNDCYGSEGAALYRCRVDELFNKGIISKDKHKYLLMPGDKIPEDFINRDLRNTQYIVRKALELFEDFVPGVLATSGAITSRLREDWGLVNVMKEMNLPKYERQGVVEACSDREGHVFKRIQNWTKRNDHRHHAMDALTIAFTKRAYIQYLNHLNARKDDQSSLCHTAKRNGV

SEQ ID NO: 6705 - protein, 1401 aa, synthetic construct
  REGION 1..1401: note = Synthetic
MKRILGLDLGTTSIGWAYVHEAENVNETSSIQKVGVRVNPLTTEEQTNFEKGKPITTNASRTLARSARRNLQRYKLRRDNLIQILKENNWINNTTSLTETGNHSTFETYELRNKAASEKLTLDQLSRVLLMLNKKRGYKSSRKVNSKEEGQLIDGMEVAKKLYHEQLTPGQLSLQLMNQGVKKLPDYYRSDLNQELESIWNFQQQFYPNILTDKFKEEINGKGLTSTSSAFWNIYNFNTAENKGSRDEKKKQALQWRSEALSKQLSKEIVAYIIADLNGQIYNSSGYLGAISDRSKELYFNNLTVGQYLFKQLKSNPHTSLKNQVFYRQDYLNEFEKIWETQSKFYPKELTAALKREIRDVIIFYQRKLKSQKGLISFCEFEQKQKTINGKTKTIGHRVIPKSSPLFQEFKIWQQLHNVVLRNKKTNEIVSLADEQKVHLFEELNLKGKLKSNQVLKLIENKPKDWELNYTELEGNNTNKALYNAYLDILDIEGYDVRNELKVKLNKDDIELSDLDVNASEIKEMIFSVFKHLGINTEILEFDATLEDKVFEKQASYQLWHLLYSYEEDNSPTGLDRLYNLLHKKFGFKLNHAKLIGNVLFQDDYGSLSSKAIKNIFPYITENNYYTACELAGYKHSKHSLTKEENETRELKNRLTILPKNSLRNPVVEKIINQMINVVNTLIDEENNILIAQGKEPNFQFDEIRIELARELKKNAKEREELTKSINKSKTDHEKIIKILQKEDGIKNPTRNDIVRFKLYSELKNNGYKDLYTNEYIERKDIFTKEYDIEHIIPQSKLFDDSFSNKTLVRRNVNLKKGNQTAYDFILCEYGQEKANEFETRITNLYNLGKDEGISKSKFKKLLMQESEIGNGFIERDLRETQYIAKKAKSLLLEITRNVISTSGSITDRLREDWGLINVMKELNLQKYRDAGLTEFVKMKDGNKKEVIIDWTKRNDHRHHAMDALTIAFTKHNHIQYLNHLNARKNVNNELHNNIIAIEKLETTLVSDERGNKKRIFKEPIANFRTIAKSHLEAILVSHKAKNKVVTKNINKISGKKISQQTLTPRGQLHKETIYGKIRQYVSKQEKVGPKFTIEVIEQVSNPTYRNLLLKRLEENNNDPKKAFGGKNSLNKNPIYINLEKNIKVPEVLKLVWLEDNYTIRKEISPDLKIDKVIDQGVKQILQNRLAQYKGDSKLAFSNLDANPIWLNEDKGIAIKRVTISGIATAQPLHRKKDHLGQPILDHNGQEIPVDFISTGNNHHVAIYEDENGKLQESVVSHFEAVERVNQKLPIIDKTFNQHLGWKFLFTMKQNELFLFPSDDFNPNEIDLFDKQNYTVISKHLFRIQKLSTKDYSFRHHLETNVEEIKDLKTITWRREGLNGIQNIIKVRTNHLGEIIHIGEY

SEQ ID NO: 6706 - protein, 1369 aa, synthetic construct
  REGION 1..1369: note = Synthetic
MKKILGLDLGTTSIGWAFVNEAETESEKSSIQRLGVRVIPLTTDEENDFQKGKATSINADRTLKRGARRNLDRYQQRRDNLIDVLVNNKFLTKDTILSEEGKNTTFRTYQERAKAAEEEICKESFAKVLLMINKKRGYKSSRKVQSDEEGVIIDGMEVAKFIYEKQITPGQYVFQLLKNNKKHIPDFYRSDLENELAKIWETQKEFYPDMLTDEFKEAIKDKGKLATSKMFLRKYNVFTAENKGKRDGVKLRAYKWRSEAIDRKLSIEEIAYVIVEINNNINGSSGYLGAISDRSKELYFKKLTVGQYLYSQLESDPHSKLKNQVFYRQDYLDEFNTIWTKQSEFYPELTDELKSEIRDIIIFYQRRLKSQKHLISNCEFEKHHKTIPKSSPLFQEFKIWQELNNIEIKDLSTHEKFVLDETAKQFLFDELNIKDKLSSGEILKLLGKNKSAYELNYKEIDGNRTNAAFYKAYQNILRLDGEEHDFSKLHSSEINEIVSTKFLDVGINTELVFFDSSKKENELDKQLFFQLWHLVYSYEGDNSNTGIEKLIDKLQNKYGFAKEHAKLIANIELQPDYGSLSSRAIRKILPSLKLGNTYDIACNDAGYNHSNSLTKEERANRELKDKLHLLPKNSLRNPVVEKILNQMVNVINAIIDDNELGKPDEIRIELARELKKSAKERSEMTQGINKATAEHEKIRTLLRNDFGIKKVTRNDIIRYKLYEELKSNGYKTIYTGEYIPREELFSKNFDIEHIIPKAKLFDDSYSNKTLAVRQVNLDKSNDTAYDFLSDRLNLNDFEQYLKRIEKLLKSKAISKAKYNKLLMKNSQIPDGFIDRDLRNSQYIAKKAKQMLEDVVRKVNTTTGSITNRLRNDWQLVNVLKEITLPKYEKLDLVESIVGKNGQEEKQIKDWSKRNDHRHHAMDALAVAFTSHSHVQYLNNMSARGNEGHKNFHEVSGIENKYLYRDKNNKLLFKPPIPIHEFRKEAKEHLDKVLVSFKAKNKVVTRNQNKTKVKEKGQFRNKTELTPRGQLHKETVYGESQFYESKLEKIGPKFDLNKINQVARKLYREALLKRLNEFGGDPDIAFGGKNKLTKNPIYIDEENKLLLPEKVKLVLKNSRYTIRKDITHDLKIDKVVDIGIKRILNVRLKKFDGDAKLAFSNLEENPIWLNKKKNISIKRVTITGVSNAEALHFKKDHNGEFITDADGNKKDTDFVSTGNNHHVAIYRDEKENLKENVISFFEAAERARQGLPIINKSYNQELGWEFLFTLKQNEYFVFPGENFDPNEVDLLNCNITDLISPNLFRVQKISSKNYVFSHHSQTKSVDNMMLKNMKKLSGTTYHFIHTPVNLKQIVKVRINHLGEIVKIGEY

SEQ ID NO: 6707 - protein, 1364 aa, synthetic construct
  REGION 1..1364: note = Synthetic
MSSKTILGLDLGTTSIGWALVREDQNNRKKSEIIKLGVRVNPLTTDEKSDFEKGKALSSNTDRTLKRGARRNLQRYKQRRSNLVKILVNNGLINSETILAETVKNSTFETLRLRAKAAKSKIENDEFARVLLNINKKRGYKSSRKAKNEEEDTLIDGMEVAKKLYDDNLTPGQFVFSLLNDGKNYIPDFYRSDLQNEFDSIWNFQRHYYPEVLTDKMYLKLQGQGKLNSIKLFLANHQINTAENKGKEARLRHYKWRSEALSSQLTIEEVAYVLVEINNNLNKSSGYLGAIGDRSKALYFNKETVGEYLCKKVNENQHSKLRNQVFYRQDYLDEFEKIWETQARFNPILTPKLKAEVRDITIFYQRKLKSQKHLIAECEFEKQHKAIPRSSPLFQEFRVWQMINNLEFSNGDNKEMPSLNVKKALFEDLSLRDGLSANGILKFCGYNKKEWKTNFKEGIEGNRTNEALFNVYQKIAEAEGYGHDWSKKTAKEILEELRAVFTEIGIDSSILEFDSTLGGDRFDKQLSYQLWHLLYSVEDDQKINPLDAIIYGNSNVALKKKLHLKYGFKPVYSNWLANISLNQDYGSLSAKAIKKILPFLKDGHTYSDAAELAGYNHSSSISKEEQEKRILKDHLDLLKKNSLRNPVVEKILNQMVNLVNQLIRDYGKPDEIRIELARELKKSAKEREDATKGINQAKKRHEAYRKILQNDFQIKNPTRNDIIKYKLYLELKDNGFKTIYTNRYIPKDKLFSKEIDIEHIVPKSKLFDDSFSNKTLSFREFNQEKSNSTAIDFIEVKYPEDVVDYTKRVNDLFKNKSIGKAKATKLLMTESDIPAGFIDRDLRDSQYIAKKAKEMLCEVIRSVNTTTGVITNRLREDWDLMNILQELTLSKFKAIDPNLIEQIEKKDGTFKTRIKGWSKRNDHRHHAMDALTVAFTKHSHVQYLNNLNAKSDKKGAIFGILEKETTLDKRGRRKFIAPMPNFREEAKKHLENVLVSFKNKNKVITKNKNRIKINGKDSFKTVTQLTPRGQLHKETVYGKMKTGVVKLEKISGKFDKTKILQVTKTNYREALLKRLEENNNDPKKAFTGKNGLSKNPIFLNVQNTKLVPGIVKTQFYEEIYTIRKDVDADLKIEKVVDQGIRVILKKRLEKYNNDPKLAFTNLTKNPIWLNKEKGIAIKSVKITGVKNAEALHDKKDILGKLILNEKGNTQPTDFVSLGNNHHIAIYRDEKGRLQEDVVSFYKAVARATAGDSIVNKGYNIEKGWQFLFTLKQNEMFVFPKGDFDPNKIDLMDENNYALISSNLYRVQKIASKDYYFRHHLETKVDEIKALRDVTFIRKQSLAGMDSIIKVRINHLGQIVQVGEY

SEQ ID NO: 6708 - protein, 1363 aa, synthetic construct
  REGION 1..1363: note = Synthetic
MKTKKILGLDLGTTSIGWALVNEAIDPQEKSEIVKIGVRVNPLTTDEKDNFSKGADITTNSDRTLKRSMRRNLQRYKLRREELVRLLKEHGWITDDTILAEHSNRSTFETWRLRAKAVSEEISLEELSRVLLMINKKRGYKSSRKAKGGEEGVLIDGMAVAKELYEKNLTPGEYSYHLLQEGKKHLPDFYRSDLMDEFNKVWNVQKQYYSNILTDELYNALKGKNEKQTWAIVAEPFGIVGIKLEAKGAELKKEYFRLRAEAVKKQVDLERLAIVLQKINSQMNASSGYLGDISDRSKELYFNHQTVGEYQWDELQKNPNHSLKNEVFYRADYMDEFERIWDTQSKYHNELTPELKRQLRDVVIFYQRPLRSQKGLVSFCEFEKKQIEVIVDGKKKIKTTGCRVAPKSSPLYQEFKIWQILNNIILSGKDKDGNVVQRELDEDEKQLLFEQLTICNKLNKKQALILLYGKKGNNYDLNFKDLEGNRTIAALYEAYLAIVNLNIEEGKEYKEVDKKVIRDFFEQNGISTAILDFNSNVTAEELEKEELYKLWHLLYSYEGDKSNTGIAVLIDKLCSKYGFTEEQAKIVADVKLQDDYGSLSTKAIRNILPYMREGKKYDEACMYAGYRHSAQSLTREEIDNRVLKEHLQILPKNSLRNPVVEKILNQMINVVNAVIDTYGKPDEIRIEMARDLKKNADERKKMTDSLNAETRKQEEYRKLLQQEFGLQHVSRNDIIRYKLYLELKNRGYKTLYTNTYIPKDELFSKKFDIEHIIPQSRLFDDSFSNKTLEMRDANIEKGNQTARDYVKDKYGDEGYAEYEARVKALEADGSISHVKANNLLMKEHDIPSDFLNRDLSDSAYIAKKARELLLETVREVHTTSGSVTSRLREDWQLVNVMQELNYAKFAAIGQIEEYQDHDGRTIRRIKDWTKRNDHRHHAMDALTIAFTRPEYVNYLSNLSARSDKSGIIYAVEQKYLKRDKNGKMIFLPPMPLDEFRAEALKQLSNILVSIKAKNKVVTKNVNKSKVKSGYRRTEQLTPRGQLHNETIYGSHLEYVTKMEKVGGSFDMEKILTVANKQDREMLLKRLQENGGDPKKVFTGKKRLDKQVKTVSMQTVYTIRKAVSPDLKIEKVIDPHIRAILQARYDEYGKDARKAFSNLDKNPIYLNKEKGITIKRVTITGISKATALHYKKDNRGKLIYDNEGHCILTDFVSTASNHHVAIYKDENGDLQEKMVSFYEATMRANQDLPVVDKEYRKNDGWQFLFTMKQNEYFVFPNEQTGFNPLDIDLLNQENKALISPNLYRVQKIGSHDYWFRHHLETRVDDVENAHKEMIWKRITSVSKLSGIIKVRVNHLGEIVAVGEY

SEQ ID NO: 6709 - protein, 1371 aa, synthetic construct
  REGION 1..1371: note = Synthetic
MKKILGLDLGTTSIGWSYVKEADKSEEKSEIVRLGVRVNPLTTDEQNNFTLGRSQSVNADRTSARSARRNLQRYKLRRDNLIEVLKKIGFINDDSILTESGKNSTHETLSLRAKATTERVEKDEFARILLSINKKRGYKSSRKAKNDEEGALIDGMGVARRLYEDNLTPGQFVYSLLNDNKNYIPDFYRSDLKNEFDLIWNNHKNAFPEIVNDKVYAELNNIGKQATAKKFREEFDIYTTDIKGTAKEKKIKAYELRSKAVTEQLSKDSLAYVLAEVNNNIYNSSGYLGAISDRSKELVFNKTTVGEYLYSKIKNNPACSLKNMVFYRQDYLNEFETIWETQATFYPELTRELKSEIRDIVIFYQRSLKSQKHLVSYCEFEKWEEEYFDKTKNRTQKRVVGHKVIPKSSLLFQEFKIWHIINNIELENRETAQIYTLDEEQKDILYNELNIKGKQKGNDVLKLLMKKPKEWNINYDEIEGNNTTSALYKAYKTILYWEGYDLDLSKPPETIKEIVKSIFDSLGIKSEILEFNSELSGDSFDKQLSYRLWHTLYSVESEKEVVKTLIKVFGFKENHAKLLSGVPLQQDHGSLSSRAIRKITPFLKGGNNYYEACALAGYNHSSSLTTEENNSRELKDKLDLLKKNSLRNPVVEKIINQMINIVNAVIEDDEMGRPDVIRVEMARELKNSAGQRQKMTEGIGKAKRNHDRIRAILDKEFDIKNPTRNDIIRYKLYEELKSNGYKTIYSNRYISQESLFSKEIDIEHIIPKARFFDDSFSNKTLEFRSENIEKGNATAIDFVENKYGSEYLDEYKSRVKRMLTTKGDGSITKAKYNKLLMNKENIPDDFLNRDIGNTQYIAKKAKEILSQITRVVETTTGTVTDRLRSDWGIIDVMKELNMPKYRNLGLVETVEGRDKKNKERIKDWTKRNDHRHHAMDALTVAFTKHSYIQYLNNLNARDKASGSVIAIEKKELYRNSNGKLLFKEPFVNFRTVAKEHIESILISHKAKNKVFTRNINKIKTGDRGKYIEKIQLTPRGQLHKETVYGAIKQPVVKDIKIDGKLNADIAMSITKPAYRDAVITRLEQYNNDPKKAFTGKNSLAKNPVYIDTENKICLPEKVKAKVYEEAYTIRKPIEPGLAVDKVIDEGIKRKLKERLAEHDGNDKKAFSDLDKNPIWLNKDKGVALKRVKISGIKNAVSLHEKRDNRGIKITDDNGKHIKSDFVSTGNNHHIAIYKDNKGKLQEKVVSLFEAITAVNNGLSVIDKNYNSEIGWQFMFTLKSNEMFLFPSDEFDPEEIDIYDVKNYNILSKHLYRVQKIASKDYFFRHHLETQLNDNKELLGLIYKRLRNPEALKDLVKVRINHLGKIVQVGEY

SEQ ID NO: 6710 - protein, 1411 aa, synthetic construct
  REGION 1..1411: note = Synthetic
MKKIIGLDLGTTSIGWAVVNEAENDSEKSSIVRLGVRVNPLTVDEKNNFEKGRPITTNSDRTQKRSMRRNLHRYKMRRDNLIEVLKREGFITDQTILAEHGNNTTFETYRLRAKAVSEEVSLEQFARILLMINKKRGYKSSRKAKNEEEGSLIDGMSIAKELYEKDMTPGQYSLSLLESGKKTLPDYYRSDLQSEFDKIWSVQKTYYPNQLSDELKDSLIGKNSRQTWAIIADKTVWPQEVKQWNETLAKTEHFVREYKLKGIKREGKRDEQKLENYKWRVSALKNKLEPEQLAIVFQEINTQINSSSGYLGAISDRSKELYFNKQTVGQYFMQLLDEDPNTSLTNRVFYRQDYMDEFETIWEKQSEFHPELTQNLKREIRDIIIFYQRRLKSQKGLISYCELESWEIDVVRNGKVEKKTIGQRVIPRSSPLFQEFKIWQMLNDVEVFVKDARTKKRRQVKNPSLFEESNPSEILQIHGRRRLTEDEMILVASELSIRSEMKKEDVLKLLFDDWRSLDLNFKKLDGNKTGNALFEAYSKIIEMSGHFIDWKQSADDIIADAKKVFDALGWNSNILSFDSSKDLQSQDYYMLWHILYSYESDNSNTGNESLINKLVSFCGFEKEYAVVLSNVSFLDDYGSLSAKAIGKILPHLKDGNDYYLACELAGYKHSKSSITKEENEARILKDSLDLLPKNSLRNPVVEKILNQMVNVVNALMDEYGRPDEFRVELARELKKNQREREEMTRAINESTRVNKEIREVLMMEFGLPNVTRNDIVRYKLYQELKENGYHTLYSNTYISKEKLFSKDFDIEHIIPRSRLFDDSYSNKTLELRSINEEKGNQTAYDFVLSKYGETGLEEYINRCQALFPKDSAKLKKLLMQEADIPEGFVERDLRNTQYIAKKALSMLKNVCRNVVATTGSITDELRSDWQLIDVMKELNWDKYEEQGLVDYYKDKDGRSIGRIKDWSKRNDHRHHAMDALTVSFTNPALIQYYNNMNASSDKTGAIYQIKNKYFKEGRAISPIPLNEFRAEAKRHLENILVSIKAKNKVVTKNINVTKTGKGGTNKKIQLTPRGQLHNDTIYGSHKRVFYVEEKVGSSFDKEKISRVSNAKYRHALMERLEANAMNPKKAFTGANALSKKPIWIDQERGLQLPERVKVRNEEVVYTTRKLVDENLNVGKVIDPKVRAILENRLKEYGTAKKAFSNLDENPIYLNKEKGITIKRVTISGINNAYALREKDGKNGEKAPKDFVSTSNNHHVALFKRAIIDKDGVEGYEFCEVVVPFIEAVARVNFGDPIINFDYGKNEGWEFMFTMKQNEYFVFPNAKTGFDPHAIDLLDPKNYALISPNLFRVQKFSTKYYVFRHHLETSVKDVEELRDITWKRIQSLDSRLLGMVKVRIDHIGRIVSVGEY

SEQ ID NO: 6711 - protein, 1370 aa, synthetic construct
  REGION 1..1370: note = Synthetic
MASKTILGLDLGTTSIGWALVREGDNADILKTGVRVIPLTTDEIQNFDKGKSITTNADRTLKRSMRRNLQRYKQRRENLIEILIENRLITNTTILTEVGNASTFETYKLRAQAVNDRVELDQFARILLMINKKRGYKSSRKAKGEDEGSAIDGMGIAKDLYERNLTPGQLINERLQKGIKSIPDFYRSDLQSEFDIIWNHQKQYYPDILNEELYQEILGKSKTITASILRKKGYDGLELKGNLSEKKVARYSLRAKAVNSKCSLEEISEILPEINNNINQSSGYLGAISDRSKWLFFNQLTVGQFLYQQIESNPHAILKNQVFYRQDYLDEFNRIWEKQLEFYPEILTQELKQEIRDVIIFYQRKLKSQKSLLSLCELEGKVIEIVDNGIKKKRKVGPKVCPKSSPIFQEFKIWSQLNNITYNNEGSRKSQGISLELEQMQFLYQELNWKEKLTANEVIRLLNLKGYQLNFNEIEGNRTNASFIKALNDFFVKEGHDELVLSKMNSAELIDTLKKLFPIYGIDVSLLNFDSNLGGQNIENQAFYNFWHLLYSFEGDNSKSGIDKLKTALETKFGFPFESNTPITNIKLSDDYGNLSVRAMRKILPFLKEGNRYDLACTLAGYNHSHSETKEDLSTKVLLDRLEILPKNELRNPVVEKILNQMINVINTIFETYGKPDEIRIEMARELKKSAKERENATKAIRQITDEHIKLKRELQAEFGLPNVSRNDLIRYKLYLELKDNGFKTLYSNQPIDRSKLFSSEYDIEHIIPQSKLFDDSFSNKTIELRSVNLKKGNDTAFDFINKEYGEEGLKQYEARVKALFGNQLGKKSKYRKLLMSETEIPKDFIERELRDTQYIAKKAKDILSTVVRNVSTTTGSITEKLRDDWQLVDILKELNWNKYDKLGMTETKENRHGQKVNRIVDWTKRNDHRHHAMDAITVAFTKREYVKYFNNLNAKSEKDGEIYKILKTETYFDKDQKRRFNPPMPLTQFRSRAKEHLENTLISFKAKNKVSTKNKNAIKTAKGKITTIQDTPRGQLHLETVYGSSQYYSSKIEKIGANFDLEKINKVANSKYRKLLLKRLEENGNDPKKAFTGANSLSKRPIFLNALETYTLPESVKLVEFDTRYTIRKPITPDIKIDKVIDKGIQLILQERLNQHDGDAKKAFSNLEENPIYLNKEKGLILKRVTIQGVNNAVALHNKKDHFGKEVRDAKGNPIPVDFVNTGNNHHVAIYKDEKGNLQEEVVSLFEAITRKNQGVEIIKKQHELGWEFLFTMKQNEFFVFPNEETGFDPSEIDLLDPSNFAKISPNLFRVQKIGKGDYWFRHHLETELIDRIELNGSSYKRIRNPKSMNISKKISLNHIGRIVNVGEF

SEQ ID NO: 6712 - protein, 1380 aa, synthetic construct
  REGION 1..1380: note = Synthetic
MKKILGLDLGTTSIGWALVNECENEDEKSSIIRLGVRVNPLTTDEKGNFERGKAITTNSDRQQTHGARINLQRYKLRRKYLCDCLNKHGWIGSEPMYEDGKSSTFETYMLRAKAAVEEVSLHEFARVLFMMNKKRGYKSNRKANDKEEGKLFDGMSVAKKLYEAHLTPAEYSLQLLNKGKRFTPEYYRSDLVEEFEKIWNEQKKYYPEILTDEFKRQLEAKTKTSTSKIFLGKYGIYSADLKGLDRKLQPVKWRVEALRQQVDKDVLAFVISDLKGQIANTSGLLGAISDRSKELYFNKQTIGQYLWASLKENPHVSVKNQPFYRQDYIDEFEKIWETQASFHKELTPELKQEIRDIIIFYQRPLKSKKGLISVCELEQRKVKVTIDGKEKEITIGPKVAPKSSPMFQEFRIWHNLNNIQLIDNERNSKRSLYEEERNLLYEELSIRDRLNKAEALRVLGKKNRQWDLNYKELEGNRTQATLFSYYNKIIMMTGHEECNIKQLKAPEIRHYIKTIFKNLGFNTGILEFDSSLNGHELEQQPMYQLWHLLYSYESDKSRTGNEALLKKLETIFGFPREYASVLAEVAFEDSYGNLSVKAIREILPHLQAGLDYSQACEEAGYKHSRRSLTKEELDEKEYKEKLELLSKNSLHNPVVEKILNQMINVINAVIDEYGKPDEIRIELARELKIGAAERENMTRSISQGNAENKRIREILEKEFALSYISRNDIIKYKLYEELKPNGYKTLYSDTYIPKDKLFSKDFDIEHIIPKARLFDDSLSNKTIEARDVNIAKSNKTAFDFISGKYGQQGIEAYKKKLYILLQGGSINKAKYNRLLMKEADIPSDFINRDLQNTRYITRKAYEILSDLVRVVTPTSGAVTSRLREDWQLVDIMKELNFEKYQKLGLTEVIEDKDGRKIKRIKDWTKRNDHRHHAMDALTIAFTKPSFIQYLNNLNARSNKGDSIYAIENKELHREDGKLCFNAPLPINEFRAEAKKHLKAVLVSIKAKNKVMTQNVNKIKTKHGVIKKVQLTPRGELHNATFYGTKKRPIIKMVKVGAALDEVTIKKVSSSFIRKALQDRLYEYNGDAKKAFTGRNSIDKNPIYIDEERKRTVPALVKTIEWEMYHPTRKLILPDLKIDKVIDKGIRDILKTRLAKFNGDVQKAFSNLDENPIYKDEAKKIILKRVSLEGVSSVIPLHTLKDRSGMPITGKDSEPVLGDYVQTSNNHHVAFYIDENGNLQDNIVSFFEAAERKSQGVPIIDKNFNHDIGWRFLFTMKQNEYFVFPNEVTGFNPSEVDLMDEANYDIISPNLYRVQKMSRVVYGKSIIRDYVFRHHLETTVEVNANLKGLAYKQLKSLSYLEGIVKVRINCIGKIVAVGEYD

SEQ ID NO: 6713 - protein, 1405 aa, synthetic construct
  REGION 1..1405: note = Synthetic
MFFSYFCPQNKLIYLMRHIVGLDLGTTSIGWALVNEAENNNEQSSITRLGVRVVPLTVDEQTNFEKGKSITTNADRTLKRSMRRNLQRFKQRRTNLIDCLREANIIQDETTLAESGPRTTFATLHARAKAATEEVSLLELARILLMINKKRGYKSSRKAQSTEEGTLIDGMEIAKQLHDQSLTPGQYTYRLLQAGKKYIPDFYRSDLVAELDAVWNYQKKFHNDILTDDFYHQLQGKSKTNTTKIFLGKYGIYTADNKGDDRRLQQYRWRAEALQRQLTPEELAFVIADINGAINNSSGYLGAISDRSKELYFNRQTIGQHIVTKLETNPHYSLKNKTFYRQDYLDEFEQIWNTQAHFHKELTPELKKTIRDEIIFYQRPLKSKKAMLDICTFERRQVEVQEDGKTRNKTIGLKVCPKSSPLFQEFKVWQVLNNLQVEYEDAGEDLFATTEKRRFLDLEEKELLARELQYKEKLSKREVLTILFGKAAKKYDLNYKDVEGNRTLFALYQAFFSIIALSGHEEYDIKKLKADEIEEVTSSVLRAIGINTDILHFNAELEGHAFDKQPLYQLWHLLYSYEGDNSKTGTDSLIAKLQELCLCDREYAQVLANVTFQEDYGSLSAKAMRKILPFMKAGNDYSVACEYAGYRHSERSRTKEELDNRDYLDRLELLPRNALRNPVVEKILNQMINVVNAIVEEYGKPDEIRIELARDLKQSAKEREKTTQDINEANLLNEKYRKILESEFGIQHVSRNDIIRYKLYMELKDNGFKTLYSNTYIPRDQLFSKNFDIEHIIPQARLFDDSFSNKTIEARDINIEKSNATAYDYILGKWGEEKAAEYKTKIDNLYKQGIIGKAKHDKLLMREADIPDGFIDRDLRNSQYIAKKAREILEDMVPQVIPTIGSITDRLREDWQLVDVMQELNWDKHNRLGLTETYKDKDGREIRRIKDWTKRNDHRHHAMDALTIAFTQPAFIQYLNNLNARSDKGSSIYGIEQKYLYRDSHGKLRFRAPMPLDVFRAEAERQLEDILISIKAKNKVMTQNVNKSKTKGGTNKKTQLTPRGQLHNETIYGHTLHRISEEVKVDGKMTPERAQLIAKKVYREAILARLSQFDNDPKKAFTGKNSTEKNPIWLNEQHAEQVPLRVKLVYFNDYYPIRKPVSPDLKLDKVIDAGVRRILQARIDEFGGDPKKAFADLDENPIYLNKEKGITIKSVRIRGVLSAIPLHEAKDHFGKAITDSNGKKRPVDFVQTASTHHIAVYRDAAGNLQDVAVSFLEATTRKAVGIPIVDTEYNASEGWRFLFSMKQNEYFIFPDIEHGFDPNAIDLFDPKNKGEISKHLYRVQKLSRVDYGKQVVREYVFRHHLETTVNEEKELKGIAFRNIKSLAPLEGIVKVRVNHLGNILPAKEN

SEQ ID NO: 6714 - protein, 1034 aa, synthetic construct
  REGION 1..1034: note = Synthetic
MEIDGKKKAKTIGLRVCPKSSPLFQEFKIWQVLNNVQVWGKTTPKRFLFQEEKEKLFAELNYCEKLSKAEALKLLFGNQKDYDLNYKDLEGNQTQAGLLEAYKTIVEMIGHDEFDFSKLSSAKTIEKVDEVFSGLGINTGILYFDSGLEGHALEQQPMFKLWHLLYSFEGDKSELGNANLIQKLHEQFGFDKESATVLAGVVFSDDYGNLSSKAIRKILPHLKDGLEYSVACEYAGYRHSKSSLTKEEVENKVMKDKLELLPRNSLRNPVVEKILNQMVNVVNSIIDEYGKPDEIRIELARELKKSAKEREEMTKSINETTRLHEEYVKILQGDPFKLEHVSRNDIIRYKLYEELEMNGYKTLYSNTYIPREKLFSKEFDIEHIIPQAKLFDDSFSNKTLEVRQVNLDKGNATAMDFVNEQYGAQVAEEYVARIENLYSKKVISKTKHDKLLMKEADIPSGFINRDLRDSQYIAKKAREILEEIVRFVVPTTGSITDRLREDWQLVDVMQELNWDKYNQLGLTEIIEGRDGQRIRRIKDWTKRNDHRHHAMDALTIAFTKRSFIQYLNNLNARVQKGVDDYFDLDMVELSLLDKDQRSAAVYGIERKELHRDSHGRLRFNAPMPLEEFRAEAKRQLEAILVSIKAKNKVVTQNINVSKTKNGRNKKVQLTPRGQLHLETVFGSCKRYVTKEEKVNASFDVEKINTVANKRYRDALLARLQQFDGDAKKAFTGKNSLDKNPIWLDDLHTIQVPEKVRIVTFETIYTIRKDITPDLKIEKVVDVHIRRILQERLATFGGDAKKAFSNLDENPIWLNKEKGIAIKRVTITGISNAESLHDKRDKEGQLVLDEKGSTQPVDFVNTGNNHHVAVYRKPKLDKNGQHLLDENGELQYELDERIVSFYEATSRAMLGLPIVDKEYKKEEGWQFMFTMKQNEYFVFPRYDAQGIMVFNPLDYDEAWYKNADNYATISPNLFRVQKFSFKNYVFRHHLETTIDNSGYSLRGITWIDFRSSKGLDLIMKVRVNHIGQIVSVGEY

SEQ ID NO: 6715 - protein, 1373 aa, synthetic construct
  REGION 1..1373: note = Synthetic
MKKILGLDLGTASIGWAMVTEAENEREKAAILGCGSRVIPISAEEKDSFEKGKAITTNADRTLKRGMRRNLERKKQRRDNLRDLLTQENWICEGDALSENGSGSTYDTLRLRASAAEKEISLSELARVLLSINKKRGYKSSRKTDSGEDGQLIDGMGIAKDLAISGKTPAEYALAASKDGKLARLDFYRSDLENEYNKIWEVQKSFFPEILTDQFKAQLSRQGKSGASKVFFAKYGINTADNKGKDRKVIGLEWRVKALTNRLDKEQMAYVICDLRGEIQNTSGYLGEISDRSKELFFNGETVGQYLYRNICNNSGFSTKNKVFYRQDYIDEFNKIWEVQMKFHPELTEAMRQQIANRIIFYQRPLKSQKGLVSFCEFESRPIKVLIDGKEKTRTTGSKVAPKSSPMFQEFKVLQILNNLIIKDRRTDETRRLTDGERHLLSFALSVRDKMKATEALKSIQLDPRRFELNYKELEGNTTLFALFSKFIEIVNLATGGDYDLSKLSYDSTLSLVKDVFNKIGGKTDLLSFDSSLPKEAYEQQPLFKLWHLLYSYEGDNSVTGTASLIRIISELTGLNEDYSKIIAGISFKDDYASLSHKAIKKILLFLKQGLRYDEACAKAGYNHSHSQTKEEVDNKILQDTLLQLPKGALRNPVVEKVINQMINVVNAAAQEYGKPDEIHIELARELKSSAKEREKATSDIQANNKRNQDIEQILKTEFNIQNVRKNDILRYRLYEELKNNGFKTLYSNKYIPKTALFSKDIDIEHIIPQALMFDDSFSNKTLEYKDINIEKGRKTANDYVKDKYGDEYYSQYCQRVNDLMERGIISKTKRKYLLMPEADIPSGFVDRDLRNSQYIAVKAREILEDYVGVVLPTTGSVTARLREEWQLVNVLEEINFDKYDKIGKTYTAVNSDGSSKTRIKDWTKRCDHRHHAMDAITIAFTKPQHIQILNNLRAKCDNDDEFRRLLDSQTTDSGRKRIFTPPMPLDHLRAEARQHLEAALVSIKAKNKVVTRNVNKTRKADGTNAAIELTPRGALHKEQVYGKRRIYEVFYAPVNAKMTLDTIDQVASKRVRGALLARLNEFGGDSKMAFSGKNSLEKNPIYLDSAHISKVQDKVKCVRFKDVFSIRKELSPDLSLDKVLDKRVRARIEDRIKEFDGDIKAALANLDINPIWLDDNKTIPIKRVTIGENFDLCAIRNKRDKDGKSLLDAAGQPIPNDYVNLRNNHHVALYIDADGNVQESVVPLFEALNRVSMGLPVVDKSFHSDLGWKFLFSLKVNEMFVFPDEASGFNPKEIDLLDEKNAAAISPHLFRVQKLSKKDYWFRHHLETTINNDDKELRDITWKRIQTIQQMANAVKVRINHIGKIVAVGEYD

SEQ ID NO: 6716 - protein, 1438 aa, synthetic construct
  REGION 1..1438: note = Synthetic
MKNILGLDLGTTSIGWAFVKEAETSEEKSSIVKIGVRVNPLTVDEQANFNKGKPITTNAERTLKRGARRNLQRYKLRRAYLINELKNAGLISDTAILSEQGPGSTFETLRLRAQSATDEVSLEEFARILLMINKKRGYKSSRKVNNDEDGQFIDGMTVAKALYENGLTPGQYVYQLIKSGKKYIPDFYRSDLQAEFDKVWNCQKKFYPEIFTDALKSELEGKNEKQTWAICEKHFRINGISRTTKGEELKKENYFWRAKAVEEQMDLESLAVVFQKINSQINGSSGYLGAISDRSKELYFNNQTVGQYLAQKISGDSHFSLKNTVFYRQDYMDEFERIWSVQAKHHPELTDELKKRVRDIIIFYQRPLKSQKGLVSICELEGREIEVTCDGKTKKKLVGPKVCPKSSPLFQEFKIWQVLNNLTANKRYLSQEEKERLFDRLCTCDKLSKAEIIKCLSPEKSVRERSQDSLFAPEEIYEDEVLVRLENKKKEIVLNYKEIDGNRTMAALFRAYAKIIMLTGHDEYDFSKMPFSKAAGIISDIFAGLGYRTDFLHFDSSLEGKAFEEQASYRLWHLLYSYEGDKSVSGNEKLISKISEITGFEPEYAKVLANVTFAPDYGSLSTKAMRRILTFMKEGNEYSLACAYAGYNHSKNSLTKEQIESKILKEHLEILPKNSLRNPVVEKILNQMVNVVNAVIDEYGRPDEIRIELARELKKSAAEREELSKAVNDADKKHKAIKEMLQKDFGIASPSRNDVIRYRLYEELKDNGYKSLYSDTYIPREKIFSKEFDIEHIIPQSRLFDDSFSNKTLEARQVNLDKGNATAYDYVNNKYGETEVEKYVARVEQLYKAGGISKAKRNKLLMQMADIPSDFIARDLRDSQYIARKAKSMLKEIARHVVSTTGSVTDRLREDWQLVDVMKELNWDKYDRLGLTEIVQDHDGRRIKKIKDWTKRNDHRHHAMDALTIAFTKLSYIQYLNNLNARIQKEAGKEYMADLSQYSVLDIHKSDRTDVIMAIERTQLYRDKVGGRLRFMPPMPLDEFRREARRHLENTLVSIKAKNKVVTRNVNRTKCIGGTRQKVQLTPRGQLHNETVYGQIQRYATKLEKVGPTFTSDKISKVASPTYRTALMERLKQFGGDPKKAFSGKNSIDKSPVYVDAMHTRTVPEKVALLSMEKMFTVRKSISYDNFGKSGNKKLNKEEVIKKLHSIIDVKIRELMIKRFEESGFDAQIAFSNLDENPIWLNKEKGIKVKSVKIKGVNCAIPIHDKRNNIGQILYDDCGDMIPTDYVQTGGNHHVAIFRDAEGNLQEQIVSFYDAVARITLGIPVIDREYKKDEGWEFLFTMKQNEYFVFPNPETGFDPNEYDLLNPDNYAVISPNLFRVQKLATKNYCFRHHLETNVDEKNELRHIAWERIQNTNGLRGIVKVRINHIGQIVQTGEY

SEQ ID NO: 6717 - protein, 1369 aa, synthetic construct
  REGION 1..1369: note = Synthetic
MKKILGIDLGTTSIGWAFVHEAENENELSTIKRLGVRVNPLSSDEQSDFEKGKSITLNSQRTLKRGARRNLARYKLRRENLIEILLKNNIIDKHTILTEVDKQSTYSTYELRAMSAVEKIEKVEFARVLLMINKKRGYKSSRKAKNEEEGHIIDGMAVAKKIYDENLSPGELCYQILKSGKTHLPDFYRSDLKEELEKIWEFQRQYYPEILTEELKKAIEGQGKENTRKRILAISKIYTAENKGADKKIKAYEWRSEALKKKISVEELAFVITEINNNINSSSGYLGEISDRSKELYFNKETIGQYLFKKIKNPNFSVKGKVFYRQDYLDEFETIWETQKKYYPELNTDLKKEIRDVIIFYQRKLKSQKGLINVCEFENKKIEVFIDGVTKEKVIGNKVAPKSSPLFQEFKIWQILNNIEATNRKTKEKRVLDLYSKEILFSELSIRGNLKKEEVLRILGHSIKEWDLNYSIVEGNHTNKNFYEAFEKMIRIEGAENIDFSKQTISEINETIKAFFNSFKIDTSILNFNSQLEGKSFEKQSSYQLWHLLYSYEDDNSNSGKENLYNQLLRKFGFKREFAQILSNVSLLQDYGNLSSKAIRRIIPHIKELKYSEACKLVGYNHSSSITNEENDKRQLKDKLEILPKNSLRNPIVEKILNQMINVVNAIIADPNLGKPDEIRIELARELKKNAKERAELTSSINEAKINHERIIKELQINDGIKNPTRNDIIRYKLYQELKGNGYKTLYSDTYIPREKLFSKEFDIEHIIPKSRLFDDSFSNKTLAPRQENINKKDETALDFVTNNLGEDSLKNYLARLEMMYNLKEGSISKSKYKKLLLKGSEIGEGFIERDLRDSQYIAKKAKEILFSISKNVITTTGSITDKLREDWDLINVMQELNFSKYKKLGLTEIIEKKDGNTKERIIDWTKRNDHRHHAMDALTIAFTKRSFIQYLNNLNARSDKSSSIYGIEQKETTKLANGKRLFKTPLPNFREEAKKHLEHILVSFKAKNKVVTKNKNKIKAKTGINTKTELTPRGQLHKDTVYGKIKQYTTRLEKIGPNFDKPLISKVAIPSERNALLNRLKEYNNDPKLAFSGKNSIKNNPIYIDKNKTISLPEKIKIVEFSDNFTIRKEVNPDLKIDKIIDKRIKQILQERLQAFENDPKKAFSNLEKNPIWLNEKNGIKIKRVKISGISNAVSLHYKRDHLGNEILDTNGIKIPVDYVSTGNNHHVAIYKDKDGNLQENVISFYEAVERVNQNLPIIDKNYRQDLGWEFLFTMKQNEYFVFPSEDFDPNEIDLLNPMNYKLISKNLFRVQKIATKNYMFRHHLETDVEEKKQLLNIAYINIRSCAPLKNIIKVRINHIGQIVKTGE

SEQ ID NO: 6718 - protein, 1213 aa, synthetic construct
  REGION 1..1213: note = Synthetic
MAVAKELYEREIKPCQYVLELLEQNKKHIPDFYRSDLQEEFNTVWKFQQQFYESILTLDLYDELKGKNKGATWKICETPFEIEGVKIEGKTAKEKKKNIYKYRVKALSQKVNLEELAIVLQEINNDLNKSSGYLGAISDRSKELFFDKITVGEYLYNQIKKDRHTSLKNQVFYRQDYLDEFETIWETQAKFHIELTEELKKEVRDVIIFYQRKLKSQKGLISLCQFEQGKQVYFDKVANKEKTRVIGQRVIPKSSPLFQEYKIWQNLNNLEFKNEKLNEKIEFIKLDNEVRNEIFEELNLRGDLKPKDVLNVLNKYLELGKISDWKCNFEKIEGNRTNQSLFNVYKAIVENEGHGFDWDKKKAIEIKEELKAVFELIGIDNSILDFDTMLSGNKLEKQSSFLLWHLLYSAEDENKIKAEDKLVYGNTNVGIKKVLHLKYGFKPEYATLIAGIDFINDYGSLSSKAIRKILPHLEDGNDYYEACALAGYNHSNSLTKEELDKRFLKDKLDLLPKNSLRNPVVEKILNQMVNVINQVSEEYGKPDEIRIELARDLKKSAKQREKSVKLINENTRANDKVREIIKKDFGFTATKNDVIRYKLYQELKNNGYKTLFTNKKIDYRTELFSKNIDIEHIIPKAILFDDSFSNKTLAFRDVNLKKNARTAIDFIEGDYNNDLENYKSRVENLFKLGAITKGKYKKLLMSLENLPTDFIARDLVNTQYISKKAKDMLLEVFPTVVSTSGRITDRLRADWDLINVMKELSISKYRALGLTEVQTRKGGKEVEVIVDWTKRNDHRHHAMDALTVAFTTHNHIQYINNMSARKDNEFKVGIAKIKNTIKHKVNGKSIFIAPMPNFRQEAKNKIEEILISIKAKNKVVTKNINKTKLIGKDNYKKTEQLTPRGQLHKETVYGKSKRELSKKTKISKRFTLDDANFIINKEQREIVLKHLKEYSNNPLVAFDTKTIKKSPILYKGEPLKEVFCFEEIYTIRKDINPDNFKNKKSLEKIIDKKIKIALENRLNEYGDNPKEAFSNLEENPIWLNKKEGISIKRVKITGVSNVEALHYKKDRFGNEILDSAGNKQAVDFVSTGNNHHVAIYEDSKGKLQERVVSFYEAVARVNAELPIVDNLYKKDEGWKFQFTMKQNEMFLFPSANFNPLEVDLLKVKDLKILSENLYRVQKISTKNYMFTHHLETEATTGDDLKNKKCYLRKNIIR

SEQ ID NO: 6719 - protein, 1394 aa, synthetic construct
  REGION 1..1394: note = Synthetic
MTKKILGLDLGITSIGWALVEEAENNSEESKIIKLGVRVTPLTVDEKTDFEKGRPSSTNTERTLKRGARKNLQRYKLRREALINELINHNIISKETPLTEIGKNTTHQTLYLRAKAAKERVELEDFARILLSINKKRGYKSSRKARNEEEGGAIDGMSIAKELYENNLTPGEYVLNLLEQNKKYIPDFYKSDLHDEFNKIWKNQQKYYSETLSEPLYKELLEKNKKQTWAICKTPFNLVGITQKGTANEKRLERYQWRTKGLTEKLEFEHLAIVLQEINNDLNKSSDYLGAISDRSKELHFKNITAGEYLYQQIQENPHNSLKNQVFYRQDYMDEFEKIWSVQTLFHKELTLPLKEKIRDIIIFYQRKLKSQKGQLDFCQFESWEQEYMNDTTNKKIKRRIGRRVVPKSSPLFQEVKIWQILNNLIFSNKNTGDHIAINDLDKNIIDEIFQELNLRGEHKATSVLKILKKHIVLGNQSDWKANHEKIEGNTTNKALYDVYQKIAELEGYGFDWEKKTATAIKEELKAVFSEIGINQDILEFNGILQGKKFENQVSYQLWHLLYATEEDFNKVSKEDQMIYGNNAVSLKKKLVSKFGFKPEHTKMLASISFSQDYGNLSSKALKKILPELQKGYTYSEACKNVGYNHSNSFTKEELENRELKDKLELIKKNSLRNPVVEKILNQTVNVVNQIIETYGKPDEVCIELARELKKSADERSKMTRNIAEATKRNQDIKKLIIKDFGIPNPTKNDVIRYRLYEELSSNGYKTLFTNRKINKEDIFSKKIDIEHIIPKALVFDDSFSNKTLAYREVNLEKSNTTAFDFINNSNHSGIEDYKLRVESLYKDGKISPAKRKKLLTSKEDIPNDFIERDLRNSQYIAKKAKAMLFEVFPSVVATTGSITDKLREDWGLINVMKELNLPKYRALGLTEYEERLNKGTEEINKREVIKDWTKRNDHRHHAMDALTVAFTTHNHIQYINNLSARKLTNHKKHKIILNIENLITENKNGKRKFKAPISNFRTEAKKHIEAILISFKNKNKVVTRNINITKTKNNTLQKKQLTPRGQLHKETVYGKIKRPSKKTIKLNKNFEASTAQQIVNPVHKKIVLEHLKTFDNNPTIAFDRKTLKTNPLICKNKPFKEVVCFEDIYTIRKEVNPENFKTQKNIEKVIDTKTRQLLIQRLKDYDNNAIKAFSNLKKNPIWLHKEKGICIRRVRITGVSNAEALHTKKDHLGREILSEQGNKQAVDFVSTGNNHHIAIYKDNKGNLQEKVVSFYEAVARVNKNLSIIDKTYKEKEGWQFLFTMKQNEMFVFPNEDFDINEIDLTDAKKASRISPYLFRVQKIATKDYFFRHHLETTVEDNKSTKEIAWKRLGLNHIKGIKKVRLNHLGQIVQVGEY

SEQ ID NO: 6720 - protein, 1416 aa, synthetic construct
  REGION 1..1416: note = Synthetic
MKRILGLDLGTNSIGWALVNEAETDEEVSSIIRLGVRVNPLTVDETQNFEKGKSITTNAERTLKRSMRRNLQRYKLRRDALVEFLKELGFITDETILSEQENRTTFETCRLRAKAAEEEISLEELSRVLLMINKKRGYKSSRKAKREEDGVLIDGMEIAKKLYEEDLTPGQLCSQLLESGKKVLPDFYHSDLQEELDRIWNVQKQFHPDVFCDAAKEEIKGKNRSQTWAILANYFVWKEEVISWNDREAKNETIEKECKLVGLKRTTKGYELKKENYRWRVQALTEQLGLEEIAVVLQEINGQINASSGYLGAISDRSKVLYFNHQTVGQYQMAELDKNPHASLRNMVFYRQDYLDEFDRIWEKQAEFHKELTAELKKEIRDMIIFYQRRLKSQKGLISFCEFERLEIVVEKDGKKQTKVIGCKVIPRSHPLFQEFKIWQTLNDIKVLEREKKRNALSASESRALYPEEKEILAKELAIKENMRKADVLKLLFENPQELDLNFKQIDGNRTGFSLFSAYSKMIEKYGYEPLDFKKPVDEIIGQLRTIFTDLGWNTNLFTIDLTKEGKELEMQPYFRLWHLLYSFEGDNTPTGNGKLIEKIMQLCGVEKEYAVELASLSFQDDYGSLSAKAIKRILPYLKDGNQYDVACEYAGYRHSKSSLTKEEIENKVLKDKLNVLPKNSLRNPVVEKILNQMVNVINTIIDTYGKPDEIRVELARELKKSAKEREELTKAIAKSTREHEVIRKLLQAEFGMMNVSRNDIIRYKLYEELKDNGYKTLYSNQYIPKEKIFSKEIDIEHIIPQSRLFDDSLSNKTLEYKAINIEKGNKTAYDFVKEKYGEEGLQQYINRCESLFNDKKAKLRKLKMGQKDISDGFIDRDLRNTQYIAKKALAMLNEICRRVVATTGSITDQLREDWQLVDVMKELNLPKYEALGFVETYEDKDGRKIKRIKDWTKRNDHRHHAMDALTVAFTKDAFIQYFNNKNAAQDSDNRNHTNIIGIKTRYFDKGRALPPIPLEQFRVEAKRHLENLLVSIKAKNKVVTVNVNRTKKKKGENTKIQQTPRGQLHLETIYGSLKQYVTKIEKVNASFDVAKIATVSKQAYRNALLKRLETFSNDPKKAFTGKNTLEKNPLYVDKYQTIRVPEKVQTVEFETIYTIRKPVDPALNVDKVVDVKVRAILEQRLKEYDGDPKKAFVNLDENPIWLNKEKGISIKRVSIRGINNAQSIHVKKDKNGNPIWDENGKQIPVDFVNTGNNHHVAIYRKPVLDKKGQVTFDEDGNLMYELDEVVVSFFEAVTRANLGLPIIDKDYRKSEGWQFLFSMKQNEYFVFPNEKTGFNPKEVNLLDPDNYVVISPNLFRVQKIGSNDYTFRHHLETTIQNSNNELKFITWIRCGKSGISDIVKVRINHIGQIVSVGEY

SEQ ID NO: 6721 - protein, 1368 aa, synthetic construct
  REGION 1..1368: note = Synthetic
MKRILGLDLGTTSIGWAVIDQSEQENEKSGIVKMGVRVNPLTTDEKDNFEKGKSVTTTADRTLKRGMRRNLQRYKQRREHLIAILTRNRIITDDAVLCEDGNRTTFETYRLRAKAAKEEISLNELARVLLMINKKRGYKSNRKANNQEEGELIDGMAIARRLYNEHLTPGELTYDLLQNTSSRLIPSFYRSDLMAEFGAIWAKQQQYYPEILTDEARERMQGQSRSRTVELFKALCHVVPAEVKDRKVRMLTYYRWRTQSLHQKMELEAVATALVEVNGAISAASGYLGNISDLSKELEIAHMTVGEFLMSKLDADPHYRLKNRVFYRQDYLNEFETIWETQKRFHPELTNALKEEVRDTIIFYQRKLKSQKGLISFCEFESREIVVKTAKGNDKKVLSGSRVCPKSSPLYQEFKLWQTINNVIIYDDNANEESGFALNDNQRLVLHDALTYSKELKKSAILKILGLPAKRYRLNYDAIQGNTTQVALVEAYKKILEWSGHDIDEFDKMTVEQKQHQLSAVFGVLGAKTDFLSFDDSQAENSAAYKLWHLLYSYEGDSSKTGTEGLLRKIEQLTGLNSEYAKALVAVTFQADYGSVSAKAIKKILPFLKQGHLYSEACELAGYRHSKNSLTRAEIDQKQLLTALEIMPCGSLRNPVVEKILNQMIHVVNGAIAQYGPFDEIHVEMARELKQTREQREKATERIAKRTKETDQIVSILKGQPFGISNPTRNDIIRYRLYEELEPLGYKTLYTSTYIAKEKLFSRDFDIEHIIPQAKLFDDSQNNKTIETRSANLEKADQTAFDYVMAKFGPQAIDDYKARVAMILDRKKRELLLTDEEHIPSGFLNRDLSDSQYIARKATELLGLVTRRVVTTTGSITARLREDWQLIDVMKELNWEKYKAVGMTEEVKNKEGHVKRIIHDWTKRNDHRHHALDALTIAFTRPSHIQLINNVNASDGKKLDQAAFAIQRKEITHSGRFIPPMPYDQLRAAVLEHMSQIVVSIKAKNKVVTPSVNRIKTKGGIRRQVTLTPRAQMHNETVFGSQYQYETKIETVGAKFDAEKISTVARQDYRIALLKRLDEFGGDPKKAFTGRNSLEKNPLYADILHAVQVPAKVKTVQLIPRFTIRRPITKDLKVDKVVDKAIREILQRRLDEFGGDAAKAFTNLDDNPIWLNKEKGIAIKSVTITGVNVATPLHDKRDKFGQLIIDEKGSTLPVDYVSTSNNHHVAIFEDVNGNWQEHIVSFFEANERAQQGLPIVDKNYNHELGWKFLFTMKRNEYFVFPDETEGFNPLELDLQDPQNLNVISRHLYRVQKLATKNYVFRHHLETNVQEDKRLKDKTWIRITSFAGLKGIVKVRVDHLGQIVNVGEY

SEQ ID NO: 6722 - protein, 1419 aa, synthetic construct
  REGION 1..1419: note = Synthetic
MRTILGLDLGTNSIGWALVNEAENDSEKSSIIKLGVRVNPLTVDEQQNFEKGKSITTNAYRTLKRSMRRNLQRYKLRRENLIEILKENGFINDETILSENGNHTTFETYRLRAKAATEEISLEQFARALLMINKKRGYKSSRKAKGTEEGVLIDGIEIAKLLYNENLTPGQYSYQQLKNGKKQLPDFYRSDLETEFGRVFDKQKEFYSEILTIELKEELKGKKRDAVWAICAKAFKEKGTELVGIKRQGTTVEQKIENFLWRTKGLSEKLSLEQLVVVFQQINIQLNNSSGYLGAISDRSKELFFNKIKKADGSFRAQTVGEYQMDVLDKNPNASLRNMVFYRQDYLDEFNTIWEQQAEFHKELTEELKREIRDVVIFYQRPLKSQKGLIGFCEFESRKIEVEIDGKKKIKAVGSRVIPRSSPLFQEFKIWQVLNNIEVFGKGKKNKKQKGATLFDQTEDPLQLGGRRKLYIEEKDLLAAELSIQKELKKADILKLLFDNPKELDLNFNSVQGNITQALLFDAYKRIIELSGHEINTDKKSAPDIVKSFEEIFEGLGYNSEVLVFNSNIPLDSQAMYRLWHLLYSFEGDDSKTGNESLVNKVAELCGFEQEYAAILANITFQNDYGSLSAKAIRKILPYLKAGNKYDVACEYAGYRHSTSSLTTEELDNKEYKDRLKVLPKNSLRNPVVEKILNQMVNVINSIIDTYGKPDEIRIELARELKKNAKEREELTKSIAETTRLHEEYKEILSKSPFNLSYISRNDIVRYKLYQELKDNGYKTLYSNTYISPSALFSGNFDVEHIIPQSRLFDDSFSNKTLELRSINIEKGNKTAFDFIKEKYGETGIENSLDNYLTRIENLYKTGALSRAKYNKLKIQEKDIPDGFIERDIRDTQYIAKYAKTMLGDLVKLVVSTTGSITDRLREDWQLVDVMKELNWEKYKSLGLTEEFTNDEGHKIRKIKDWTKRNDHRHHAMDALTVAFTKRGIIQYLNNLNARNDKSSSIYGIEQNELYRNSKGKLLFKPPFTLDDFRAEAKRHLENTLISIKAKNKVVTQNINVTRKSGDVNKKVQLTPRGQLHNETVYGSQKQYVVKEEAVNAKFDAAKIATVTKPQYREALLKRLNEFGNDPKKAFTSANALSKKPIWLNELHTEQVPEKVKTVSYEKVYTIRKDISSDLKLEKIIDKRIREILEARLEEFTGNAKQAFSNLDENPIWLNRDKGISIKRVTISGISNAEPLHEMRDKDGNLILDKDGKKQPVDFVSTSNNHHVAIYRDADGNLQEKVVSFYEAVSRRNLGLPIIDKEYKAAENWQFLFSMKQNEYFVFPNEKTGFNPLEVDLLNPENYHRISPNLFRVQTMSKVVYGNNVIRDYKFRHHLETTVKDVTELKDISFKQYKTLSFANNICKVRLNHLGQIASVEEY

SEQ ID NO: 6723 - protein, 1163 aa, synthetic construct
  REGION 1..1163: note = Synthetic
LEAKTKTSTSKIFLGKYGIYSADLKGLDRKLQPIKWRVEALRQQVDKDVLAFVISDLKGQIANTSGLLGAISDRSKELYFNKQTIGQYLWASLKENPHVSVKNQPFYRQDYIDEFEKIWETQASFHKELTPELKQEIRDIIIFYQRPLKSKKGLISVCELEQRKVKVTIDGKEKEITIGPKVAPKSSPMFQEFRIWQNLNNIQLIDNERNSKRSLYEEERNLLYEELSIRDRLSKAEALRVLGKKNRQWDLNYKELEGNRTQATLFSCYNKIITMTGHEECNFKQLKAPEIRHYIKTIFKNLGFNTGILEFDSSLNGHELEQQPMYQLWHLLYSYESDKSRTGNEALLKKLETIFGFPREYASVLAEVAFEDSYGNLSVKAIREILPHLQAGLDYSQACEEAGYKHSRRSLTKEELDQKEYKEKLELLPKNSLHNPVVEKILNQMINVINAVIDEYGKPDEIRIELARELKIGAAERENMTRSISQGNAENKRIREILEKEFALSYISRNDIIKYKLYEELKPNGYKTLYSDTYIPKDKLFSKDFDIEHIIPKARLFDDSLSNKTIEARDVNIAKSNKTAFDFISGKYGQQGIEAYKKKLYILLQGGSINKAKYNRLLMKEADIPSDFINRDLQNTRYITRKAYEILSDLVRVVTPTSGAVTSRLREDWQLVDIMKELNFEKYQKLGLTEVIEDKDGRKIKRIKDWTKRNDHRHHAMDALTIAFTKPSFIQYLNNLNARSNKGDSIYAIENKELHREDGKLCFNAPLPINEFRAEAKKHLKAVLVSIKAKNKVMTQNVNKIKTKHGVIKKVQLTPRGELHNATFYGTKKRPIIKMVRVGAALDEVTIKKVSSSFIRKVLLDRLYEYNGDAKKAFTGRNSIDKNPIYIDEERKRTVPALVKTIEWEMYHPTRKLISPDLKIDKVIDKGIRDILKTRLAKFNGDVQKAFSNLDENPIYKDEAKKIILKRVSLEGVSSVIPLHTIKDRAGMPITGKDSEPVLGDYVQTSNNHHVAFYIDENGNLQDNIVSFFEAAERKSQGVPIIDKNFNHDIGWRFLFTMKQNEYFVFPNEVTGFNPSEVDLMDEANYDIISPNLYRVQKMSRVVYGKSIIRDYVFRHHLETTVEANANLKGLAYKQLKSLSYLEGIVKVRINCIGKIVAVGEYD

SEQ ID NO: 6724 - protein, 1406 aa, synthetic construct
  REGION 1..1406: note = Synthetic
MEKKIIGIDLGVTSIGWAYVIEDENGHSRILRIGTRVNPLTTEELKNFEQGKPITETAERTLKRSMRRNLQRYKQRRTNLINVLLKNKLITETTALAEDGKGTTHLTHALRAKAAYAQIPLEDFARVLLMLNKKRGYRSSRKVKTEADGQAIDGMAVAKKLYEENITPGQLCYTLLLQGKKTLPDFYRSDLQVEMEKVWTFQKQFHQAILTDEFRKYIAGKGQRATAASFWGKYGFNTAEFKGSREEKKLKSYEWRSQAITTPLSQEEVAAVITDINSNIANSSGYLGAISDRSKELFFNKQTVGQYQYNLLQQNPHTNLSGQVFYRQDYLDEFETIWETQATFHTMLTPSLKEEIRDIVIFYQRKLKSQKKLVSICEFEKRILEPLQGDKVVGYKVAPKSSPLFQEFKIWQALGRMEIQHKVTKERHFLDLDAKQLLFDELNVKGDLTKENALTILGFKPKEWECNLLKLEGNRTNQALYEAYLKILELEGYEVKDLLGLKLDKDDIKLSELPVDAADIKKMVREIFETLNIKTSLLDFNATLPGKSFEQQHAYQLWHLLYSYEGDNSPSGNKKLQDLLQAKFGFTNAHGQILANVSLETDYGSLSAKAIRKIFTHIKENHYSAACALAGYNHSSYLSKEENEQRILKDRLTILPKNSLRNPVVEKILNQLINLLNTIFDDPYLGKPDEIRIELARELKKNVQERQRLNTEITKNNTEHERITKILIKEDNIKNPTRNDIIRYKLYQELKHNGYKTLYSNTYIPREELFGKNFDIEHIIPQSILFDDSFSNKTLCVRKENIDKADRTAMDFIGPYFGEDKVQEYINRVEMLHQINLKNPEEGIGKGKYKKLLMKASEIGQGFIERDLRDTQYIAKKARQMLLEVTRTVVATTGSITKRLREDWGLVNVMQELNMDKYRQQGLTELIEKKDGSTKERITDWTKRNDHRHHAMDALTIAFTKHSHIQYLNNLNARKSDDKKGKEIFGIEQKETEKVKDDTGQTQRRFKLPMPDFRQAAKHHLEHLLISFKAKNKVFTKNKNKYKTKNGEQVKLELTPRGQLHKETIYGRIKKYVTHEEKVSSKFNAQLIQTVANSKYRYALLKRLEENGNDPKKAFTGKNSLDKTPLFVDATQQEKIPPVVKLVSIEQGYTIRKDITPENFKDAKSIEKIVDVGIRNLLHHRLETYNGNEKEAFYNLDKNPIWVNESKGICIKRVTITGVTNAEPLHYKRDHHGKPILDNNGNRTPADFVSTGNNHHAAIYRDAAGNLQDNVVSFYEAVARVNQGLPIIDKSLNKELGWQFLFSLKQNECFVFPNEGFDPLEIDLYNPANNKLIAANLFRVQNFSRLQYGNNIIRDYNFRHIYETSVENRKELKDIAYKQVKSLPIFEKIIKVRINHIGQIVKTGEY

SEQ ID NO: 6725 - protein, 1389 aa, synthetic construct
  REGION 1..1389: note = Synthetic
MKKILGLDLGTNSIGWAVVNEKENLDEKSSIIKLGVRVNPLTVDEQRNFEAGKPITTNADRTLKRSMRRNLQRYKLRRESLLEILKSNHFITDETILAEDGNRMTFETYRLRAKAAVEEISLEELSRVLLMINKKRGYKSSRKVNADDEGKIIDGMDIARKLYDEDLTPGQYVLNLMRTGKRYIPDFYRSDLIAEFNKIWNFQKQFYPEILTDELKEELKNKNKKQTWAICAKSFSLVGIKRETKGSELKKENYQWRVESISKQTDLERLAIILQEINGQISSSSGYLGEISDRSKELYFKRQTIGQYLMEKLDANPNYSLKNKVFYRQDYLNEFEKIWETQAKFHAELTDKLKREIRDVVIFYQRPLKSQKGLISFCEFENKQIEVTIDGKKKLKTIGMRVCPKSSPLFQEFKVWQILNNIQVSGKVVPVQDTDLFGTTSHMEQGKRFLYQDEKETLFYELNIKEKMSKNEALKLLFKNYKELDLNYKEIEGNRTMAALIKACQTIIDMSGHGEYDFSKMQAKDVMHIIETIFNGLGFNTDILHFDASVEGKAFDKQPAYMLWHLLYSFAGDNSKSGNEKLINKISELYGFDKEYASIIAGINLQQDYGSLSSKAMRKILPHMKEGLEYSVACGYAGYRHSSESLTRKELDNKVLKDRLELLPRNSLRNPVVEKILNQMINVVNSVVEEYGKPDEIRIELARELKKSASEREELTKAINKTTKEHEGYKEILQREFGIVNVSRNDIIRYKLYMELKDNGFKTLYSNTYIPQEKLFSKEFDIEHIIPQAKLFDDSFSNKTIEARAINIEKSNATAYDFVCSKYDAEEIKRYEVRIEELFRKGIISKTKRDKLMMKEADIPDGFIERDLRDSQYIAKKAREILCDIAREVVTTTGSVTSRLREDWQLVDVMKELNWDKYDRLGLTEIIEDKDGRKIRRITDWTKRNDHRHHAMDALTIAFTKRSYIQYLNNMNARSDKSSSIYAIEKNELYRDNGKLKFCPPIPLDVFRAEAKHHLDNILVSIKAKNKVVTRNLNVTKTRNGKNKKMQLTPRGQLHNETIYGKIKQYVTKEEKVNASFTEDKIATVANPKYRMALFERLKRYNGNSKKAFTGNNTLQKNPIYLDDMHTMTVPEKVTTVTFEEVYTIRKEISPDLKIDKVIDVHVREILKARLAEYSNDPKKAFVNLKDNPIWLNKEKGIDIKRVTIRGVSNAVALHDKHDNKGRLVLDNDGGKQPVDFVSTSNNHHVAIYRDADGNLQENVVSFYEATMRANMEMPIIDKDYKKAEGWQFLFTMKQNEYFVFPNQETGFNPNEIDLLNTDNYAEISKNLFRVQKLASKNYFFRHHLETNVDTPKELSGITYKSQLGLKGIVGIVKVRVNHIGQIVAVGEY

SEQ ID NO: 6726 - protein, 1439 aa, synthetic construct
  REGION 1..1439: note = Synthetic
VNCFKFCTAKIRQKRKPAKYNAKKFSSYGNNINFVVHKTTRKKHIIMKRVLGLDLGTSSVGWAVVDQAESQSEQSKIIKMGVRVVPIDSNEKDDFEKGKSITTTSQRNLKHGMRINLQRYKQRRSHLINILKREGFITDKTLLYESGNFSTFETYHYRAKAATEEITLEQLSRVLLMINKKRGYKSNRKADKQEDGQLIDGIDIARKLYDEHLTPGQYVYESLKQGNRYIPTFYQSDLKSEFNAIWDYQAQFYPDILDDELREKVTSRSKNDTSNIFYAVKNVAIAENKDRKTRLLVSYRWRSEALTHQLPINEVAAALCDINGNISNSSGYLGRISDHSKELYFNKLTVGQYLMQQLSKDPHYRLKNRVFYRQDYLNEFNTIWETQSLYHPELTDKLKEEIRDTIIFFQRKLKSKKGLISFCELEGKQITITVNGKDKKVMTGPRVCPKSSPLFQEFKIWQELNNVLIENKQVKARSKSQSTLFPETEKYVPLTSEQKQLLHRELSVNAELSKSAILKLLGLNEKNYTINYKSLHGNTTQVQLLAASKQVLEWSGQDIDKFDQLDYDTKMHFITSVFEALGARSDYLTFNPYQLDNYLDQPAYRLWHLLYSYEGDSSNSGDVKLKEHLKELTGLSDNYVTALASVRFEQDYGSLSAKAIRNIMPHLLEGKTYSDACEAAGYQHSAQSLNREELDTRPLADSLDILPKNSLRNPVVEKILNQMIHVVNSTMQEYGIERDGAKRFDEIHVEMARTLKQTKDQREKASDLLNKRTKENDSIIKTLQEQFGISHPSRNDIIRYRLYLELKDNGFKTLYSNTYIPKEELFSKKFEIEHIIPQAKLFDDSQSNKTLETHEVNLEKGSRTAMDYVLDTYGEVGAEQYRQRIAYLYDNKNKGGTNKKHKNLLTTEAEIPTDFLNRDLGDTQYIARKAREMLMQVARTVVPTIGSITARLREDWQLVDVMKELNLPKYEKLGLVDTYNRDGRQVRRIKDWSKRNDHRHHAMDALTVAFTKIEHIHYLNNVNAHNDEDRLHPNAMALRSKLIRDHRFVPPMPLNQLRSSALEHMRGILVSIKAKNKVATRNINRIKGNDMRQVTLTPRTQLHNETIYGMRKRYVATIEKVGSKFDAQRISLVARQDYRDALMRRLDEYGGNAQKAFTGKNSIAKKPLYLIGSSTQQVPESVKLVWLETIFSIRKPIDASINISKVLDSKARTILQQRLEEYGNDAKKAFSNLDDAPIWLNREKGISMKRVTIQARVSDPIPLHDKLGRDGHILHDNDGCTMPNDYVSTSNNHHIAIYEDANGNWHEQIVSYYEAIARLNGQMPVVDKHYNESEGWRFKFTMKQNEYFVLPDYEHGFLPNEIDLMDESNYALIAPHLFRVQKLSSKDYFFRQQFETSVTAGNTLPQGVAFIRISNENKLKGFVKVRINHIGKIVQVGEY

SEQ ID NO: 6727 - protein, 1389 aa, synthetic construct
  REGION 1..1389: note = Synthetic
MIKILGLDLGTTSIGWALVNEAQNDNEVSSIQKLGVRVNPLTTDEQTDFEKGKPVSVNADRTLKRGARRNLQRYKQRRENLIDALKKAGLINDETILAEIDKFTTHSTYLLRAQAAQEQITNDAFARVLLMINKKRGYKSSRKAKNEDEGQAVDGMAIAKKLYDENITPGQLSFNLLTDGKKYLPDFYRSDLVAEFDKIWEFQAQFYPEILNNVFKKELNDKGQRATSALFWIKYNFNIAEIKAKTREEKKLKAYEWRSNALTQQLEKEEVAYVITEINNDLNKSSGYLGAISDRSKELYFNKQTIGQYLYKQLADSPHTRLKNQVFYRQDYLDEFETIWETQAKFNSLLTPQLKIEIRDIVIFYQRKLKSQKGLISVCEFECREVENENTKKTVGLKVSPKSSPLFQEVKIWQTLHNLEFRDKKTKEKFKPDLEAKQLLFNELNIKGNLSASKVIKTVGYNSNDFELNYKIVEGNRTNQALYEAYLQIIELEGYDENLFKPNGKDDVKLAEIAASALEIKAVVKQIFESLKIDTSILDFDAELEGKVFEKQLSYQLWHLLHSYEGDDSKSGNDKLYELLKNKFGFQKSHAQILANVAFNSDYGSLSAKAMRKIYPYLKESNYSDACKMAGYNHSSSITKEENENRVLKNKLDLLPKNSLRNPVVEKILNQMVNVVNAIIADLTLGKPDEIRIELARELKKNAKERAELTLSVNKAKTDHDKFREILTKEFGIKNPTRNDIIRYKLYEELKVTGYKDIYTNSYISREKLYSKEFDIEHIIPQAKLFDDSFSNKTIVPRQVNLDKGNQTAYDYILKKFGQEKLEQYLQRVETIYKAKEGAIGKAKYQKLLKQGKDIGDGFIERDLRETQYIAKKAKQMLEELCLTVTSTTGSITNKLREDWDLVNVMQELNFDKFKTIGLTEFVEKKDGSFKERIKDWTKRNDHRHHAMDALTVAFTKRNYIQYLNHLNARKNEDHKMHLHITGIENNETELIIEDNGNKKRRFKKPLPNFRAEAKKHLENILISFKAKNKVATKNKNKFKTGAGEQTKIELTPRGQLHKETIYGKLKQYACKEEKVGAKFDEETILKVASEKYRNALLTRLLENNNDTKKAFTGKNSLDKNPIYLNPAKTLTVPLKVKLVWLEDDYTIRKDITPDLKIEKVIDAGVRKILNKRLTDFKGNAKEAFANLDKNPIWLNEDKKIPIKRVTISGIKNAEALHVKKDHFGNQILDKNGNKAPVDFVSTGNNHHVAIYRDSKGSLQENVVSFYEAVARVNQGLPVIDKIYNQNEGWIFLFTMKQNEYFLFPSGGFSPIDIDLLDPNNNKIISKNLFRVQKIATKDYWFRHHLETNVENDNSTKNIIWKREGLSGVNSIVKVRINHIGQIVKIGEY

SEQ ID NO: 6728 - protein, 547 aa, synthetic construct
  REGION 1..547: note = Synthetic
MQESEIPEGFIDRDLRNTQYIAKKALSMLNEICRRVVATTGAITDELREDWQLVDVMKELNWEKYKVLGLVEYFEDNDGRLIGRIKDWTKRNDHRHHAMDALTVAFTKDVFIQYFNNKNASLKPDTNEAAIRNKYFQNGKAIPPMSLDEFRAEAKKHLNDTLISIKTKNKVVTINLNRTKKKNGINKKQQQIPRGQLHLETVYGSHKQYVVKEEKVNASFDAAKIATVNKPAYRDALLRRLQENGNDSKKAFTGKNSLDKQPVWLDAKQNECVPEKVKTVMLETVYTVRKPIDEKLNVDKVVDARIRKLLQDRIKEYGNAKSAFANLDENPIWLNKEKGITIKRVSVFGISKAQSLHEKKDKDGNFILDKDSRRIPVDFVNTGNNHHVAIYRKPVLDKKGQAVFDENGELKFELEEVVVSFFDAVTRVNLSQPIIDKDYKRSEGWKFLFSMKQNEYFVFPNEKTGFDPKEIDLLNPENYALISPNLFRVQKIASKDYVFRHHLETVVADRKELQEITWKRISSLSILNRIIKVRVNHIGQIVMIGEY

SEQ ID NO: 6729 - protein, 1382 aa, synthetic construct
  REGION 1..1382: note = Synthetic
MKKILGLDLGTSSIGWALVNEAENDTEKSSIIKLGVRVNPLTVDELSNFERGKSITTTAERTLKRSMRRNLQRYKLRRANLIEILKENGFITEEAVLSESGNFSTFETYRLRARGVEEELTLVELSRVLLMINKKRGYKSSRKAKSQEEGQLIDGMTIAKQLYEENLTPGQLCLRLLQSGNKFLPDFYRSDLQTEFNSIWNYQKKYYPEILTDELKEKLINKNEKATWAICEKPLNLVGLKRVSKARDLRLENFKWRSDALCMKLDLEQIAVVLQKINGQISNSSGYLGSISDRSKELYFKNQTVGQYLMAQLKSNPNISLRNQVFYRKDYLDEYNTIWEKQAQYHCELTEDIKREIRDVVIFYQRRLKSQKGLISFCEFESKQVEIESSGKKRVITIGSRVIPRSSPLFQEFKIWQNLNNLEVFPKGYLSRRKASARVINGQAEGGERRSLDQEEKEILFKELSVREELSKSQALALLFDNDKELDLNFNKIDGNRTFAAFYKTINEIIEISGHDKIDFSRHNADEISATVKSIIYVLGCNPDIFSFDSEKGLDQQSSYRLWHLLYSYEGDNSNTGIEGLIEKISNLTGLQSDYARIFTNITFQDDYGSLSAKAIRKILPYLKSGNKYDLACRYAGYRHSKSSLTGEEIAGKVLKDRLDILPKNSLKNPVVEKILNQMTNVVNAIIDEYGKPDEIRVELARELKKNAEERDKLSKMINEATRVHEEIKKILQDEFGLSHVSRNDIIRYKLYKELETNCFKTLYSNTFVPREKIFSKEFDIEHIIPQARLFDDSFSNKTLEKKDINLEKGDRTAFDFVKEKYGESALQDFLTRIESIYNLKGISKAKFNKLKMSEKDIPDDFIDRDLRNTQYISRKALGMLGEIVRSVVPTTGSITDQLREDWQLVDVMKELNWEKYKALGLVEYFEDKDGRQIGRIKDWTKRNDHRHHAMDALTIAFTKHVFIQYFNNVNSRYDKDSNAYAIEQKYLYDRKVKPPIPVDEFRAEAKKHLESVLVSIKTKNKVVTRNINASKNDGGIHRKIQLTPRGQLHLETVFGSHRVPVVKEVRVGGTLNEEVIQLVTRPQYRDALLQRLAENNNDPRKAFTGRNSLEKQPLYLDELHTKKVPEKVKVLTFEPVYTIRKQVAPDLNVDKVIDPKIRKLLQDRIAEYGDAKKAFSNLEKDPVWLNREKGISIKRVAVSGINNAQALHEKRDKEGRLISDSEGKNIPVDFVNTGNNHHVAIYRDANGELQENVVSFYEAVTRANLGQPVIDKEYRSSEGWKFLFTMKQNEYFVFPNFNTGFNPIDINLLDTGNYHMISPNLFRVQKTTTKDYFFRHHLETNVDNNGNLKGVTWLRGGLGLLNGAIKVRVNHIGQIVSLGEY

SEQ ID NO: 6730 - protein, 1425 aa, synthetic construct
  REGION 1..1425: note = Synthetic
MKKILGLDLGTNSIGWALVNESETENEQSSIVKLGVRVNPLTVDEISNFEKGKSITTNAERTLKRGARRNLQRYKLRRENLIEILRENKIIADKTILSEDGKDTTHQTLKLRAKAAKEKVSLEEFAKILLLINKKRGYKSNRKAQSSDEGQLIDGMAVAKELYEKDITPGEFSYNLLKNGKNNLPDFYRSDLQMEFDRIWKFQHKFYPEILTDDLKNNLKNKAKKDTWAICQKPFNIVGIKRNTKGAEQKLENYKWRKDALTKQLELEELAIVLQEINGQTNSSSNYLGDISDRSKELYFNNQTVGEYQMAQLVANRHQSLKNQVFYRQDYLDEFEKIWETQAIHHKELTPELKKEIRDVVIFYQRPLKSQKGLLSFCEFESKEIEILINGVKKKKTTGLRVCPKSSPLFQEFRIWQVLNNIEVKGVTKKNKNNIEPTLFEDNFNEKKLIQKVQRPLEQEEKELLAERLMLCDKMTKNQMLTALGLNNYDMNFKEIKGNTTFAKLFQAYKEIAEIVGYDKDKIKNLEDINIIFKDLGIKTDFLSFNSELDRKELQQQSLYKLWHLLYSYESDNSATGNESLIRKISELCGMPEDYAKILANIVFESDYSSLSAKAIGKILPHLKDGLQYDVACEYAGYRHSKSSLTKEELENKKLKDRLEILPKNSLRNPVVEKILNQMVNVVNEVIDTYGKPDEIRIEIARELKKSAKEREEMTQQINKATNAHKAYKDILEKEFGLTNVSRNDIIRYKLYLELEDNGYKTLYSNTYIPREKLFSKEFDIEHIIPQAKLFDDSFSNKTIEKRSVNIEKSNMTALDYVASKDANSLSEYKLRVEKLHKSGQISKTKYNKLLMSEAEIPSGFINRDLRDTQYIAKKAREMLNELVKFVVPTTGTITARLREDWQLIDIMQELNWDKYDQQGLTMFYNDKDGRQIGRIIDWSKRNDHRHHAMDALTVAFTKHSFIQYLNNLNARVQKGIDEYFDLDMVELSDLPKEERSATIYAIEKKYLHRDKNGKLRFNPPIPLNEFRAEAKNHLENILISIKAKNKVVTQNTNITKKLSGKNKKTQLTPRGQLHLDTVYGSYQKPIIKEEQINGSFDESKIKTVTNNSFREALLKRLQEFDNDPKKAFTGKNSPSNNPIFVDKEKTLQIPNKVKTLTFETEYTIRKAIDPDLRIDKVVDTGIKEILEKRLAEFDNDPKKAFVNLDENPIYLNKEKGITIKRVSIKGISNAIALRDKRDKDGNFILNENGEKQAIDFVNTGNNHHVAIYKKPKLNRKGEVQLDDKGEQVYELEEVVVSFFEAVTRVNLGQPIIDKEYKQDEGWQFLFTMKQNEYFVFPNEKTGFNPNDIDLLNPENYNIISPNLFRVQKISTKNYMFRHHLETNVNETKELRDITWKNIHSTQNLVNIIKVRVNHIGQIEAVGEY

SEQ ID NO: 6731 - protein, 1386 aa, synthetic construct
  REGION 1..1386: note = Synthetic
MKRILGLDLGTTSIGWALVNEAENEQEQSSIIRLGVRVVPLTVDEQTNFEKGKSITTNADRTLKRSMRRNLQRYKLRRTFLISTLKEAGIITDDTILTEAGPRSTFETLRARAKAASEEVTLPELARILLMINKKRGYKSSRKAKSAEEGTLIDGMEVARLLHDQHLTPGQYAYTLLRDGKKYIPDFYRSDLMEEMDAVWSFQQTFHSDVLTDDFYQQLQNKSKTQTTKIFLAKYGIYTAENKGADRRLQQYRWREEALKRQLTREELAYVIADISGAITGSSGYLGEISDRSKELFFNQQTIGQYILQHLDADPHYSLKKQTFYRQDYLDEFDRIWETQARFHHELTPELRKTVRDCIIFYQRPLKSKKAMLDICTFERRQIEVTEEGKTRKKTIGLKVCPKSSPLFQEFKVWQILNNLQVEYEDTSLDLFATTEKRRFLDLEEKELLARELTYKEKLSKREVLTLLFGKAAKKYDLNYKEIEGNRTLTILYRAFLDIVSRSGHHEYDINKLHAQELEEVVGQVFSTLGINSEILHFDSELEGHAFDRQPLYRLWHLLYSYEGDNSKTGNESLIARLQELCHCEREYAQILANVTFQEDYGSLSSKAMRKILPFMKAGHDYSEACEYAGYRHSERSRTKEELAELTYSDRLELLPRNTLRNPVVEKILNQMINVVNAICEEYGKPDEVRIELARELKKNAKEREAMTQAINEANTQNEKYRSTLESEFGIQHVSRNDILRYRLYLELKDNGFKTLYSGTYIPKEKLFSKDFDIEHIIPQARLFDDSFSNKTLEARDINIEKSNATAYDYILNKWGEQRAAEYKNTIDDLYKQGTISKAKHDKLLMREADIPEGFIDRDLRNSQYIAKKAREILEDLVPQVIPTVGSITDRLREDWQLVDIMQELNWDKYDRLGLTETYQDKDGRTIRRIKDWTKRNDHRHHAMDALTIAFTQPAFIQYLNNLNARSDKSGSIYGIEQRCLYRDSHGKLRFRAPMPLDLFRAEARRQLEDILISIKAKNKVMTQNVNKSKVKGGSRKKVQLTPRGQLHNETIYGHTRHRVCEEVKVDGKMTPERALLIAKKVFREAVLARLAQFDNDPKKAFTGKNSPEKNPIWLNGQHAEQVPPKVKLVYFEDYYPIRKPISPDLKVDKVIDAGIRRILLARLEEFNGDPKKAFADLEENPIYLNKEKGITIKSVRIRGVLSAIPLHEAKDHFGRPITDDSGRRRPVDYVQTASTHHIAVYRDAAGNLQDVAVSFLEATTRKALGIPVVDTEYNAAEGWHFLFSMKQNEYFIFPDLEHGFDPQAIDLFDPKNKAEISKHLYRVQKMSKTEGGRDYFFRHHLETSVEDNKELKGIAFKRIKSLSSLEGIVKVRVNHLGDILSVKEN

SEQ ID NO: 6732 - protein, 1394 aa, synthetic construct
  REGION 1..1394: note = Synthetic
MKKILGLDLGTTSIGWALVKEAEIEEEKSSIIKLGVRVNPLTVDEQSNFEKGKAITTNADRTLKRTARRNLQRYKLRRENLLSVLKEHGFITDDSVLCEQGNRTTFETRLLRSKAATEKISLEELARVFIMINKKRGYKSSRKVNSGEEGSLIDGMTVARKLYDEHLTPGQYVYQLLCEGKKYIPDFYPSDLDAEFEAVWNCQKQFYAEIFTDELREALRSKNEKQTWAICAEPLGLKGIKRNGSTADQRVENYRWRTEAISKQMPLEQVAVVLQKINGQIAGTSGYLGAISDRSKELYFNHQTVGQFQMKQLSDNPNTSLKNQVFYRQDYLDEFERIWETQAKYHSQLTADLKHELRDIVIFYQRPLKSQKGLVNYCEFESRQKEVVVDGKKKTINIGLRVCPKSSPLFQCFKIWQAINNLQVTGEVVPKAQLDLFGDTTECEHGTRTLTEEEKCDLYRELSIKESLSETEIIKLLFGSKKGLSLNFRKVEGNRTMSLFVKACQTVLVINGYNDYDFSKQPYDKAMQIITQVFEALGFNTSFLTFDPTLDGKDFERQTAYQLWHLLYSYSGDNSATGNEKLIERLCAILNMNRNSAAVFASITFEPDYGSLSAKAMRRILPHMMDGLEYSVACEYAGYRHSRRSLTKEEIAAKSLVDTIPLLPRNSLRNPVVEKILNQMINVVNSVSDRYGKPDEIRIEMARELKKNANEREQMTRDIARANAENEKYRKILQEKFNKPNVSRNDIIRYRLYLELEANGFKTLYTQTYIPREKLFSKEFDIEHIIPQARLFDDSFSNKTLEARSANIEKGSTTAYDYVLAKYGEQGDNGSVKYKERIDSLYKEGVISKTKHDKLLMTTAEIPDGFINRDLRDTQYIARKAREILESAVRVVVPTTGAVTDRLREDWQLVDVMKELNWDKYDQLGLTETYKDPDGRQIRRIKDWTKRNDHRHHAMDALTIAFTRHSFIQYLNNLNARSDKAGSIYAIEKKELYRDNNNKLRFVPPMPLGEFRAEARRHLKDVFVSIKAKNKVVTRNVNITRGADGKKHRTVQLTPRGQLHNETIYGSRRRYVVKQEKVSSAFNEEKISTIGNPQIREALLRRLAEFGGDAKKAFTGKNSLEKNSIYLDDSHTKQVPQKVKTVTLEEVFTIRKPIDKDLNVEKVVDHRVRKLLQERLAEYGGDAKKAFANLDENPIWLNRERGIAIKRVTIYGVSNATALHDKRDMHGKKMLDSNGISIPIDYVSTSNNHHVAIFRDKDGNLQEHIVSFFEATERAQQQLPIVDYEYNKHLGWQFLFTMKRNEYFVFPNGKTGFDPNEVDLLDPNNAVEISKNLFRVQKLSTKNYCFRHHLETSVETPKELSGITYKWQLGLKGIVGIVKVRVNHLGEIVAVGEY

SEQ ID NO: 6733 - protein, 1391 aa, synthetic construct
  REGION 1..1391: note = Synthetic
MKKILGLDLGTSSIGWALVNEKETNDEQSSIIKLGVRIVPVEQEEKTKFEEGKPITTNANRTLNRGMRRNLQRYKLRRSNLKDILKKEGWINDKTILCESGNDTTYQTYRLRAKAATEEISLEEFAKVLLMINKKRGYKSNRKTKAEDEGTAIDSIEITQQMYDNNLTVGEYVNNLLQKGEKNIPTFYRSDLVAEFEKIWNKQKEFYPAVLTDDTKKKLNETAKFGAYQEVFGIEGNVKEKGWELKEKTYQWRSLAVKEQIGLEQLAVVLQAINGDIRKSSGLLAQISDRSKELHIENITIGQYKLRELENNPNCSLRNRTFYRQDYLDEFEKIWTKQAQYHKELTDELKKKIRDEVIFYQRPLKSQKGLISICEFENRKIEVNGKDKIVGLRGCPKSSPLFQEFKIWQKINDLEVTRKLQVTDKQDESQLSLFEDNDSKSKTKERTVYEHPILSMEEKNKLFNELQYKEKLTKTQILKLLYETDKGYDLNFKEIQGNTTFAALFKVYKSIVVASGYDEKQFDKQDIEMNLNTIKTVFNTNKIVSDIIFFDTDKQGKDFYEQPAYRLWHLLYSYAGDNSVSGDDSLIEKLKETFGFDDAAARALSNISFKSDYSSLSAKAVRNILYSMKKDGLQYNEACEMAGYRHSKNSLTKEEIENKVLVDKLELLPKNSLRNPVVEKILNQMINVVNNVSDTYGKPDEIRIELARELKANAEERDRMTKNITTATKAREEYKEILKQPPFNIANPSRNDILRYRLYEELVENGYKTLYSNTCIRREKLFGKEFDIEHIIPQALLYDDSFANKTLELRNINIEKGKKTAYDFVAEKYGEDGITQYENKINSLVEKGAISKIKGKNLLMKVSEIEGGFIERDLRETQYISKKAKNILEDFVKTVVATGGQITDKLRSDWGLAGIMKELNVPKYKKADENKVHYEIRSDGHSELVIDGWTKRNDHRHHAMDALTVAFTTRSHIQYLNTLHSQNSYKEFEDIIDNNNHKKLLPSIPIDVLRSEAKHHLENILVSYPSKGKVVSKHINKTKNKNAKPQITLTPRGQLHNETVYGTAKRYKTCEEKVNAAFDENKISTVAKKEYREALLKRLHKYGNDSKKAFTGKNALSKNPIYLDELQNKCIPEKVKTVVLEKVYTQRRDINKDLTQKHIDKVLDTKVREILNTRLKEYDGDAKQAFANLDENPIWFNKEKGVAIKSVVIEVNLNPIALHDKRDNFGNLILDKDGNKQPSDYVQPYNVHHVEIFEDEESNYQVRPVYFIDAVMAAKNGDPIVNTHHEKGWKFVFSMKRNDYFVFPNAETGFNPNEIDLTDPANYDKISPNLYRVQKLAATSKDYWFRNHLETTVTNDVKDVTYKNIKSLNNLKGIVKVRINNIGQLEIPTNK

SEQ ID NO: 6734 - protein, 1421 aa, synthetic construct
  REGION 1..1421: note = Synthetic
MKRILGLDLGTNSIGWALVEEAENHGEQSGIVKLGVRVNPLTVDEKNKFEKGEPLSTNAERTQKRGARRNLQRYKLRRAALIEILKENGLITDTTPLTEIGKNTTHQTLALRAKSAREQVSLEDLAKILLLINKKRGYKSSRKAKSEDEGQSIDGMAVAKELYDEDLTPGQYVFQLLSQHKKYIPDFYRSDLQNEFDKIWRFQRQFYADTLTDALYERLQGKNKTQTWAICKEPFQLVGIKIKENGKELKGGDLKKKHYELRSKGLSELLDLELLAIVLQEINNNLNQSSGYLGAISDRSKELYFRKETVGEYLWKQVKEDRHTSLKNQVFYRQDYLDEFEQIWNTQASYHKELTDDLKEEIRDVIIFYQRKLKSQKGLLAFCQFESWEVDKRDKAGNRIINKLTGQPKKQRIGRRVVPKSSPLFQEFKIWQAINNLAFQRKDSVKKRGLGNQDGEGSYILGNVERTLLFEELNLRGKFSEKQVLKVLGLSSKEWKTNYPEGLEGNRTNQALYEVYQSIAEQEGYGFDWARKSANEIKEELKAIFSATGINAAILDFDANVEGEEFDKQPAYALWHLLYATEEDEKITEEDRLLYGNSQVVLKKKLVEKFGFKPDYAKLLSGVALPQDYGHLSSKAIRKIIPYLQEGHNYYEACQLAGYNHSKSLTKEENEARDLVERLELLPKNSMRNPVVEKILNQMINLVNQVVDEYGKPDEIRIELARELKKNAKERGDMTKQINEATRRNEEIKKKITKEFGIPNPTKSDVVRWRLWDELAMNAHKDLFRGKEISPKDLFTGLIEIEHIIPKALRFDDSFSNKTLAFKQVNLQKADRTAIDFITQDYLSDLEDFKSRVEMLYDNGKGSISKAKRNKLLMCQEDLPDGFIERDLRNSQYIAKKAKDILQALVRNPVVATSGTITDRLREDWDLINVMKELNMPKYRALGLTEFEQRLNKQTGELVKHEVIKDWTKRNDHRHHAMDALTVAFTTHSHIQYLNFLNARRDQHHSEYANIMGIEQKITETYEQKNGKGKRKFIPPMEDFRGEAKKHIEAILISIKTKNKVVTKNSNKSRKAGKDKYHIKEQLTPRGQLHKETVYGRSKRLMKKPTKLNKGFTLAQASLIANPLQKELVISHLNKFSNNPDIAFDRKSIKKMPLMYQGAILKEVLCYEEIFTIRKEVSPGLKIEKVIDEKVKAILQKRLAEFGGDAKKAFSDLEQNPIWLNKEKGIAIKRVTITGVSNAEALHHKKDHLGRVVLDEKGHPQAADFVSTGNNHHVAIYEDSEGKLQEKVISFYEAVARINEGLPVIDKAFNKDKGWKFLFTMKQNEMFVFPNDDFDIQHIDFLDQDNARLISKHLFRVQKISTKNYMFTHHLETKAIGSDDLKHRKMLFRHSYYFLQNTESLRSIKKVRIDHLGRIVQVGEY

SEQ ID NO: 6735 - protein, 1360 aa, synthetic construct
  REGION 1..1360: note = Synthetic
MKRVLGLDLGTTSIGWAVVDQATSQEEKSNIIKLGVRVNPITVDEQSSFENGKSITTTADRTLKRGMRRSLQRYKQRREHLVQLLKKHGFITDDTLLNENGNATTFQTYRLRAKAAHEEISLEEFARVLLMINKKRGYKSNRRTDSQEDGELIDGMAVAKKLYDEHLTPGEYVYHILQSGKRFIPSFYRSDLQDEFDKIWDAQKQFYPEILTVELKDKLAGRRKNDTEKIFYAIHHIAAATIKDRKTATITIYKWRVQALRQRLELEQVVTVLAAVNGAIAGASGYLGSISDNSKELYFGHMTVGEYLMHGLEQDPHFRIKNRVFYRQDYLNEFEQLWETQRQFHPELTKELKEEIRDTVIFYQRKLKSQKGLIAFCELEGKEITVKVDSKEKKVMTGPRVCPRSMPLYQEFKMWQVLNNLRVQCKIDGTDATLTLEQKQRLHNELNINGNMKASSVLKVLGLKAKEYGINYDEVPGNTTNAALFKKYKDIVEWTGHDVEKFDKLSADEKLSLVKAVFKGLNYNTDILDSGLSEDSKAFRLWHLLYSYEGDNSNTGIDGLVGHISSLTALPVDYAKAVAQVKFEDDYGSLSAKAIKKILPYMQQGMMYSEACETAGYRHSKSSLTREEIANKQLLEHLEVLPKNSLRNPVVEKILNQMVHVVNACQGAYGPFDEIHVEMARELKLTSKQRETRTQNLNQRTRETEEIKQKLIKEFNIPNPSRNDIIKYRLYMELAPNGFKTLYTDTPIPHEKLFTREFNIEHIIPQAKMFDDSFTNKTLETAEANLDKSNMTAYDYVLSRQGEEGAKRYKAKIEKLFGASNPKKCERLLMPEKDIPDGFLNRDLSDSQYIAKKAKSMLEKITRVVVTTTGAITARLREDWQIVDVMKELNLDKYEKLGLVETYNDRDGRKIKRIKDWTKRNDHRHHAMDALTIAFTQLSHIQLLNHLNAHESGDIKANAYALMRKNLTKGGTFIPPMENFRAEAKKHLEAVLVSIKAKNKVVTPHVNRIKGSTRHQVTLTPRGQLHNETVYGKKQFYNTKMEKVGRSFDAAKIATVCKKAYREALLRRLQEYGGDPAKAFTGKNSLLKNPLYVDSRQLDVVPSSVKTVALDSVFTIRKPIDASLKLDKVVDAGVRKILKQRVDEYGSAEKAFSNLDESPIWLNEQAGIAIKRVTIKGVNVATPLHERRDSKGRFVEDAEGNRQPIDYVSTNNNHHVAIFEDENGDLHEHIVSFYEAVALTQLGLPIVDKHHNSDKGWKFLFTMKRNEYFVVPDLEHGFNPADIDLMDEKNYPEISKHLYRVQKLATRYYVFRLHLDTKVEEQKPLRDIQWKRIQNENGLKGFVKVRVDHLGRIVAVGEYN

SEQ ID NO: 6736 - protein, 1377 aa, synthetic construct
  REGION 1..1377: note = Synthetic
MKKILGLDLGTTSIGWAMVNQAENNEERSSIIKAGVRVNPLTTDEKDAFEKGKAVTTNTDRRLKRSMRRNLQRYKLRRNELISILKELGWIDDSTILAEHGNKSTFETYMLRSKACTEMISLSELSRVLLMINKKRGYKSNRKLNADEDGHLVDGMAVAKMLYDEDKTPGQYCYELVRKGNNALPEFYASDLVAEFRKVWKTQSSYYPEYLTDEFWQQAEGKSKSSLSKLFFAKYKITTADNKGKDKKVKAYEWRSSAIERQLPMDQVAYVLCEIAGNIGSSSGYLGNISDRSKELYFNKQTVGQFLYSNIQKDPHFSTKKKVFYRQDYLDEFEVIWEKQASFHPEMTADLKKEIKDVVIFFQRRLKSQKGLIGYCELESRKVDVVVNGKTVRKIRGCKVAPVSSPLFQEFRMWQKINNVIVTNKATGEQRPLEQEEKERLAEALHVKDRMSSNDILKLLFKKPKELEMNFNAIEGNETLSKLYSKFLEIISMTDGMDYEYSKMRPEELIHTLKVGFDKNHFNSEVLEYDALLSKEEYERQPLFKLWHLLYSYEGDNSQTGNESLVKKIGELCAMPDDLAKMAASISFKQDYASLSHKAMRNILPYMMDGNEYSVACICAGYNHSKQSLTKEQIDNKILKERLDEIPKNSLRNPVVEKILNQMVNVINAVGDRYGKPDEIHIELARELKSSQEERAKATESIASNNKENERIKTILEDRFHLTYVSRNDILKYKLYEELKNNGYKTLYSNQYVPEEKLFSREIDIEHIIPQAVLFNDSLSNKTLEYRDINLEKGKDTAYDYVKNKYGETGLEDYRLRVQKLFESGGISRTKRDNLLRDASNIPEGFVERDLRDTQYIAKKAREILLEYVRVVVSTTGSITDRLREEWGLVNVMKELNMPKFEAAGLVETITSSDGKDIRKIKDWTKRNDHRHHAMDAITIAFTKLAHIQYLNNLNAKSDKSSSIYGIMMKETYLSGSKRLIVPPMPLDQMRRAVREQLGSILVSIKAKNKVMTENYNRIKTKEEVKVTKCLTPRGLLHKEQVYGQRRRYEAYFVKVNAKMDEDQIASVASSEIKATLLLRLSQFNGDPKKAFSGVNSLDKNPIWLDDNHSRKVPEKVKCVRFVNVYSIRKPIDPNLSVEKVMDGKVQRILRARLAEFGNDPKKAFVNLDENPIWFDKEKGIVLRSVTIAERFDLDPIRIKRDNFGREILDREGNPIPSDFVNFRNNHHAAIFEDADGNIQGHIVPFYEAVRRKASGLSIIDKKYNSDKGWKFLFTMKSNEMFVFPNEKTGFDPKKVNLMDPGNYSIISPNLFRLQKMSNKKVCQEYYFRHHLETTLGYDLSLKDITWKCVQSLNILSGIVKVRINHIGEIVSVGEYD

SEQ ID NO: 6737 - protein, 854 aa, synthetic construct
  REGION 1..854: note = Synthetic
MINKKRGYKSNRRADNQEDGEIIDGMAVAKKLYNEHLTPGEFAYHILHSGKRYIPSFYRSDLQDEFDKIWNCQKQFYPQVLTAELKDKLTDRSKKDTENIFFAIHHISSATVKDRKTATLTVYKWRVQALRQQLDLEQVVAVLASLNGAIAGASGYLGHISDNSKELYFGHMTVGEYLMRGLEQDPHFRVKNRVFYRQDYLNEFEQIWETQRRFHSELTPELKEKIRDTVIFYQRKLKSQKGLIAYCELEGKEITVKVDGKEKKVMTGPKVCPRSMPLYQEFKMWQVINNLRVQSKIDGTEVPLTMEQKERLHDELNVEGDMKAARVLKVLALKAKDYGINCDEVPGNTTNAALFKKYKSIVEWTGHDVEKFDKLSASEKIALVESVFKTLKFNTDFLGDGCDEQSKAFRLWHLLYSYEGDNSNTGIDKLVAHICSLTALPADYAKAVAQVKFDDDYGSLSAKAIKKILPYMQQGMMYSEACAAAGYRHSKSSLTREEIAAKQLLQHLEVLPKNSLRNPVVEKILNQMVHVVNACQDAYGPFDEIHVEMARELKLTSKQREERTKALNQRTKETEEIKQKLIKDFNVPHPSRNDIIKYRLYMELAPNGFKTLYTDTPISHEKLFTREFNIEHIIPQAKMFDDSFTNKTLETAEANLDKSKMTAYDYVLSRQGEEGAKRYKAKIEKLFGASNPKKCERLLMREADIPDGFLNRDLSDSQYIARKAKEMLGKITRVVVPTTGAITARLREDWQIVDVMKELNLEKYEKLGLVETYSDRDGRCVKRIKDWSKRNDHRHHAMDALAIAFTQPSQTPMHSCAGPSPRAAPSFLPWRDSGPRHAGISRLCWFRSKQRTKW

SEQ ID NO: 6738 - protein, 1438 aa, synthetic construct
  REGION 1..1438: note = Synthetic
MKRILGLDLGTNSIGWAVVNEAETNEEKSSIVKLGVRVNPLTVDEKSNFEKGKSITTNADRTLKRSMRRNLQRYKLRRDALVGLLRENGWITEDTVFAEQGNFTTFQTLGLRAKAASEKISLEELARVLLSINKKRGYKSSRKVQGDEEGQLIDGMDIAKVLYEDGKTPGEYVYEKLSSDINYKAPDFYRSDLQNEFDRIWDAQKAFYPDILTDGLKEELRNKNEKQTWAICREPFQIEGIKRTAKGKELVKENYEWRVRALSEKLDLESLAVVLQKINSQIRNSSGYLGDISDRSKELYFNGQTVGQYQMAQLEKNPNHSLKNQVFYRQDYMDEFERIWECQARYHTELTPSLKHQLRDIVIFYQRPLKSQKGLVSICELEGRQVEVEVDGKKKRKTIGPKVCPKSSPLFQEFKIWQILNNVNVNRRYLTQEEKEELYDRLCTCDKLSKSEVMKYLKPDEYNTEWAQDSLFAPDEMYDPEILSRKHRNKKEINLNYKELEGNRTMAALLAAYSKIIVATGHEEYDFSKKKFSEAVKIISDVFRGLGYRTDFLHFDSSLEGKAFEEQASFRLWHLLYSYEGDNSVSGNYRLISKISEITGFEPEYAKILAAVSFAPDYGSLSSRAMKKILPYMKEGNTYSLACEYAGYRHSKRSLTKEELENKEYKDKLESLPKNSLRNPVVEKILNQMINVVNGVIDEYGKPDEIRIELARELKKSAKEREEMTAAISKSSREHDEIRKKLIDEFGIENPSHNDIVRYKLYDELRINGYKTLYTGTRISREKLFSKEFDIEHIIPQSRRFDDSFSNKTIEARQANIEKGSSTAFDYVKAKYGEEGANGYRGRVEKLLAEGKISRTKYRNLLMTESEIPDGFIDRDLRDSQYIAKKAREILESIVRDVVPTTGSITDRLREDWQLVDVMKELNWKKYDSLGQTYTYYDKDGRTVRKIKDWTKRNDHRHHAMDALTIAFTKRSYIQYLNNLNARISKSVDDAPSIDLSDYELRYIPKSEMTKVVRAIEHSCLYRDNKNKLRFCPPIPLDEFRAEAKRQLENTLVSIKAKNKVVTRNTNKTKKQGGVNSKVQLTPRGQLHNETVYGSIRQYVTKEEKVGSGFTREKIATVANAIYREALLSRLATFGNDPQKAFTGKNSLEKNPLYADDLHTVQVPPKVKTVNFENVFTIRKEVNFENFGKSGNKKLDKNGVIGKLHSIIDIKIREILIKRFEESNFDAQTAFSNLDENPIWLSKEKGISIKRVAIRGVNNAEPLHEKRDNNGNVIVDSKGQRIPSDFVQTGNNHHVAIYLDTDGNLQEQVVSFYEAVARVSMGMPVIDREYKKDEGWEFLFTMKQNEYFVFPNPETGFDPKEIDLMNPGNYSIISPNLFRVQKIATKYYVFRHHLETTVDDSSVLRDTTWKRIQNCNGLKGVIKVRINHIGQIVQVGEY

SEQ ID NO: 6739 - protein, 1431 aa, synthetic construct
  REGION 1..1431: note = Synthetic
MKNILGLDLGTTSIGFAHIIEGNTPEQSSIVKIGVRVNPLTTDEQTNFEKGKPVSVNADRTLKRGARRSLDRYQDRRKNLIDALRKANIISAETILAEDGKGTTHSTYAFRANAAITEIPLDAFARVLLAINKKRGYKSSRKAKSEDEGQAIDGMAIAKRLYEGNLTPGQLAFQLLKDGKKAIPDFYRSDLQAEFDKVWDCQKQFYPEIFTDEFKKELIGKGQRATSASFWGKHKFNTAENKGTREDKKINAYQWRAKAVDKQLLKEEAAYVITEINSNLSNSSGYLGAISDRSKELYFNKETVGQYLYKQLQQNPHTKLKNQVFYRQDYMDEFEKIWETQARFHKELTQEVKTEIRDIIIFYQRKLKSQKGLISFCEFESKGIEIEKNGQKVKKTIGLRVAPKSSPLFQEFKIWQVLNNVLIRKKGSEKRVVKEKKSAGLLEEQKEVFPFDLQTKQLLFEELNIKGNLKSNKIIELLGYNAKDWEINYTELEGNRTAKALYDAYFRILEQEGYDEDLLKLSDKDEINIAELKTSAVAIKEMVSRIFEILKINTEILEFNAELDGKAFEQQASYQLWHLLYSYEGDDSASGNEKLYELLKKKFGFKKEHAQILANVALSDDYGNLSSKAMRNIYPHIKEQTYDKAAAIAGYRHSASSLTKEEIANRPLSNKLELLKKNSLRNPVVEKILNQVVNVVNTIIETNSEKDADGNIIKHFRFDEIRIELARDLKKNAKERAEMTTNINAAKIAHDKIFKLLQNEFGIPNPTRNDIIRYKLYEELKNNGYKDLYSNTYIPREILFSKQIDIDHIIPQAKMFDDSFSNKTVVFRHDNLDKGNKTAFDYIESKFGMEKAEEFVQRAKTLFDLAVKSKEEGISKSKFQKLQKRESEIGDGFIERDLRDSQYIAKKAKNMLYEICRIVTPTTGSITDRLREDWDLINIMQELNFDKFKKLGLTEMVEKRDGSFKERITDWSKRNDHRHHAMDALTVAFTKHSHIQFLNFLNARRNEIHQEHSNIIAIETKETELVTDKEGNKKRKFKLPIPNFREQAKEHLENVLVSHKAKNKVVTKNKNKTKLKNGEKVKIELTPRGQLHKETIYGKYQYYVNKEETVGGKMDETNIKKVSNPLFKNLLLRRLQENGNDAKKAFTGKNALSKNPIYLDEAQTEILPEKVNLTWLEEDYSIRKDVTPDNFKDAKSIEKVLDKKVKYILLARLKEHSNDSKKAFSDLEKKPIWLNETKGIAIKRVTISGIKNAESLHYKKDHLGNDILDEKGNKISSSFVSTSNNHHVAIYTDEKGSLQERVVSLFDAIQLVNAGEPVIDKTFNQGMGWQFLFTMKQNEYFVFPNDKTAFNPKEIDLFDPKNKKLISPNLFRVQKIASKNYFFRHHLETTVEEKKELNGIAFKPQLGLNAISEMIKVRLNHLGDIVKVGEY

SEQ ID NO: 6740 - protein, 1378 aa, synthetic construct
  REGION 1..1378: note = Synthetic
MKKILGLDLGTNSIGWALVNEAVNNDERSSIIKLGVRVNPLTVDELTNFEKGKSITTNADRTLKRSMRRNLQRYKLRKENLIEILKEQDFIKSDTKLYEDGNKTTFETYRLRARSAKEEVNLEQLARILLMINGKRGYKSSRKAKSQDEGQLIDGMEIAKRLYNENITPGQLVYTLLKEGKKYIPDFYRSDLQAEFDKIWEVQKQFHSEILADEFKNQIKGKGKQSTAKIFLAKHGIFTAENKGLDKKIYAYKLRTDALANQLTKEELAFVISDLNGIISSSSGYLGSISDRSKELYFNKQTVGQYLMAQLDRDSHARLKNQVFYRQDYLDEFNTIWETQAKFHKELTYELKEEIRDVIIFFQRRLKSQKGLISICEFENKQIEVKIEGKNKIKTIGSKVCPKSSPLFQEFKIWQVLNNIQVVDKAGSKRFLLQEEKETLNKELQFKNKISKSDALKLLFENYKDLDFNFKDIEGNRTQAALFIAYQNIIELSGHGEYDFSKMKADEIIEIVTSIFKGLGFNTDILFFNSDLEGILFEKQPMYQFWHLLYSFEGDDSNTGNEKLLSKITELYGFEKEYAIFLSNISFQPDYGSLSTKAIRKILPYLKEGNEYSIACEYAGYRHSQSSLTKEEIDNKVLKNKLELLPKNSLRNPVVEKILNQMINVVNAAIDAYGKPDEIRIELARELKKSAEERENATNAINKATIEHEGYRAILKKEFGLTSVSRNDIIRYKLYLELGNRGFQTLYSNTYIAPNKLFTKEFDIEHIIPQSRLFDDSFSNKTLETRSVNIEKGNETAIDYVSAKHGEIGVLDYLNRIEELFKSGKISKTKYNKLKMKGADIPSDFINRDLRDTQYIAKKAKNILEELVKDVVSTTGSITDRLRDDWQLVDVMQELNWEKYDKLGMTEVIENREGHKIRRIKDWTKRNDHRHHAMDALTIAFTKRSHIQYLNNLNARSDKSGSIYGIETKELYRDDKGKLRFKPPIPLNDFRAEAKKQLENTLISIKAKNKVATININTTKKESGYNKKKQLTPRGQLHLETIYGSISQYITREEKIGSNFNEEQILKVAKKSYREALIKRLKQYDDDPKIAFTGKNSLDKNPIFLDPLQTQKVPDKVKTVTTETIYTIRKDVSPDLKIEKVVDSKIRSILTDRLRENNGDSKKAFSNLDENPIWLNKEKGIAIKKVSISGITNAEALHEKKDRDGNLVVDNYGKHKPVDFVNTGSNHHVAIYRDKNGELYENVISFFEATERINQGLPAIDKSFGASDGWEFLFSMKQNEYFVFPNEKTGFNPKEIDLLSQNNYHLISSNLFRVQKISTKNYVFNHHLETTAVTGETLKNKKQLIGITHIFIQSLPPLKNIIKVRINHIGQIVFVGEY

SEQ ID NO: 6741 - protein, 1356 aa, synthetic construct
  REGION 1..1356: note = Synthetic
MKKILGLDLGTTSIGWALVNEAENAEEKSSIIRLGVRVNPLTTDEQTNFEKGKPITTNADRTLKRSMRRNLQRYKLRRETLIQILKAQGWINDETILSEQGNFSTFQTYRLRAKAATEEVSLEEFARVLLMINKKRGYKSSRKAKSDDEGKLIDGMDVARQMYDQDLTPGQYGYHLLTTGRNYVPEFYNSDLAAELEKIWNYQSTFYPEILTPDFRVQISRQGEKNTAKIFQDKYNIYPADIKGSHVEKLTLIYKLRHEALQKQLSQEELALVISKVNGQANGSSGYLGAISDRSKELYFKHQTIGQNLIEKLDSNPHQSLKNKPYYRQDYLDEFERLWETQAQFHHELTPELKHEIRDIVIFYQRRLKSQKWLLSTCEFENRKVCPKSSPLFQEFKSLQIINNLEVSCPDEKRHLTEEERNALFFELTYKEKLTKAEVLKLLFAKPRELDLNFEDVAGNRTMAAILKACQDVISMSGHGEYDFSKGKAVDNVNTIKTIFKGLGFSTNWLEFNSDKTGADLDREPLYRLWHLLYSYEGDNSSTGIEHLVEHLMAMLNMPKEYAHVFASIAFEDDYGSLSAKALQKILPFMKEGHEYSEACSLAGYRHSKDSLAREELDSRVLKDHLDLLPRNSLRNPVVEKILNQMVNVVNGVIDEYGKPDEVRIELARELKKSAAERKDLTKIISANTKEQEECTKILQQEFGLTHVSRNDIIRYRLYQELAKNGYKALYSNTYIPREKIFSKEIDIEHIIPQSRLFDDSFSNKTLEYRNINIEKGNATALDFVQTKYGDKYLTEYKARVEDLLKQGAISKAKAKKLLMSQTDIPDDFIERDLRNSQYISRKAQEMLREVARTVSATTGSITDRLREDWQIVNVMQELNWGKYDHQGLTEIIEGRDGQHIRRIKDWTKRNDHRHHAMDALTIAFTKPSYIQYLNNLNARDNKQGVIVNIEKKELYIDADHHRRFLPPILPIEDFRQEAKRHLEMILVSTKAKNKVVTKNINTTNARAGQHKKVQLTPRGQLHKESVCSMMKVSVIKEIPVGAKMDFEMIAKVKNPVYRQALTTRLNAFGGDAKKAFTGKNSMAKNPIWLDDIHSRCVPEKVKVEEFDTQYVIRKPINKDINLDKVVDPKVKQILEERLNRFGGDKIKAFSNLDDNPIWLDQAHGICIKSVRCKLYDAATPLHDKRDKDGNLILDADGKPQPVDFVSTGNNHHVAIFLDKDGNLQEHIVSFFEATSRAIQGYPIIDKEYRKDAGWQFLFSMKQNEYFVFANPATGFDPNEIDLLDEKNYARISPNLYRVQKLTTKDYFFRHHLETTVEDIKELRGITYKRIGLSGLVGIVKVRINHLGKIVQVGEY

SEQ ID NO: 6742 - protein, 1380 aa, synthetic construct
  REGION 1..1380: note = Synthetic
MKRILGIDLGTTSIGWAYVLEAEAANEQSEIVRLGVRVVPLSVDEETNFEKGKSITTNADRAARKSMRRNIDRYQMRRDELIAVMREEGWITEETTLSEHGTRSTFESLRLRAEAVEKEVTLAQLARILLQINKKRGYKSNRKADSQEEGPVIDGMDVSKQLCERSMTPGQWVYERMQRGKMTVPAFFRSDLQQELDHIWTLQHAYHSAWMTDELRVALTQADSRRAQQLMDAHGVIPETVKGKERRQILYGWRSAAAMGGLPAAQLAAVLIQIVRDINASSGYLGQIGDRSKELYFRHETVGQYMWRHIQANPHESLKTLVFYRKDYQNEFDALWASQARFHPELTERLRKRLRHILFFQRPLKSKKGLVNRCELVHYSIPENAADGGGKRRDVGPKVCPKSSPLFQEFRMWQVLNNLMLIHVPTQEVRPLADEEKEMLAAELCYRVRMKKNDVLKLLCDHWREWDLNYKELEGNRTLAAFYKVYEQVIAQTGHGEYDFEKMRAAKVRELVGGVFGGLGFEMGLLSFDAELDGLAYEQQPLYRLWHLLYSYEGDSSATGDKCLLKRLCALTKMDEDVARLFLTVHFEDDYGSLSTKAMRRILPFLKKGYMYDVACEQAGYCHSVRSRTREELDKRTYKDRLDLLPSKSLHNPVVEKILNQMIHVVNGVTSAYGKPDEIRIEMARELKSYAAERERRTASIAKATKENAEIEKILRQEFGLSYVSRNDIVRYKLYEELKENDYKTLYSNTDIPKEELFSKAFDIEHIIPQARLFDDSFSNKTLEARQVNIEKKDRTAWDFVNDCYGSEGAALYRCRVDELFNKGIISKDKHKYLLMPGDKIPEDFINRDLRNTQYIVRKALELFEDFVPSVLATSGAITSRLREDWGLVNVMKEMNLPKYERQGVVETCSDREGHVFKRIQDWTKRNDHRHHAMDALTIAFTKRAYIQYLNHLNARKDVTSQAYAIQQKEMECDGDHRWRFKCPFGDRSRFRREAMRQLDQILVSIKSKNKVLTPSLNRSKKRGGYNRKIEWTPRGPLHKKRTVYGRIRRYVTKNVRVGSSFTQAEIEKVANTCFRRALLARLAEFGGDPKKAFTGKNSLEKNPLYCDEAHTQTVPLLVKLVELEEVGTIRKEITPDLNVEKVVDRRIRTLLEERLALYGQDAKKAFSNLGENPIWLNQEKGISVKRVTIIDKSDVVSIHEKRDVDGRLMHDEHGRTIPCDYVQTQNNHHVAIFCDAEGNLQEHIETFFDVVERVRQQRIEGRTVEVIDKNYKRDEGWQFLFSMKINEYFVFPDEKTGFDPRSVDLMDPANYALVSPHLFRVQNLSSKDYYFRHHLETTVENTKALKDVTWKRINTLEKLKNIVKVRVNHIGQIVAVGEY

SEQ ID NO: 6743 - protein, 1354 aa, synthetic construct
  REGION 1..1354: note = Synthetic
MKKVLGLDLGVTSIGWALVNEAETSEEKSSIIDVGVRVNPLSSDERDNFNKGAAITTNAERTLKRGMRRSLQRYKLRRKVLKEILLKNGIIKKDTVLHESGTNTTHQTLGLRAKAATERIELEEFARVLLAINKKRGYKSNRKAKGGDEGTLIDGMEVAKLLHERSITPGQYVLELIQAGKKNLPEFYASDLQSEFDQIWEKQKPFHPEMLLDDFKQQLQGKSKRQTSSIFLGRFEVFTAENKATDKRLQAYTWRTDALKIELPIEEVAFVLGEINGQINASSEYLGAIGDRSKELHFNKQTVGQYLYELVQRDFHNSLANRVFYRQDYFDEFNKIWDVQAQFHTELTKELKKEIRDVVIFYQRRLKSQKGLISLCEFESRSIEIKKDGVIKKKNVGPRVAPRSSPIFQEFKTWQTINHIVLSEPGQESRSLEEDERLALFEELSIRKSMKISHVRKALGLSNKVQMNFPELDGNQTAFELIEAYLQIVNFSGHGELKASSYKANHIIETISNVFEGLGINTGILKFDSSLNSKDIENQPYYRLWHLLYSYEGDNSRTGIDSLLVKLKEDFGFEPEYGRIIAQVAFKNDYASLSARAMKKILPYLQGGNIFSEACEYAGYKHSKDSLTKEEIANKVYLDKLEILPKNSLRNPVVEKILNQMVHVVNGVIDEYGKPDEVRIELARELKHSAAERELMTKGIASATRENNEIREKLQAEPFNLQYVSRNDIIRYKLYEELKDRGYKTLYSDTYISENSLFSKKFDVEHIIPQSKLFDDSFSNKTLELREVNLEKSNDTAHDYILKKYGEEGLEQYFRRVEDLHRGGAIGRAKLNKLKMSGANIPQDFIERDLRNTQFIAKKALSMFRDLVPSTVATTGQITARLREDWGLMNILQELNWEKYRDLDMVKSFKNRAGHEVRRIENWNKRSDHRHHAMDALTVAFTNRRYVQYLNNLSAKSDRSGEIFGIEQKITYKNANNNRLFVSPMENFRTEAKKHLENVLASIKSKNKVVTRNTNITKRKGGVNKKVQLTPRGQLHKETVYGSIKQPVVKMEKIGGKFDAEKIATVCSPRYREALLKRLNEFDNAPKKAFTGKNSLAKNPIWIDKEKKIAVPAEVKTQVYKTVYTIRKPVNKDLNVNQIIDPHIKKIISAHIEKHNKDALNNLDENPIWQDKAKTIPIKNVTVKGISTALSLRTNNQGKAIDFVSSGNNHHVAIYRDDKGNLQENVVSLYEAVQRSIRKEAIIDKTLNADLGWEFQFTMKNNEYFVFPNSELDFDPSKIDLLDPDNYAKISPHLFRVQKLTKGDYYFRHHLETSVEGNRSLIGVTWKRLSKVGIKGIIKVRINHIGKIVTVGEY

SEQ ID NO: 6744 - protein, 907 aa, synthetic construct
  REGION 1..907: note = Synthetic
LNYKEIQGNATISAIFDAFKEIILQSGHDNNNFNKASFKDTMLIIEPIFKMLGINTDILSLDCPTDSHSLKTCPIYQLWHLLYSYAGDNSKTGDSSLIKKLQRRYGFSKEYASIMSKISFDNDYGNLSAKAIMRILPHLRNGLQYSDACNAAGYNHSKRSLTKQDILNKVLVSQIDLLPRNSLRQPVVEKILNQLINITNALISTYGNPDEIRIELARELKKSADERAKLNSANNANEKENNSIRELLQERFGIQNPSRNDIVRYKLYKELEHTGFKTLYSQSLITDDILFSKEIEIEHIIPQARLFDDSLSNKTLEFHNINQNKSNQTAYDYILSEFGEDYAVQYKKRIDDLLKNGKISRTKHKYLLMSETEIPTDFINRDIRETQYISRKAMEILEPATRKVVASSGAITARLREDWQLVDVMKELNWEKYKALNLTETIQDKDGRRIYKIKDWTKRNDHRHHAMDALTVAFTKPSFIQFLNNLNARSDKGNAIYAIQQKELHRNKDGKLCFNPPLPLDEFRAEAKRQLNDIFVSHKAKNKVATRNSYMTKNGKGTKIVELTPRGQLFNETTYGCVKQYETKLESVNSSFDTDKIMTVADKSYRQALMKRIEEFDGNASLAFSRKNSITKNPIYVDDSHSDTVPVKVKTVVPKPVFTQRIAVDIKLDKTKIAQILDAKIRRILTDRFYEFGEDPQKAFSNIDENPIWLNKEKGIAIKKVTIKTGISGVPIRHKRNNMGRPILNSDGNKIPSDFVVPGNNHHIAIYKDADGNIKEQAVPFYIATNRVIHKQPAVDRNFNADKGWKFLFSIKKNEYFVFPNEKTGFNPAEIDLLNPDNNKIISPNLFRVQKISSSNYYFRHHLETTVDANNALNGTTWKHVQSLKALENIIKVRVNNIGQIVAVGEY

SEQ ID NO: 6745 - protein, 1388 aa, synthetic construct
  REGION 1..1388: note = Synthetic
MKKILGLDLGTNSIGWALVNEANDEKEKSSIIKLGVRVNPLTVDELTNFERGKSITTNANRTLKRSMRRNLQRYKLRREELIKILKEYGFIDDETILSENGNIRTFETYRLRSKAVNEKISLEEFGRVLLMINKKRGYKSSRKVKSQDEGQLIDGMEIAKKLYNENITPGQLVLQILRGGKKYIPDFYRSDLQAEFDKIWEFQKPFHPEILIDDFKTQISGKGKLNTSKNFLGRFGIYTSDNKGVEKRLHAFQWRVDALNKQLSKEELAFVISDLNGIISSSSGYLGSISDRSKELYFNKQTVGQYLMAQLDKNSHASLKNQVFYRQDYLDEFNTIWENQAQYHKELTPGLKKDMREIIIFYQRRLKSQKGLISFCEFESRQISVNIDGKKKVKTIGSKVCPKSSPLFQEFKIWQVLNNILVNDKTSGSKWFLEQEAKDLLFAELCLKSKMSKLDVLKLLFRNYKDLDLNFKEIEGNRTQAALFEAYRKIIELSGHGEYDFSKMPAHEIISTVKTVFEALKYNTDILSFNSGLEGKELEKQAMYQMWHLLYSFEGDGSKTGNENLIIKISDLYGFEKEYAIILANVILQPDYSSLSAKAIRKILPYLIDGFAYGGRNERPEEPSACEYAGYRHSKNSLTKKEIENKVLKDILDILPKNSLRNPVVEKILNQMINVVNTVVKTYGKPDEIRIELARELKKSAKEREALAASIGKTTAENEEYRTKLHNEFGLTQVSRNDIIRYKLYLELEQRGYKTLYSNTYIPKEKLFGKEFDIEHIIPQSRLFDDSFSNKILESHSINIEKGNDTAYDYILAKEGNDGLTDYLIRIEDLFKDGKISKTKYNKLKMKVDDIPDDFIARDLRDTQYIAIKAKTILEEIVREVVSTSGSITDRLREDWQLIDVMQELNWDKYNALGMAEIIENREGHKIRRIKDWTKRNDHRHHAMDALTIAFTKRNYIQYLNNLNARSDKAGSIYGIETKELYLDDKGKLKFKPPMPLNDFRAVAKKHLEETLISIKAKNKVTTININVSDKKDGTNRKRQLTPRGQLHLETVYGSIQQYVTKEEKVGGTFNEELIAKVAKKCYRVALLNRLKEFHNDPKKAFTGNNSLKKNPLYSDKLKTQEVPEKVKIVSSETIYTIRKDISPDFKIEKVVDEKVKVVLQNRLNEFNGDSKKAFSNLDENPIWLNKEKGIAIKRVTIKGISNAVALHEKKDKEGKLILDNESRTQPVDFVNTGNNHHVAIYKDEHGNLQENVISFFEATTRVNQSLTVIDKDYKKSEGWEFLFSIKQNEYFVFPNEKTGFNPIEIDLLDAEHYHLISPNLFRVQKISSKNYVFNHHLETKAVDGELLKSKKSLSGITYNFIQTPSKLEGIVKVRINHIGQIISVGEY

SEQ ID NO: 6746 - protein, 1379 aa, synthetic construct
  REGION 1..1379: note = Synthetic
MKKILGLDLGTTSIGWAMVNEAENDNEISSIIKLGTRVNPLTVDELTNFEKGKSITTNADRTLKRSMRRNLQRFKLRKENLIEILLKSKIIKDETILSEHGNRSTFETYRLRAKSASEEISLEQFARVLLMINKKRGYKSSRKAKSQDGGQLIDGMEVAKKLYDEGITPGQLVLQLLKEKKKYIPDFYRSDLQAEFDRIWSFQKQFYPDLLVEDFKTQIAGKGKLITSKIFLGRFGIYTAECKGLDKKIQAYHWRVEALFKEVPKEVLAFVISDLNGIISSSSGYLGSISDRSKELFFKKLTVGQYLMVQLKQNPNTRLKNQVFYRQDYLDEFNTIWEKQSKFHPELTSELKSEIRDVIIFYQRRLKSQKGLISFCEFESRQIEVDIEGKKKLKTVGSKVCPKSSPLFQEFKIWQILNNIQVNVKTNKEKRFLEQEEKVILFSELSLKTKISKVDALNLLFKNANELDLNFKEIEGNRTQAAFFEAYRKIIELSGHGEYDFAKMRSAEAYKTVHDIFEGLQFNTEILSFNSDVDGSDFEKQAQYQLWHLIYSFEGDDSNTGDEKLIHKISELYGFQKEYARIIANVVLQPDYGSLSTKAIRKILPYLKEGSEYSVACEYAGYKHSKTSLTKEEIDNKVLKDKLEILPKNSLRNPVVEKILNQMINVVNAAVESFGKPDEIRIELARELKKNAKEREELTASIGETTILHEKYKAILRKDFGLTHVSRNDIIRYKLYLELEGRGFQTFYSNTYIAPNKLFSKEFDIEHIIPQARLFDDSFSNKTIEARSINIEKKDETAFDYVHNKYGEVGLAEYQNRIEEAYKAGKISKTKLSKLKMKGIDIPTDFINRDLRDTQYIAKKAKSILEELSRNVISTTGSITDRLREDWQLVDVMQELNWDKYFALGMTEFIENRDGQKIRRIKDWTKRNDHRHHAMDALTIAFTKQSHIQYLNNLNARSDKAGSIYGIEQKELNRDEKGKLKFKPPMPLDDFRAEAKRHLENTLISIKAKNKVATININITDKKGGTNKKRQLTPRGQLHLETVYGSIKQYVTKEEKVGSSFNEEQIAKVAKANIRLALLNRLKEFDNDPKRAFTGKNSLEKNPIYLDVDQTFKVPEKVKIVFAETIYTIRKDVSPDLRLDKVVDKKIKSILEARLDEFKGDAKKAFSNLDENPIWLNKEKGISIKRVTITGISNAEALHSKRDKEGNLLFDENGNTIPVDFVNTGSNHHVAIYRDKKGNLQENVISFFEATERINQGLPIIDKGFKSEEGWQFMFSMKQNEYFVFPNEKSGFNPSEIDLLDSEMYNLISPNLFRVQSISSKYYIFNHQYETRNADGNLFKTKKQMAGITYNFLRTPDSLQGIVKVRINHIGQIVSVGEY

SEQ ID NO: 6747 - protein, 1366 aa, synthetic construct
  REGION 1..1366: note = Synthetic
MKRILGLDLGTNSIGWAVVNEAESVDEVSSIVKLGVRVNPLTVDEMTNFEKGKSITTNADRTLKRSARRNLQRYKSRRDNLIEILKENNLISDSTILSENGNKSTFETYRLRAKSAREKISLEEFARVLLMINKKRGYRSSRKAKSSDEGTLIDGMEIAKQLYNEKQTPGQYMLGLLEKGKNYSPDFYKSDLQNEFDRIWDEQKKYHQDILTDEFKAQIAGKGKQNTSKIFLAKYNIYTADNKGKDKKLQACKWRVNALGREVSQDVLAYIISDLNGIINNSSGYLGAISDRSKELYFGNLTVGEYLMSKIDENPHFSTKNVVFYRQDYLDEFEKIWEMQAQFHPELTKDLKHEIRDIIIFYQRALKSQKGLVSICEFENKEIEIEVDGKIKKKTIGCKVCPKSSPIFQNFKIWQILNNLEVKGKINRSLYEEEKTLLFKELSYKSKISESDAIKLLFSDTKGLSLNFKSIEGNKTQASLFKAYERIIEMSGHGEYDFEKMDSNKAVQLVHEIFETLGFNTDILYYNVSLDDKEIEKQPLYQLWHLLYSYEGDKSNTGLDSLINIIHSKYGFDKEYAKIIANVSFQDDYGSLSAKAIKKIMPHLVAGNEYSQACELAGYRHSKNSLTKEEIESKVLQDKLQELPKNSLRNPVVEKILNQMVNVVNASIDAYGKPDEIRIEMARELKKSAKEREKNTENISKATKEYEDYRKILQQEFGFTHISRNDIVRYRLYKELEPRGYRTLYSNTYIPKDQLFSKSFDIEHIIPQARLFDDSFSNKTLEARDINIEKGNSTAYDYVLEKYGEDKIAEYETAVNDLFKGGASESKRKKLLMKGSDIGEGFIARDLRDTQYIAKKAKEILGSIVRTVTSTTGSVTDRLREDWQLIDTMQELNWDKYDKLGLTEIIEGRDGQRIRRIKDWTKRNDHRHHAMDALTIAFTKPSHIQYLNNLNARSDKNSVIYAIENKELERDKNNKLRFKAPMEHFRAEAKKHIEEILVSIKAKNKVTTRNINKTKKSGEVNKKVQLTPRGQLHLETVYGKSLRYNPKIEKVGSGFTAEYIANVASKIEREALLARLMEYGGDPKKAFTGKNSLDKNPIYLNADKTFAVPVKVKVVTLEDVYTIRKDITPDLKIDKVLDKGVKTILEKRLAEFNGDAKKAFSNLDENPIYLNKEKGITIKRVTISGISNAVALHDKKDKEGNFILDKNGNRIPVDFVNTGNNHHVAVYRDADGNLQENVVSFYEATCRACQGDPVIDTNYKANEGWKFLFTMKQNEYFVFPNKETGFNPNDIDLLNPDNYALISQNLFRVQKLATKDYFFRHHLETNVENVTALKNITWIRCGLSGITNIVKVRINHIGQIMAVGEY

SEQ ID NO: 6748 - protein, 964 aa, synthetic construct
  REGION 1..964: note = Synthetic
MKRILGLDLGTNSIGWALVNEAENKDERSSIVKLGVRVNPLTVDELTNFEKGKSITTNADRTLKRGMRRNLQRYKLRRETLTEVLKEHKLITEDTILSENGNRTTFETYRLRAKAVTEEISLEEFARVLLMINKKRGYKSSRKAKGVEEGTLIDGMDIARELYNNNLTPGELCLQLLDAGKKFLPDFYRSDLQNELDRIWEKQKEYYPEILTDVLKEELRGKKRDAVWAICAKYFVWKENYTEWNKEKGKTEQQEREHKLEGIYSKRKRDEAKRENLQWRVNGLKEKLSLEQLVIVFQEMNTQINNSSGYLGAISDRSKELYFNKQTVGQYQMEMLDKNPNASLRNMVFYRQDYLDEFNMLWEKQAVYHKELTEELKKEIRDIIIFYQRRLKSQKGLIGFCEFESRQIEVDIDGKKKIKTVGNRVISRSSPLFQEFKIWQILNNIEVTVVGKKRKRRKLKENYSALFEELNDAEQLELNGSRRLCQEEKELLAQELFIRDKMTKSEVLKLLFDNPQELDLNFKTIDGNKTGYALFQAYSKMIEMSGHEPVDFKKPVEKVVEYIKAVFDLLNWNTDILGFNSNEELDNQSYYKLWHLLYSFEGDNTPTGNGRLIQKMTELYGFEKEYATILANVSFQDDYGSLSAKAIHKILPHLKEGNRYDVACVYAGYRHSESSLTREEIANKVLKDRLMLLPKNSLHNPVVEKILNQMVNVINVIIDIYGKPDEIRVELARELKKNAKEREELTKSIAQTTKAHEEYKTLLQTEFGLTNVSRTDILRYKLYKELESCGYKTLYSNTYISREKLFSKEFDIEHIIPQARLFDDSFSNKTLEARSVNIEKGNKTAYDFVKEKFGESGADNSLEHYLNNIEDLFKSGKISKTKYNKLKMAEQDIPDGFIERDLRNTQYIAKKALSMLNEISHRVVATSGSVTDKLREDWQLIDVMKELNWEKYKALGLVEYFEGK

SEQ ID NO: 6749 - protein, 1391 aa, synthetic construct
  REGION 1..1391: note = Synthetic
MKKILGLDLGTSSIGWALVNEAEDDIQKSSIIKLGVRVNPLTVDELSNFERGKSITTTADRTLKRSMRRNLQRYKLRRTSLIKILKDNNLISEEAILSESGNFSTFETYRLRAKGVEEEITLEQFARVLLMINKKRGYKSSRKARSQEEGQLIDGMSIAKQLYDENLTPGQLCLQILQSGKKYLPDFYRSDLQNEFNRIWDSQKYYYPEILTDELREKLVNRNDKATWAICEKPMKLIGIKRESKGRDIRLENFKWRVEALSSKVDLEHVAIALQKINGQISSSSGYLGSISDRSKELYFRNQTVGQYLMDQLKSNPNISLKNQVFYGQDYLDEFNILWEKQAQFHKELTEGLKSKIRDVVIFYQRRLKSQKGLISFCEFESSRVEIETEGKKRVITIGSRVIPRSSPLFQEFKIWQGLNNLEVFSKGQSSRKSASSRTVSAHREGDVRRSLDQEEKLLLFRELSVRDKLNKATILKMLFDNHNELDLNCSELDGNKTSAAFFRAFNEITEVSGHVKIDFDKLNADEIVSSIDLVLDTLGCNPGILHFDSDVEPDKQMFYRLWHLLYSYEGDDSNTGIDGLIDKISTLSGLKREYARILTGITFTDDYGNLSAKAIRKILPYLKTGNRYDLACEYAGYRHSKSSLTSEEIASKVLKDKLMILPKNSLRNPVVEKILNQMINVINAIIEEYGKPDEIRIELARELKKNASEREKMTKMINETTLAHEKIKKIIQDEFKLSHVSRNDIIRYKLYQELETNGFKTLYSDTYIPREKIFSKEFDIEHIIPQARLFDDSFSNKTLERRDINLEKGDKTASDFIRDKWGESGLQAFQDKIERIQNQNGQGISKAKYSKLKMSEGDIPDGFIERDLRNTQYISRKALGLLGEIVRTVVPTTGSITDQLREDWQLVDVMKELNWEKYKALGLAEYLVDKDGRQIRRIKDWTKRNDHRHHAMDALTIAFTKPVYIQYFNNVNARYDKGSEAYRIEQKYFSERKVIPPIPVDEFRAEAKKHLDEVLVSIKAKNKVVTKNTNVIKIKKRECPQSQLTPRGQLHLETVFGSNRVPVVREIRVGGTLNEEIIRLVTKPKFRDALLRRLAEYNHDPKKAFTGRNSLEKQPLYIDELHTKRVPEKVKIITFEPVYTIRKQIAPDLNIDKVIDSKIRSLLQERVSVYGDAKKAFSNLDEDPIWLNKQKGISIKRVSITGINNAQALHEKKDKEGRLITDSEGRTMPVDFVNTGNNHHVAIYRDANGDLQENVVSFFEAVTRANLGQPVIDREYRSSEGWKFLFTMKQNEYFVFPNFKTGFNPNDIDLLDTRNYSRVSPNLFRVQKLSTKNYVFNHHLETTAVTGDTLKFNKQMSGITYRFIQSLPPLEGVVKVRINHIGQIVTVGEY

SEQ ID NO: 6750 - protein, 1003 aa, synthetic construct
  REGION 1..1003: note = Synthetic
MVERILGLDLGVSSIGWALVEEDVKNPENNKIIKLGVRVNPLTIDEKTNFEKGKSITTNAGRTSARSARRNLQRFKLRRKKLLEILIHYKIIKNDAVLAETGKNTTFQTQYLRAKAARERIELDELARVLLLINKKRGYKSNRKVQNDDEGKAIDGLSVAKELYEKNYTPGQYAYDLLKRGKKQIPDFYRSDLQNELDRIWEFQKQYHPDILTDEFKKELEGKGQRATAAIFLNRYKIYTADNKGTREEKKIQAYQWRVETLSQPLDVKEVAYVIAEINNNLNNSSGYLGAISDRSKKLYFNGQTIGEYLFEELSANPHTRLKNQVFYRQDYQDEFEKIWKIQTKFHPELTKELKEQVRDIVIFYQRKLKSQKGLISFCEFESREIEIEENGKRKRKKVGLKVAPKSSPLFQEFKIWQVLNNIEIKNEDERRYLEPEEKELLFNELNCKGNLTSQKCLELLGFKSKDAKLNFKVVEGNRTNEKLYDAFLKILELQGYNVFELLKIKEDKDEAKLSELKASADEIKGMIKEIFNANLINTSILDFNAELEGKDFENQASYQFWHLMYSYEGDNSPSGNEKLYELLEKKFGFKKEHSKILSTIVFSQEYGSLSTKAMRRIYPYIKDNKYSEACLLAGYNHSKHSLTKEELENRKLKEQLEVLPKNSLRNPVVEKILNQMINLVNATISEYGKLDGVRIELARELKKSAQEREDMAKSINEATLLHQKYATILKQEFGVVNPSRNDIIRYKLYMELTVNGYKDLYTNTKIEKENLFTDKYDIDHIIPQSRFFDDSFSNKVLVPRQSNLDKGNLTAYDFMSNKGSEREEHFLNVIKELLDKGSISKAKYEKLKKKGLEIGDGFIERDLRDTQYIAKKAKEILFEITNSVVTTSGRITDKLRKDWDLVNIMKELNLDNYRRLGLTEIVRNSKGEEKELIPDWTKRNDHRHHAMDALTVAFTTRNHIQYLNYLNARKDEKHKEHQNIYAIENIITEVIEKKKWFKDQEI

SEQ ID NO: 6751 - protein, 1455 aa, synthetic construct
  REGION 1..1455: note = Synthetic
MFSQRNNPYCELLLLTQRYYKTLNKKTMSKKILGLDLGTTSIGWAYVVESQNPEHSEIIQIGARVNPLTTDEQTNFEKGKPITINADRTLKRGARRNLDRFQLRRKHLIEVLTKAKIISKETVLAEDGKNTTFETWQLRSIAAKEKIEKIELARVLLAINKKRGYKSSRKAKNEDEGQAIDGMAIAIRLYEDNLTPGQLVLQLLMGGKKHIPDFYRSDLQMEFDKIWHFQKQFYPDIFTDEFYKELQGKGQRATATAFWAKYKFNTAENKSKSRDGKKFQAYKWRNDALSIKLEVEEVAYVITEINNNLNNSSGYLGAISDRSKALFFKKETVGQNLYNQLLENPHTRLKSQVFYRQDYLDEFESIWAEQSKHHAELTPQLKTEIRDIVIFYQRKLKSQKGLISLCEFESYNKIINGKTQTIGQRVIPKSSPLFQEFKIWQILNNVEVKKKGNKIITKKNQTSLFDDNNETFIFDLETKQRLFEELNLKGNLSANKIIEILEHKPAEWELNYTQIEGNNTNKILYNAFLDILEYEGYDVKDLLGVKLNKDEVDLDDLDLPASIIKNQVKLIFETLKINTEILEFDAGLNGSHFEQQAAYQLWHLLYSYEGDDSPSGNEKLYELLAKKFGFKREHARILANISFSNDYGNLSAKAIKKIFTYIKDNNYSTACELAGYRHSASSLTKEEIDNRPLKNTLEILKKNSLRNPVVEKILNQMVNLVNCLIEKYSSKDEFGNIIEYFKFDEIRIELARELKKNAKERAEMTTNINASKIVHENIFKILQSEFGIKNPSRNDIIRYKLYEELKNNGYKDLYTNTYIPKEILFSKQIDIDHIIPQSKMFDDSFSNKTVVYRQVNLDKGNQTAYEYIESKFGNHQLEEYTDRIEKMFKLGKDEGITKAKYQKLLKQEKDIGEGFIERDLRDSQYIAKKAKNMLLEISRAVVSTSGNITDRLREDWGLINIMQELNFDKFKTLGLTEKIEKKDGSFKERIIDWTKRNDHRHHAMDALTVAFTKHNYIQYLNYLNARKDVRHKLHNNIIGIENLETELKINDQGQKIRVFKTPIPHFRQVAKEHLENVLVSHKAKNKVVTKNKNIIKSKNGVNTRIELTPRGHLHKETVYGKYQYYVNKEEKIGTKFDFDTIQKITNPLYKSLLLKRLVDHDNDPKKAFGGKNSFTKNPIYLNDNKSTIMPEVVKLRWLEEDYSIRKDVTPDNFKDAKSIEKVLDQSIKKILLARFAAYGNDAKKAFSDLEKNPIWLNESKGIAIKRVTISGVKNAEFLHYKKDHFGNEILDENGKPIPVDFVSTGNNHHVAIYRDESGKLQERVVSLFDSVQLVNAGEPVIDKTFNQGLGWQFLFSIKQNEYFVFPNEKSGFDPNQLDLLDPQNKKLISPNLFRVQKFGSLLSGFWFRHHLETSVEVNNATKGITYKVIQSVSNLEHVYKVRLNHLGDIIHIGEQ

SEQ ID NO: 6752 - protein, 1373 aa, synthetic construct
  REGION 1..1373: note = Synthetic
MKKILGLDLGISSIGWALVTEAENENEKSSIVKVGVRVNPLTVDEQTNFEKGKSITTNANRTLKRTARRNLQRYKLRRENLIECLLKNGIITEHTILHESGSGSTFETYRLRAKAAREEVTLEEFGRILLMINKKRGYRSCRKAKSSDEGQLIDGMAVARRLYDENITPAQLVLSLLQSEKKYIPAFYRSDLEKERERIWNFQRAFYPNVLTVSLKEKLEGKSFKQSSVIFHQECGFYTADDKGKDKRLQRYQRRVSALEFQLPIDEVAAAICDLNGAIGNASGYLGAISDRSKELYFNKQTVGQFLMSELDKNPHYSLKNQVFYRTDYLNEFETIWSVQAKFHSELTEELKHEIRDIVIFYQRALKSQKGLVGLCEFESQKMQIVRDGKVTTKLVGRKVCPKSSPLFQDFKIWQNINNLVVTDKVTEEKYILTLEDKQRLFEELQLKEKMTKSEVLKFLFLKPKQLDLNYEKVEGNQTMATFYSAYQTIVTMSGHGEYNFSKMPSAEVRVLVHQLFEGLGYHTEYLSYNSTLIGKEYENQPFYQLWHLLYSYEGDQSSTGIDSLVGKLATMFGFEKEYASVLANISFPSDYGSLSAHAMQKILVHMREGNEYSQACSYAGYRHSAQSLSREELEHKELKGKLELLPRNSLRNPVVEKILNQMINVVNEVSDTYGRPDEIRLEMARELKKSAKEREELVSAINKANRENETFRKIIQDEFGISHVSRNDLVRYKLYMELKENGFKTLYSNTYIPREKLFSKEFDIEHIVPQASLFDDSFSNKTLEARAVNIEKSNTTAFDFVKAKYDENELVRYKERVDSLLRTGVISKSKHDKLLMTGEQIPKDFLKRDLRDSQYIARKAREILLDMVRHVNTTTGSVTARLREDWQLVDVMQELNWDKYARLGKVEEWKDRDGRVIKRITDWTKRNDHRHHAMDALTIAFTKPVFVQYLNNLNARSDKSSSIYAIEKTQLHRDKNNKLRFNSPFMPLEEFRQEAKKHLESVLISIKAKNKVITRNINITKVKGGTRMKVQLTPRGQLHNETIYGSVQRYVTKIEKVGANFSKNQIAKVANQKYRKALLNRLEMNGFDAKKAFTGKNSLEKNPLYIDVDQMMQVPARVKTVSLETIYTIRKEVTPDLKLDKVIDVRVRKILEERLAAYVGDAKKAFVNLDEIPIYLNEQCGIAIKRVTILGVANAIALHDKKDSNGKFLLDEKGGKQPVDYVNTSNNHHVAIFRDENGCLQEHIVSFYEAVAAATTGEKVIDHNYNSNLGWKFLFTMKQNEYFVFPNKETGFDPKEIDLLDPENYSHISPNLYRVQKMATRDYFFRHHLETTVDDKNELKEVTWKRCGLNGLEGVVKVRVNHLGEIVYVGEY

SEQ ID NO: 6753 - protein, 1375 aa, synthetic construct
  REGION 1..1375: note = Synthetic
MKKVLGLDLGVASVGWAVVNQAEGGDEKSSIVKAGVRIVPLGANEADNFEKGKPCETNVARRTYRSMRRNLQRYKLRKSNLKNVLVENGWIDENTILAEHSNHSTFETYMLRAKAVDEAVSLEEFARILLMINKKRGYKSNRKAGGDEEGQLFDGMSVAKELMNSGLTPGQYGLSLLKSGKKYVPQFYRSDLKDELSRIWNFQKEFHPDILTDEFRSKIEDAGRNEVSKAFYSVYKIYTEDNKGQLRKYRSYEWRSEALEGRLEPAILAYVIADVSGQIKASSGYLAAISDRSKELMSGGMTVGQYLYSHIKADPHFSTRNLVFYRNDYAAEFNRLWETQSGFHPELTPALKDRIRDEIIFYQRRLKSQKNLISVCEFEGRKRTITVEGKEKEVVLGPKVAPKSSLVFQEFKIWQVLNNVVITDKETGEQRYLLPDEMNLLAGELRNREKLSSAEALKLLFRSVRGKDLNFKNLEGNVTFAAFVSKFVEIANLIDDTEYDVKKMSAEDALDLVRKVFEREKFNTAVLDFDALLPKDRFESQPLFKLWHLLYSYEGDDSRTGYESLVAKISSITGMPEEFARMVSSITFKEDYGSLSHKAMRRILPFMKQGHSYSEACQLAGYNHSARSLTREQIDSKELVDRLALLPKNSLHNPVVEKILNQMINVVNSVSDEFGKPDEIHIEFARELKKNQAQRQKMSADIAAREKDNFRIEEILHKSPFGLQYVRKSDILRYRLYEELKENGYKTLYSNKYIPQELLFSNSVDIEHIIPQSVLFDDSFSNKTLEYKDVNIEKGNMTARDYVTSKWGQERYEQYKGTVENLLSNGAISAAKCKNLLKTAEDLPKDFLNRDLVNSQYIAKKAGEILESYVRVVMPTTGAVTAKLREDWQLVDVMKELNIKKYSEAGLTHSEQHGEHRPVEKIDNWTKRQDHRHHAMDALTIAFTKPAHIQYLNYTGDKNDPSSPVYGIRQKETVKIKDNKRIFVPPMPLDELRAAVRKEMESTLVSIKAKNKVVTRNVNRTKKKNGYNTAVTLTPRGQMHKETVYGARSVYEVFYVPVGAKMNAETIAQVASQRERTALEARLAEFGGDPKKAFTGPNSPARKPVFLDAAHSEQIGEKVKCVRLKRVYSVRKNIDATLSVDKVIDSHVRALLKARLEEFGGNAAKAFSNLDENPIWLNKEKGISVKKVTIAENFDLDAIREKRDNRGRKILDDNGQPVASDYVNLRNNHHVAIYRTPGGKYEEKVVSFYEALDRINQGLPVVDKNYRKDEGWVFIFSMKINEMFVFPNAKTGFDPHETDLLNPENYALISPNLFRVQKLSSKYYNFRHHQDTGAEEIKELRDVNWKRIQTVDKMAEAVKVRINNIGQIVAVGEYD

SEQ ID NO: 6754 - protein, 1412 aa, synthetic construct
  REGION 1..1412: note = Synthetic
MFSQRNNPYCELLRIVTTNIAYKNIKLNNMKKILGLDLGTNSIGWALVNESENEDEKSSIIKLGVRVNPLTVDEQTNFEKGKSITTNADRTLKRSMRRNLQRFKLRKDNLIDILKENGFISDETILSENGNKSTFETYRLRAKAASYEISLKQFARVLLMINKKRGYKSSRKAKSQDEGQLIDGMAVAKELYENNLTPGQFVLELLKSGKKTVPDFYRSDLQVEFDKIWNFQKQFNSEILTDEFRVEIEGKGQRASSAIFWKKYNFNTAENKGTREEKKLQAYKWRSEATNKQLTKEEVAFVLAEVNNNLNSSSGYLGSISDRSKELYFNKKTVGQYLMDQLDLNPHSRLKNQVFYRQDYLDEFEAIWETQAKFHSKLTQQLKTEIRDVVVFYQRKLKSQKGLISFCEFESRKIEVEVEGSKKIKTVGSRVCPRSSPIFQEFKIWQVLNNIQVFSKTGGDKRFLDQEEKEVLFKELNFKDKISKNDCIKILFKNQKDLDFNFKENIEGNRTYGAFISAIQQIIDISGHGEFEFSKMNTDEILKVIIPFFDGFGYNLDLLKFNSGSEGEAFEQQAFYQLWHLLYSFEDDNSNTGDKKLIQKIQEKYGFETEYARIIANIALQSDYGSLSTKAIRKILPHLKEGNEFSVACTYAGYRHSKDSLTKEEIENKILKDKLDILPKNSLRNPVVEKILNQMINVVNTAIETYGKPDEIRIELARELKKSAKEREDATKSMNQTTLDHEKYRSTLQNEFGLTHVSRTDIIRYKLYLELESRGFQTLYSNTYIAPNKLFSKEFDIEHIIPQSRLFDDSFSNKTIESRSVNIEKGNETAYDYVKNIKGEYALNEFLKIIEELFKAGKISKTKYNKLKMKGIEIPSDFIARDLRDTQYIAKKAKNILGELVKVVVSTTGSITDRLREDWQLIDVMQELNWEKYNLLGLTEIIENREGHKIKRIKDWTKRNDHRHHAMDALTIAFTKRSHIQYLNNLNARSDKAGSIYGIEQKELERNEKGKLRFKSPILPIEAFRSEAKKHLENTLVSIKAKNKVATININTTTKAHGVNKKKQLTPRGQLHLETVYGSQCKYVTKEEKVNASFTIELISKVANQKIREALLKRLTEFDNDPKKAFTGKNSPDKNPIFLDSLQMQKVPEKVKTVTTEIIYTIRKEISPDLKIEKIVDSRIKKILQARLSEYNGDAKKAFTNLVENPIWLNKESGIAIKRVTITGISNAEALHYKKDKEGNLILDKNGNKLAVDFVNTGNNHHVAIYRDADGNLQENVVSFYEATERVNQGLPIIDKTYKQNDGWQFLFTLKQNEYFVFPNEKTGFKPAEVDLLDEKNYHLISPNLFRVQKISSKNYVFNHHYETKSVDGELLKTKKSLSGITYYFVQTPSKLLGINKVRINHIGKIVTVGEY

SEQ ID NO: 6755 - protein, 1479 aa, synthetic construct
  REGION 1..1479: note = Synthetic
MAKNILGLDLGTNSIGWAHVMEGENSENSSIVQIGVRVNPLTTDEQTNFEKGKPITTNADRTLKRGMRRNLDRYQLRREHLLNALRKANIITAESKLAEDGKNTTHETWRLRAKAVTEKIEKDELARVLLAINKKRGYKSSRKAKNEEEGHAIDGMAIAKRLYEENLTPGQLSFQLLLEGKKKLPDFYRSDLQAEFDKVWNKQRTYYPDFLTEELYIALKGQGKENTRKRILAIANVYTADIKDMEDGLKNEKTIKLPTREKKKLQAYKWRNDAVTQQLSQEQVAFVLTEINNNINQSSGYLGEISDRSKELFFNKLTVGQYLYNQLLQNRHIRLKNQVFYRQDYMDEFEAIWEEQRKHHPELTDELKEEIRDIIIFYQRKLKSQKGLISFCEFESKEVVINGKKSTIGARVAPKSSPLFQEFKIWQNLNNVLVRKKGSKKRKAQDTLTNFSEDAEVLELSLEAKETLFEELNLKGNLSSARIIEILGHKPADWEVNHSQLEGNRTNQALYNAYLKILEIEGYNEDLLKLSDKDDINVADLKTPAREIKAMVKSIFEVLGIDTEILEFNAELDGKDFEQQKSYQLWHLLYSAEDDDKKYSEEDILTYGQEHIGLKKKLCEKFGFQPEHAKILVNVSFQDDYGSLSTKAMRKIYPYIKENKYSTACAYVASDYKKLSQKEGDYFDVLSKKYRHSNWETKEENEQRLLKDRLDLLPKNSLRNPVVEKILNQMINVVNALLDKKRKTEPNFKFDEIRIELARELKKNAKERAEMTKEINQAKGKNEKIVETIRKDFGILNPTRNDIVKYKLYQELAFNGYKDLYTNTKIDYHKLFSKEYDVDHIIPQSRLFDDSFSNKVLVPRQANLDKGNRTAYDYMATKSKEAFERYLAAIESLYKEDKISKAKYQKLLKQESKIGDGFIERDLRDSQYIAKKAKEILSQITRHIVSTSGSITDRLREDWGLINVMKEINLPKYRALGMTEFEERKDGNKVEVIKDWTKRNDHRHHAMDALTVAFTKRQYISYFNYLNARYNTTHKEHQNIKGIEEKFIEWKYDEQGNKKRVFKLPIPNFRQLAKEHLESVLVSHKAKNKVVTRNKNITKSKKGELVKIELTPRGQLHKETIYGKYHYYESKEVKIDGKFDEATIATVTHPLYKKLLLERLQANDNDPKKAFTGKNALSKNPIYLDEARTETMPEKVKLTWLESDYAIRKDITPENFKDEKSLEKIIDHEVREILRQRLKEYGDAKKAFSDLDKNPIYHTNGYVIKRVRISGVKNAEPLHFKKDHLGNYLLDERGERIPVDFVSTGNNHHVAIYRDANGNLQEKVVSFMEAVLRKNYGLPLIFKNPIEDIDLVLNKGIKEELILSNLPEKDWEFLFTMKQNEMFVFPNDQTGFNSQGIDLLDPKNKKLISPYLFRVQKISTKNYVFNSHLETKSVDGDMLKNKKQLSGVSYYFIQTPAYLKDIIKVRINHLGDIVQVGEY

SEQ ID NO: 6756 - protein, 1420 aa, synthetic construct
  REGION 1..1420: note = Synthetic
MKRILGLDLGTNSIGWAVVNEAETNEEKSSIVKLGVRVNPLTVDEKSNFEKGKSITTNADRTLKRSMRRSLQRYKLRRNALLDLLREQGWITEKTILAEQGNFTTFQTLGLRAKAATEEISLEEFARVLLSINRKRGYRSSRKVQGDEDGKLIDGMDIARELYETGRTPGEYVFSQLSSDINYRIPDFYRSDLQNEFDRIWTAQKAFYPDILTDELKEGLRNRNEKQTWAICQEPFALEGIKRVAKGKEQVKENYGWRTRALSERLDLESLAVVLQKVNSQIKNSSGYLGDISDRSKELYFNGQTVGQYQMAQLEKNPNYSLKNQVFYRQDYMDEFETVWECQAKSHPELTPSLKHQLRDIIIFYQRPLKSQKGLVSVCELEGRQVEIEADGKKKTRTIGPKVCPKSSPLFQEFKIWQILNNVTVDRRYLTQEEKEKLYDRLCTCDKLSKSEILKYISPEPEPVRQPDSLFSDDEMYDSDAIVRNVGNKKEIKLNYKELEGNRTMAALLKSYAKIIMLTGHDEYDFSKMPFSESVGIISDIFIALGCRTDFLYFDSSLEGRAFEEQASYRLWHLLYSYEGDKSVSGNEKLIDKISEITGFEPEYAKILANVTFAPDYGSLSAKAMKKILPYMKEGNTYSLACEYAGYRHSRRSLTKEELENKEYKDRLEPLPKNSLRNPVVEKILNQMVNVVNGVIDEYGKPDEIRIELARELKKSAKEREEMTAAISASSAENSKIRNELINEFGMENPSHNDVVRYKLYQELSENGYKTLYTNTYIPLEKLFSKEFDIEHIIPQARRFDDSFANKTLEARQANIEKGSSTAFDYVKGKYGEAGAEDYRSRVDVLLEKGKISRTKWRNLLMTEPEIPDGFIDRDLRDSQYIAKKAREILESIVRDVVPTTGSVTDRLREDWQLVDVMKELNWKKYDRLGMTEAYQDKDGRTIRKIKDWTKRNDHRHHAMDALTIAFTKRAYIQYLNNLNARIGKSADEAPLIDLSDYALKDIPKSEMTRVVRAIERICLYRDNKGKLRFCPPVPLDEFRAEAKRQLENILVSIKAKNKVVTRNLNRTKKKGGLNTKVQLTPRGQLHNETVYGSIRQYVTKEEKVGAAFTQEKIATVANAAYREILLARLAEFGNDPKMAFTGKNSLEKNPLYVDELHTTSVPIKVRTVSMETVYTIRKAVAPDLNVDKVIDAKVKELLQKRLEEYGNDPKKAFANLDDNPIWLNKEKGISIKRVAIRGVNNAEPLHEKRDHNGSLIMDCNGDRIPVDYVNTGNNHHVAIYMDSDGNLQEQVVSFYEAVARVSLGIPVIDREYRKDEGWEFMFTMKQNEYFVFPNPETGFDPNEIELMNPENYSLISPNLFRVQKFTKGDYFFRHHLETNVEDKSVLKNIVWKRLSTKALNGIVKVRINHIGQIVNVGEY

SEQ ID NO: 6757 - protein, 1375 aa, synthetic construct
  REGION 1..1375: note = Synthetic
MKKILGLDLGTNSIGWAVVNEAEKEGEKSSIVKLGVRTISFDNFVNTVSKKACMDAVADFNGGKSISCNAGRTQSRSMRRNLQRYKLRRDHLRKLLKEHGFIDDSTILAEKGNGSTFETYRLRAKAASEEISLTEFARVLLMINKKRGYKSNRKAKSSDEGTLIDGMAIAEKLYNENLTPGQLVFSLINQGKRYEPEFYPSDLQTEFDKIWSFQKTFYPDLLTESLKQNLEGKNKSATWAICKAPFNIVGIKRSTKGFDQKKEDYEWRTKALSEKIGLEELAIVLQNINGQKSGTSSYLGNIGDRSKELRINHLTVGQFQMNELAKNPNYSLKNQVFYRQDYLDEFEAIWETQSKYHSELTPELKHEIRDITIFYQRPLKSQKNLISICELEGRKVTRTIDGQTKNILSGPKVIPASSPLFQEFRIWHVLNNLMLTSKETGEYCALKQDEKEKLFVELNVKDQLSKSDALKVLFNKEYRDYDLNFDKLEGNRTQSKLFDAYRRIIEMCGCGEFNFQKMSAKEIFNTVHKSFEKLNIKTDFLSFNSSLSTPELENEPLFKLWHLLYSYQDDNSLTGNGCLIAKIENLCNMERTCAAILANVTFEDAYGSLSAKAIKKILPYMKQGQMYSEACASAGYKHSKRSLTREELANKVYKDHLDVLPMNSLRNPVVEKILNQMVNVVNSIIDVYGKPDEVRIELARELKKSAKEREEMSNAIKKSTADYDVFRKTLINEFGLEHPSKNDLLRYRLYKELESNGFKTLYSDTYIPQEKLFSKEFDIEHIIPQAKRFDDSFANKTLEKRQINIEKSNSTAYDFVLAKYGENGAEQYKSRIDKMYNEGMISKAKYKNLLMHEADIPSGFIERDLRDSQYIAKKAREMLEDVVKFVVPTTGAITDRLREDWQLVDVMQELNWDKYNKQGLTETYKDKDGRTIYKIVDWTKRNDHRHHAMDALTIAFTKRSYIQYLNNLNARVPKSEQEYIDLADYDLSNINPADVKRIEASIEQKELYRNEKGKLCFFPPIPLDEFRTQAKEQLENTLISIKARNKVVTRNTNISKGKNGKLNQQQSLTPRGQLHNESIYGSYQAENVKSEKIDAKFTAFNGDAKKAFTRKNALAKSPIYLDEMHTTKIPEIVTTKSYEMTYTIRKAVSSQNFKDAKSIEKVIDGKIKQILLDRLAEYDNDAKKAFDNLMDNPIWLNKEKGISIKSVTIRAVNNAVALHNGHDFVNTSNNHHVAVFRDAKGDLQEHVVSFYEATLRATKGLPIIDKEYNKELGWQFLFTMKQNEFFVFPNHETSFDPQKVDLLDSKNNALISPNLFRVQKFTTKDYFFRHHQESMLNDNKKLLGITWKRGGLSLLNGIVKVRVNHIGQIVSVGEY

SEQ ID NO: 6758 - protein, 1469 aa, synthetic construct
  REGION 1..1469: note = Synthetic
MKKILGLDLGTNSIGWAVVNEAEKADEQSSIVKLGVRVNPLTVDELTNFEKGKSITTNADRTLKRSMRRNLQRYKLRREHLIEILKANGFISDDTILSETGNRSTFETYRLRAKAASDEISLEEFARVLLMINKKRGYKSCRKAKNTEEGQLIDGMEIAQRLYDENLTPGQLSFELLNSGKKYLPDFYRSDLQAEFDKVWNFQSQFYSFLTNDLKDELKGKNEKAIWAICAPSKDKNAEGSRFVWHWKETVSKWNEETASNETVEVDKTLTGAKRSGTTAEQKIENYEWRSKALSEKLSPEQLIVVFQKISGQIYNASGYLGNISDRSKELYFNHQTVGQYQMAQLDKNPNYSLKNQVFYRQDYLNEFETIWETQAKYHKELTPELKKEIRDVVIFYQRPLKSQKGLISFCEFESRQIEIEVDGKKKLKIIGCRVCPKSSPLFQEFKIWQRLNDVEVSGMIVPNQQHDLFGYSKDYTYGKRRLQQEEKEMLFAELNYKEKLSKAEVLKLLFPKQKDADMNFKELDGNHTQTELFKAYQTIAEKSGHDVGDLLKKSAKEMQQSISEIFATIGINTEILSFNSNLEGKEFEQQPMFRLWHLLYSFDGDNSAIGNEKLIEKLRDTFGFEKEYAAVLANVVFKEAGDYSSLSTKAIRKILPHLKDGNDYSVACEYAGYRHSKQSLTKEEIRNKVLKDKLELLPRNSLRNPVVEKILNQMINVVNSVVDTYGKPDEIRIELARELKKSAKEREELSKSINETTRLHEGLVQKLQKEFGLSHVSRNDIIRYKLYNELESNGYKTLYTNTYIPREKLFSKEFDIEHIIPQAKLFDDSFSNKTLEARQANLDKSNTTAFDFVATKYGDEFANGEYKTRIDKLLADKVISKTKHDKLLMKEADIPSGFINRDLRDSQYIAKKAREILEELVRFVVPTTGSITDRLRDDWQLVDVMQELNWNKYDQLGMTEIIEGRDGQRIRRIKDWTKRNDHRHHAMDALTIAFTKRSFIQYLNNLNARVQKGVDDWIDLDMVEFADLSKEDKTKAVCAIEKKELYRDNHGKLRFNPPMPLKEFRAEAKRQLENTLISIKAKNKVVTRNINVSKKKSGANKKVQLTPRGQLHLETIYGSSKRYETKEEKVNASFDAEKIKTVASKRYREALQSRLNQFDGDAKKAFTGKNALDKNPIWLNAQHTDKVPEKVKTVSFETIYTIRKEVSSDLKLDKVVDVRIRKILEDRLAEYGGDAKKAFSNLAENPIWLNKEKGIAIKRVTITGISNGEPLHDKRDKDGNLILDEKGNKQPVDYVNTGNNHHVAIYRKPKLDKNGQPALDANGDIVYELDEKIVSFYEATSRAMQHLPVIDKTYKQSEGWQFLFTMKQNEYFVFPRYDADGNMTFNPLDHDEAWFKNPENYAEISPNLFRVQKMTNKDYFFRHHLETTVQDNAKLKGITWKRFGLNGIENIVKVRVNHIGQIVSVGEY

SEQ ID NO: 6759 - protein, 975 aa, synthetic construct
  REGION 1..975: note = Synthetic
MFQEFRIWHNLNNIQLIDNERNSKRSLYEEERNLLYEELSIRDRLSKAEALRVLGKKNRQWDLNYKELEGNRTQATLFSYYNKIIMMTGHEECNIKQLKAPEIRHYIKTIFKNLGFNTGILEFDSSLNGHELEQQPMYQLWHLLYSYESDKSRTGNEALLKKLETIFGFPREYASVLAEVAFEDSYGNLSVKAIREILTHLQAGLDYSQACEEAGYKHSRRSLTKEELDEKEYKEKLELLSKNSLHNPVVEKILNQMINVINAVIDEYGKPDEIRIELARELKIGAAERENMTRSISQGNAENKCIREILEKEFALSYISRNDIIKYKLYEELKPNGYKTLYSDTYIPKDKLFSKDFDIEHIIPKARLFDDSLSNKTIEARDVNIAKSNKTAFDFISGKYGQQGIEAYKKKLYILLQGGSINKAKYNRLLMKEADIPSDFINRDLQNTRYITRKAYELLSDLVRVVTPTSGAVTSRLREDWQLVDIMKELNFEKYQKLGLTEVIEDKDGRKIKRIKDWTKRNDHRHHAMDALTIAFTKPSFIQYLNNLNARSNKGDSIYAIENKELHREDGKLCFNAPLPINEFRAEAKKHLKAVLVSIKAKNKVMTQNVNKIKTKHGVIKKVQLTPRGELHNATFYGTKKRPIIKMVKVGAALDEVTIKKVSSSFIRKALQDRLYEYNGDAKKAFTGRYSIDKNPIYIDEERKRIVPALVKTIEWEMYHPTRKLISPDLKIDKVIDKGIRDILKTRLAKFNGDAQKAFSNLDEEPIYKDEAKKIILKRVSLEGVSSVIPLHTLKDRSGMPITGKDSEPVLGDYVQTSNNHHVAFYIDENGNLQDNIVSFFEAAERKSQGIPVIDKNYNRDKGWHFLFTIKQNEYFVFPNEVTGFNPSEVDLMDETNYDIISPNLYRVQKMSRVVYGKSIIRDYVFRHHLETTVEANANLKGLAYKQLKSLSYLEGIVKVRINCIGKIVAVGEYD

SEQ ID NO: 6760 - protein, 940 aa, synthetic construct
  REGION 1..940: note = Synthetic
MLNNLKVDGEYLDLEYKQLLFRELSIRKELSKADTLKLLFGKPKGHEMNFRKLEGNRTQATLFQAYSKILLLSGHDEIDFSKSADEIIDKTAAVFSALDISTDILAFDSSKSGKGMENEPLYRLWHLMYSYTEDNSKTGYDSLVSKLHEEFGFTPEYGKILASVTFEDDYGSLSTKAICRILPFMKNGMEYSAACTEAGYRHSQRSLTKDEIENKEYKDRLDILPKNSLRNPVVEKILNQMINVINGVIDTYGKPDEIRIELARELKKNAAERQKAIDAINKSTKENKEIEEILKRDFGMAHVSRNSIIRYKLYMELKDNGFKTLYSNTYIPREDLFSKRFDIEHIIPQSRLFDDSFANKTLESKDINITKGDMTAIDFVADKYGQEGVERYKSTVDMLFGKGAISKTKYHNLLRTQNDIPENFIQRDLRDTQYISRKALEILGDIVKSVVATSGEITARLREDWGLVDVMKELNWDKYDKSGMTEYYNDSDGRIISRIKDWTKRNDHRHHAMDALTVAFTKRSIIQYLNTLNAKDKEQQQEITSKGRLLPPMPFDELRYETKKHLDDILVSIKAKNKVVTRNTNKTKSKGGYKEKIQLTPRGQLHNETVYGEILQYDCKDEKVGSNFDADKIATVACERFRNALYQRLAQYGGNPKKAFSGSNSLEKNPLFTDILHSEEVPQKVKTVRLIPVYTIRKQIDPSLKIEKVIDCHIRQILYNRLEEYGNDPKKAFSNLDENPIWLNKEKGIQIKRVTISGPANVYALHDKHDMSGIPILSSRGEPIPSDFVSLSNNHHIAIYMDSDGNLQEQPVPFMEAVARVSLGDPIIDKTYRVKDGWKFLFSMKQNEYFVFPNNETGFDPNTIDLLNPTNYHTISQNLYRVQALSTKDYWFRHHLETSIVDNNDLKDITWKRIRNTNNLKGIVKVRIDHLGNIVQTGEY

SEQ ID NO: 6761 - protein, 1422 aa, synthetic construct
  REGION 1..1422: note = Synthetic
MYAMKKILGLDLGTNSIGWAVVNEAENPSEKSSIVKLGVRVNPLTVDELSNFEKGKSITTNADRTLKRSMRRNLQRYKLRREALVNILKEHGFITDGTLLSENGNKTTFETYRLRAKAATEQISLEEFARVLLMINKKRGYKSSRKAKDGEEGSLIDGMEVAKRLYDENLTPSQLCLQILESGKNYLPDFYRSDLQEEFDRIWQFQQKFYSEILTDAAKEEVRGKNKSQTWAILNKYSKYSEDKTLHLEGFGFKRTAKGRDLKIENFKWRVKALSEKMTVEELVIVLQEINGQISASSGYLGAISDRSKLLYFHHQTVGQYLMESLRKDPNKSLRNTVFYRQDYLDEFETIWEKQAEFHQELTPELKKEIRDTVIFYQRRLKSQKGLISICEFENKEIEIIKDGKARKKVIGCKVIPRSSPLFQEFKIWQTLNDMEVLVSGVKRKRPVKGAETVDADGMDLLETQGRRRLDQDEKMLLAAELFIRPELSKSQALKLLFDKPQGLDLNFKEKIDGNKTGAVLYEAYSDMLELSGHEPLDFKKPAADIFKQAHDVFTALGWNAAVLKFDYEPAATNKSLEQSPYFKLWHLLYSFEGDDTPTGNGKLVEKIMDLCHVEKEYAAVLANVSFQDDYGSLSAKAIGKILPFLKEGNEYSLACEYAGYRHSKSSLTKEEMASKVLKDKLDILPKGSLRNPVVEKILNQMVNVVNGVVETYGRPDEIRVELARELKKNAAEREQMTKDIASNTKAHEAIRKLLQTEYNMAYVSRNDIIRYKLYEELKDNGYKTLYSNKYIPREKLFSKEIDIEHIIPQARLFDDSFSNKTLEYRDVNIEKGNKTAHDYVQEKYGEEGLEAYKNRCETVFKDKSAKLKKLMMPEDEIPEGFINRDLRNTQYIAKKALAMLGEISRRVVATSGSVTDALRKDWELIDVMKELNWDKYKALDLVEYVTDKDGRKIGHIKDWTKRNDHRHHAMDALTVAFTRDVFIQYFNNKNASFDETTNAYSIKKKYFEKGRAIAPVQPIEAFRAEAKEALNEILISIKAKNKVVTLNTNHIKQKKGERKVIQQTPRGQLHKETVYGTCQQYVTKEEKVNASFDAEKIATVTKKAYRDALLRRLQENGQDPKKAFTGKNALDKKPLWLDEAKQTGRVPEKVKTVILETVYTIRKPVDENLSIDKVIDVKIRKILQNRLAEYDNDAKKAFTNLDENPIWLNKEKGIKINRVTIRGVSNAQALHEKKDKEGRLILDDEGAKMAVDFVNTGNNHHVAIYRRPMLDKIGQPVLDENGQPKYELEDRVVSFYDAVARVNQGLPIIDKTYKQDEGWRFLFSMKQNEYFVFPNETTGFNPKEIDLMDPKNYAAISPNLFRVQKFTSGDYFFRHHLETTVIDNKELQGITWKRITSLAILDKIVKVRVNHVGQIVSIGEY

SEQ ID NO: 6762 - protein, 1121 aa, synthetic construct
  REGION 1056..1119: note = misc_feature - Xaa can be any naturally occurring amino acid
  REGION 1..1121: note = Synthetic
MSKTILGLDLGTNSIGWALVEEAENIDESSKIIKLGVRVNPLTVDEQTNFERGKPISTNADRTLKRGARRNLQRYKSRRENLIEILVKNGIITKNTPLTEIGKNTTHQTLMLRAKAAHNKVDLVDFAKVLLTINKKRGYKSSRKSKSSDEGVAIDGMTVAKILYEKNLTPGQYVYETLNGGNKFIPDFYRSDLRIEISKIWDKQTEFYPTQLTNDLFHAIEDRNKGQTYKILEVPWNLKGLKQSGKRDEQRLERYKWRQQALSEKIELEKLVIVLQEINGELNNSSGYLGAISDRSKRLYFNKITVGEHLYNQIERNPHTSLKNQVFYRQDYLDEFEQVWETQAKHYPEILTIELKEEIRDVVIFYQRKLKSQKGLISFCQFESKQEEYIDKTTGKTKFRTTGQRVAPKSSPVFQEFKIWQNLNNLTFENEKDNQIIEVRNLEDNIREEIFNELNFKGSLAPKDVLKVISKHIFINKASDWTCNFEKIEGNTTNKALLEVYQKIAEAEGYGFDWDKKSAKDINEEIEAIFGEIGVNKEILKFDSNRDDFDKQPSYQLWHLLYSAEDGGKVNEEDRLLYGNNDTKLRKTLHTKYGFKPEYATMLSNITMQPDYGNLSSRAMRKITPYLQAGHPYAKSSDNKDEAGACDLAGYNHSKSETVEDLKNKILKDKLEILPKNSLRNPVVEKILNQMVNLVNQVIDEFGKPDEVRIELARELKKTADERERMSKDIAEATKRNEEIKNLIIKEFGIPNPTKGDIVRFRLWDELSSRGHKTIFTELYIPKEKLFSKDIEIEHIIPQALLFDDSYSNKTLAYHSENLQKRNRTAYDFINQDYNQYTTEFENRVDVWYNNKSISKAKRNKLLMTYADIPDGFIERDLRNTQYIAKKAREMLLEAFKTVIPTTGSITEKLREDWGLINLMKELNLPKYKALGLTETEERFDIGSEKIKKVEVIKDWTKRNDHRHHAVDALTVAFTTHNHIQYINNLNARRNTNHKKHNIIHAIENVITERINGKPIFKEPIPNMRDVARKEIESILVSFKAKNKVTTNNINETKLXXXXXXXXXXXXXXXXXXXXXXXXXXXXXXXXXXXXXXXXXXXXXXXXXXXXXXXXXXXXXXXXTQ

SEQ ID NO: 6763 - protein, 575 aa, synthetic construct
  REGION 1..575: note = Synthetic
LNFKQIDGNRTGFSLFSAYSKMIEKYGYEPLDFKKPADEIMGQLRTIFTDLGWNTNLFTIDLTKEGKELEMQPYFRLWHLLYSFEGDNTPTGNGKLIEKIMQLCGVEKEYAVELASLSFQDDYGSLSAKAIKRILPYLKDGNQYDVACEYAGYRHSKSSLTKEEIENKVLKDKLDVLPKNSLRNPVVEKILNQMVNVINTIIDTYGKPDEIRVELARELKKSAKEREELTKAIAKSTREHEEIRKLLQAEFGMMNVSRNDIIRYKLYEELKDNGYKTLYSYQYIPKEKIFSKEIDIEHIIPQSRLFDDSLSNKTLEYKAINIEKGNKTAYDFVKEKYGEEGLQQYINRCESLFNDKKAKLRKLKMGQKDIPDGFIDRDLRNTQYIAKKALAMLNEICRRVVATTGSITDQLREDWQLVDVMKELNLPKYEALGFVETYEDKDGRKIKRIKDWTKRNDHRHHAMDALTVAFTKDAFIQYFNNKNAAQDSDNRNHTNIIGIKTRYFDKGRALPPIPLEQFRVEAKRHLENLLVSIKAKNKVVTVNVNRTKKKKGENTKIQQTPRGQLHLETVYGSLK

SEQ ID NO: 6764 - protein, 1446 aa, synthetic construct
  REGION 1..1446: note = Synthetic
LRFRNKKAPYCKTRHLCLHNGIILIAICFQYQSKRFNIIFPNLNVIITMKTILGLDLGTTSIGWAFVKEAENDNEVSSIIKIGVRVNPLTTDEQTNFEKGKKFSVTAGRTLARGARRSLQRYKQRRQNLINVLKKASIIDEHTILAESDRNTTHATYALRARAADEEIAKEEFARILLMINKKRGYKSSRKANSEDEGQLIDGMAIAKRLYEQKLTPGQLCYQFLKEGKKTLPDFYRSDLNAEFNSVWELQSKYYPDVFNDDLKKALAGKGQKVTSAIFWTKYSFNTAENKGTREDKKLQAYKWRSMAINTQLAVEEAAFVIADINGNINNSSGYLGAISDRSKELYFNKQTIGKYLYSQLQDNPHTRTKGQVFYRQDYFDEFETIWETQAKYHPELTNALKEEIRDIIIFYQRKLKSQKGLVSFCEFESRVVELVKDGKKTSYTIGAKVMPKSSPLFQEFKIWQNLNNLLIQNKKSKEILSFDLEAKLLLFNELNIKGNLKKEQVFKFLGYKPNEWDLNFPVVEGNRTNQLLYEAYLKMMVYEGHDDIEIEELTAADIKSAVRSFFEIQEINVAILDFNSDVEGRIFEKQLAYQVWHLLYAYEGDNSNTGNDKLFELLKSKFGIKKEHAQILAKVNLSQDYASLSAKAIRNILPFLKAGHPFAKKDKDEKIASATALAGYNHSSSITKEENDNRILKGCLELLPKNSLRNPVVEKILNQMVNVVNAIIADANLGKPDEIRIELARELKKNLKEREEATAQINKSTAEHDAIRLLLVKEFGIKNPTRNDIIRYKLYDELKFNGYKDLYTNEYISREELFSKKYDIEHIIPQSRVFDDSFSNKTIVERRINQAKDNATAYDYVDAKGAEKLSEYKLRVEAYLKEYPERKAKYKKLLIKGEAIGEGFIDRDLRDSQYIAKKAKAMLHEVCRNIVSTTGSVTQRLREDWDLVNVMQELNLEKYRKQLLTEMVEKKDGNFKERIIDWTKRNDHRHHAMDALTIAFTKHSHIQYLNNLNARKSDDKLGRAIAGIEKKETDFHIDDNGNKKRRFKSPLVNFREDAKNHLENVLVSCKAKNKVVTKNKNKIKSAKEKEPQKTLTPRGQLHKETVYGKIQQYIVKEEKVSGKFDEATIAKVTKPKYREALLKRLRENNNDPVKAFTGKNALTKKPIYLDVQNTVLLPEVLKLSWLEDDYAIRKDISPDLKIEKIIDEGIREILYKRLNEFVGKGKEKEAFSNLDKNPIWLNETAKIAIKRVTISGVKNAEPLHFKKDHHGRDVLDKSGKPTPVDFVSTGNNHHVAIYRDENGNLQDEVVSLYKVITERVNQGLPIVDKTYNHHLGWQFLFTMKQNEYFIFPSADFDPLETDLLNPVNNKLISPHLFRVQKFSKVIYGNSAVRDYVFRHHLETAIEDRKELKDVTYKSIKSLPYFENIVKVRINHIGQIIKIGEY

SEQ ID NO: 6765 - protein, 1436 aa, synthetic construct
  REGION 1..1436: note = Synthetic
MFSQRNNPYCDLLQICKTIIITYIHISKYYIMKTILGLDLGTNSIGWAIVKEAENENETSSIVNLGVRVNPLTTDEQQDFEKGKPITTNASRTLARSARRNLQRFKLRRTNLINILLQHNIIDNSDCLAEIGNKTTFETYRLRALAATEQISLENLAKVLLMINKKRGYKSSRKASNEEEGSILDGMSIAKTLYETNITPGEFVLNNLKLNKKNIPDFYRSDLENEFNKIWDFQKKYHNEILTDGFKKEISGKGQRATSAIFWNIYNFNTAENKGTKEEKKLQAYQWRVDALTIELPKEVLAYVITEINNNLNNSSGYLGAISDRSKELYFNKITVGEYLYKQLQDNPNNSLRNKVFYRQDYLDEFEKIWECQSKYYKILTNELKHEIRDIIIFYQRRLKSQKNLISICEFEQKEITISGNKKKLIGLKVCPKSSPLFQEFKIWQNLHNIEFKNKKSKEIYKLKQEDKVLLFNELNIKGRLDLDAILQILNLYPKEWEGNYKAIEGNNTNEVLYNAFLKILESEGYDEEFTRAKNNDNISIKQLEQDCSEIKKMLNDIFITLNINTEILHFNALLEGKDFENQASYQLWHLLYSYEGDNSISGNEKLYQILISKYGFSLEHAKIIGAINFKNDYGSLSTKAIRKIYPHIIEKEYSEACALANYNHSKASITKEENDKRILKDRLDLIKKNDLRNPVVEKILNQMVNVVNNLIVAENKKNESEGSSNFHFDEIRIELARELKKNASERAEMTTNINKSKIEHEKIQKLLVAEFNILNPTRNDIIKYKLYEELKTLGYKDLYTNKYIPREKLFSKEIDIEHIIPQSKLFDDSFSNKTIVYRDINIEKGNATAYDYISSRFGNDELTEYLNRVELLYTSKESPITKAKYLKLQKKESEIGDGFINRDLRDTQYIAKKAKEMLFNISRTVVSTTGSITDKLRDDWGLINVMKELNIEKYRKLGLTEFITMKDGNKKEVIVDWTKRNDHRHHAMDALTVAFTKHNYIQYLNHLNARRDENNKKHSIIHAIEKIETEFIVDDLGNKKRRFKVPFENFRIAAKQNIENIIVSQKAKNKVVTRNINKTITKNGILQKVGLTPRGQLHKETVYGKIQQYQTSEDKISAKFDFEMIQKVANSKYRMLLIERLAEFGNDPAKAFTGKNSLSKNPIYLDKNKSICMPEKVKIVSLETDYTIRKSINPENFKDLKSIDKIIDVGIKKIIENRFLQYNSNPKEAFANIEKNPIWLNEAKGIAIKSVKISGIKNAESLHIKRDNLGKAIINKENLNIPTDFVSTGNNHHVAIYVDNEGKYQEQVVSLFEAVARVNANLPIIDKEHNSSIGWKFLFTLKQNEYFIFPSSDFNPDDIDLLDPKNRNLISPHLFRVQKIASKNYFFRHHLETTVNENSKLINVTYKPQLGLNSIKNIIKVRINHIGDIVQIGEY

SEQ ID NO: 6766 - protein, 1422 aa, synthetic construct
  REGION 1..1422: note = Synthetic
MKRILGLDLGTTSIGWALVDEAESENEISGIVKLGVRVNPLTVDEMSNFEKGKSFSINEVRRIKIGMRRNLQRYKLRREFLIKSLTRRGIITDETILSESGPSSTFETYRLRAKAACERIELEEFARVLLMINKKRGYKSNRKIKDADSQGSTMINSIDVARKLYDEGLTPGELCKDLLKDGQKRLPDFYKSDLHDEFARIWQKQKAFYPEILTDEAYEEMLKSNKVYDVLSNFAKYEITKPKKKEPLLQIYSNRVASLTKQISIEDLASVISSLKVQINKANGYLGNISDRSKILHINNITVGQFLLDKINNNPSASIKNNVFYRQDYLDEFEVIWEQQAKYHAVLTPELKEEIRDIIIFYQRKLKSQKGSVGFCEFESSKKIVDGKEITIGAKVAPCSHPIFQEFKIWQVLNNLEVSLVEPVYAEAIYSNVFECFDNSFKSDESRKLEQEEKEVLARELFYKGDLSKSDVLKILFKKTKGLDLNFDKVSGNKTTHAIFSAFAEYFNGKKENTIDFKNSANEIEKHFKSAFDKYKINTDLLKIDLSKSNKEIEKEPLFRLWHLLYSYEGDNSVSGVEKLIEKLKELCNIDNDCAAILANVTFENDYGNLSVKAMNKILPFMKEGERYDLACAEAGYRHSKSSLTKEEIENKVLKDKLSLLPKNSLRNPVVEKILNQMVNVVNSVIDTYGKPDEIRVELARELKSSPNRCDPSGDEIRVELARELKKSTKEREDLNSAILKGNKENEAVREVLRKEFNISNPSKNDVIRYKLYQELKVNGYKTLYSNKKIDLGILFSNEIDIEHIIPQARLLDDSFSNKTLEFRDVNIEKGNRTAYDYVASKYGPEELEAYKKRCEAVCIEGKKAKFRKLMMTEAEIPDGFIERDLRETQYISKKALEMLNEVFKTVTATTGSITDELRNDWQLVDLMKELNLPKYEALGEVREIEDSKGHKKKVINDWTKRNDHRHHAVDALTVAFTKSALIQYYNYKNAAWIEGHKGHAVISAIKAKYFEGGKAKSPIPLTTFRAEVKRALESLLVSIKSKTKVVTKNKTRINRNNGPLEQNTLTPRGELHEETVRGRIKVPVWENEKIGEDFDAQKISRVADVRYRIALSNRLKEFNNDPKAAFTGKNSLTKKPINCGDGETVPQKVLVKHFEDVYTVRKPVDENLNIEKVLDSRIRQLLKDRVAMFKSQKEAFADLENNPIWVNKERGIVLKRVTIGEKLGNAVALHYKKNKDGKFILDKEGNKIPVDFVKTGNNHHAVIYRVPQKGKDGKLKYDKYGNLEYEIVDIVVPFYEAVRRKSEGLDVVDKNLNKEAGWEFLFSMKQNEYFVFPNEKTGFDPTKIELTDHKNYSAISPNLYRVQKFSQGYYLFRHHLETTVKNESKEMKDILYKRITSLKQFENMVKVRVNHIGEIVDVGEK

SEQ ID NO: 6767 - protein, 1371 aa, synthetic construct
  REGION 1..1371: note = Synthetic
MKKVLGLDLGTTSIGWALVSQAENEGEKSRIIRAGVRVNPLTTDEKDGFNAGKDITTNADRRIKRGARRNLQRYKLRRENLLSLMRSLGWIEGDTVLSEDGEGSTFSTYRLRSKAAAEMVSLEELARVFLMINKKRGYKSSRKAAASDGEDGRLIDGVEIAKVLYEEHLTPAQHSLRLIEENHLNARRLPDYYPSDLKSELDRIWSAQSSFYPEILTPDFREMIKGKSRIQVAKIFRDKFDVLTADNKGKDKKIVALHWRVSALSERLQPDVLAYVVADISAAISDASGYLGDISDRSKFLYFNKLTVGQYLYSELEKDPHFRVRNKVFYRQDYMDEFERIWETQKLFHPELTEELKHEFRDIIIFYQRRLKSQKGLISFCEFESHKIKKSVGGKEKEITIGCRVAPKSSPMFQEFKIWSVLNNIVVTGPEGDKRQLTSEEKTKLSVSLQLYPKMSEKEVVAILFGKKAGAILNYRQIEGNDTMSAFFDKYLEIASLCGYDSIAGRKTAEEKLEALSVCFKQNGFNTDILRFDSSLPKEQYEQQPFFKLWHLLYSYEGDKSKTGNASLIEKITELSGMPEEMASVLAGLTFKDDYASLSHKAIRRILPFLKNGYVYSEACEMAGYRHSKDSLTSEERDNRVLVDSLTTLPKNSLRNPVVEKILNQMINVVNAIGRKYGKPDEIHIELARELKQSKDERKQATEAIAKNNAENEKLKAELQRDFGLKNVSRNDLIRYKLYLELEGNGFKALYSDRYISQEQLFSKEIDIEHIIPQAKLFDDSLSNKTLEFRDINLEKGNMTAFDFVEKKYGVEGLERFRSKVDDLCKAHSISERKRKNLFMTESEIPSDFINRDLKDSQYIARKAKEILSSYVRIVMSTTGSVTKRLREDWRLVNVMQEIDMDKYDKVGRTYYEEHRDGSVEKRIAEWSKRDDHRHHAMDAITIAFTKPSHIQLLNNLVARSDKGGAIYGIWIKETHREDSGWTFNPPMPYDELRAEVKNALEGTLVSHKAKNKVMTRNVNRTRKKGGFNEKIELTPRGALHKESVYGKLLRYETSEVSVNAKMTKDVIETVSRKAERDALMARFHENGDDPKKAFSGKNALSKNPIFIDEAHSRQLPPKVKCTRLVVSYKLRKTVDQNLTISKVVDTRVRKLLEQRVKDYGGDIKSAFQDLDTNPIWLNEEKRIPVRTVTISENFDLSALHDKRNKDGQLEFPEAPADFVNLRNNHHIAIYVDDDGKYQEKVVTYFEAVQRVLDGLSPVDKTFNSYLGWKFLFSMKINEMFVFPDKETDFVPTEIDLTDPKNYSIVSRHLFRVQKLSSGDYNFRHHLETKIENVKELQNISWKRIASLDNLRGVVKVRINHLGDIVAVGEE

SEQ ID NO: 6768 - protein, 1396 aa, synthetic construct
  REGION 1..1396: note = Synthetic
MLLKNNMKKILGLDLGTTSIGWALVNEAENKKETSEIIKLGVRVTPLSTDEVIDFEKGNPLTINAKRTEARGARRNLQRFKLRRSRLIQLLTENNFITPDTLLAEVGSNNTYETLKFRARAAKEKIEKEEFARVLLTINKKRGYKSSRKAKNEEEGTLIDGMSVAKELYDKNLTPGQFVYQLLSKGKKYIPDFYQSDLKKEFHNIWEFQKKHYPTILTKELFENLEGKNKTQTWAICAKPFDIKGISHKGTATEKRKEKYQWRTEALHTKLDLELLAIVLQEINNDLNKSSGYLGAIGDRSKHLFFNKITVGEHLYAQIQENNHTSLKNQVFYRQDYLDEFEQIWETQSKFYPEFTESLKEEIRDVIIFYQRKLKSQKGLISICEFEKKTITITVDGDVKNKIIGPRVVPKSSPVFQEFKIWQNLNNLEFSSKSAVNSKLELSIEDKEFLFNELNLRGELKDSQVLKLLNLKTKDWKCNYETIEGNTTNKAIFNVLQHLSHDEGYGFDWNKKTASEIIEELQTTLPLLGIDKGLLTFDVNSPNLKTEKSYQLWHLLYSAEDDVKITKADEVVYGKNSVDLKKKLHEKYGIPIQYTALFANISLQPDYGNLSHKAIRKIMPYLQEGHDYSEACKLAGYNHSNSITKEENLKRELKDKLEIVTKNSLRNPVVEKILNQLVNVVNQIIDTYGKPDEVRIELARELKKSAKERKLMTAGIAAATKRNDGFKKILQKAPFNILNPTKNDVVKYRLYKELEPLGYKTLYTNQYIAPQQLFSKDIDIEHIIPKAKLFDDSFSNKTLAFRRVNLDKSDMTSFDFISDKYNTELEGYINRVNTLYNNGKGEFSKAKYLKLLMEECNLPDGFIERDLRNTQYIARKAKNMLHEVIRDVYATTGSITDRLRGDWDLINVMKELNLPKYRALGLTTYEERKNGNKVEQIIDWTKRNDHRHHAMDALAVAFTTHNHIQYINNLKAKSDKNSIIYSIQQSITSKDDKNKRVFNAPMPNFREDAKKHIERILISFKTKNKVVTKNVNTIKTKNGLLKKVQLTPRGQLHKETVYGKSKREVIKQEKVGGTFSIEKINTITKQEYRDLLLKRLAEHNNDPKKAFTGKNSLAKQSILLSDGKDLPILVTTKTYETIYTIRKAVTPDNFKDLKSLQKILDKRTRILLEERLSKHNGNAKEAFTNLDTNPIWLNEDQGIQLKRVTITGVANVEALHDKKDHLGKPILNSNGHTQAVDFVSTGNNHHVAIYKDAKGNIHDDVVSLYKATTRANLGEPIIGKDYNKEIGWEFLFTLKQNELFVFPNDDFNLLELDLLDNKNYALISPHLFRVQKFSKVEYGNSAVRDYMFRHHLETQIKDVKPLKEIAYINLKSVARMKNIIKVRINHIGEIVQVGEY

SEQ ID NO: 6769 - protein, 1456 aa, synthetic construct
  REGION 1..1456: note = Synthetic
MFSQRNNPYCDLLKILSAKITDFCHIPKYFANFLYICRIQLYFTTDTMKKILGLDLGPNSIGWALVNEKENDNEASSIQKVGVRKISLDNFVSTQTGKESKDPLKDFQSGKGISTCAGRTQKRSMRRNLMRYKMRRDSLIETLKSNGFITDETILSEHGNKTTFETYELRAKAATEEITKEELARVLLMINKKRGYKSNRKIKSKDEDGQIINGLDVAKKLQNEHITPGQYVLSLILQGRKDIPDFYLSDLRAEFDRIWDFQKQFYPEILTDELKSELEGKNKSQTWAICSIPFDIKGISRETKGDEQKKENYTWRAESLERKIDLERLAIVLQEVNNQLKNSSGYLGAISDRSKELYFRRQTVGQFLMAELGKNPNYSLKNKAFYRQDYLDEFERIWETQAKFHDELTPELKHVIRDIIIFYQRPLKSQKRLVDFCEFESRQVEMDIDGKKKTKTIGLKACPTSSPLYQEFRLWQIINNIQVSGMIVPDSQPDLFGNTPKYKYGKRFLEQDEKEMLFKELTIREKLTKKDILKLLFENYNELNLNYKEIKGNTTQAAIVKACLRIIELSGHDTTYVKRMTSDETIGFIEKIFNALGIKTNFLHFDSSVEGKDFVKQPAYSFWHLLYSYEGDNKSVSGDKKLKERISELCNLNENYKEYATVMAGIALEQGYGSLSAKAIRKILPYMKDGLEYSTACLYAGYKHSKRSLTKEELDAKPLKDQIAPLPCNSLRSPVVEKILNQTINVVNSVMSQYGKLDEIRIEMARELKRSASEREKTVKAIKKTTDENEKYRKTLQEEFNIKNPSRNDIIKYRLYLELEKNGFKTLYSGTYIKQERLFSKDFNIEHIIPQAKLFDDSFANKTLEATSINIEKGDMTAYDYVSNKYGKEGLERYKQRIDALYEKGEISKTKRKRLLTTEADIPDGFINRDLNETQYIARKAREILEEVARTVTPTTGSITDRLREDWQLVDIMKELNWKKYDKLGLTEIVEDKDGRRIGRIKDWTKRNDNRHHAMDAITIAFTKPSYIQYLNNLNAKSDKSKSIYGIERKELYRDKSGKLRFIPPMPLDEFRAEAKRQLENVLVSVKARSKVVSSNINITKAKSFTKGIRKKTQLTPRGQLHNETIYGTIRQYTVKEEKVNASFDETKIMAVACKRYREALLDRLKLCYNDAKKAFTGKNSLEKNPIFIDKLHTEKIPIKVKTVTMETIYTQRKEVSKNLKIDKVIDVKVRKILEERLKQYGGDAQKAFSNLEENPIWLNKEKGIAIKRVTIKGVSNAIALHDKRDNQGRLMLDAEGKKQPVDFVNTGNNHHVAIFRDDDGNLHEHVVSFYEATARAIQHLPVIDKDYKKSDGWQFLFTMKQNEYFVFPNEETGFDPNETDLLNPKNYAAISPNLFRVQKLSTKNYMFRHHLETTVEERKELYGITWKNLRSLSGIDKLVKVRINNLGQIVGVGEY

SEQ ID NO: 6770 - protein, 1377 aa, synthetic construct
  REGION 1..1377: note = Synthetic
MKRILGLDLGTTSIGWAYVNQAENENEESSIIKTGVRVVPLSTDEENDFKKGNSITINADRTLKRGARRNKFRYQLRRKALIDELKGIGFIDDKTKLTETGTNSTHELLNLRNKAVTDKIEKEEFARILLSINKKRGYKSSRKANNSEEGELIDSMGITKQLYENNWTPGEFSYQLLKDEKKTLPDYYRSDLESEFEKVWHKQKEFYPEILNEKLFTELAGKNKNQTWKICEKPFDIKGIKLEGDRNQKKLETFRLRKIALTEQVELEHLAIVFQEINNEINQSSGYLSEISDRSKELHFNDLTVGQYLYNQISKNPHSSLKNQVFYRQDYLNEFQSIWNKQAEFYPELTDDLKDKIQNEVIFYQRRLKSQKGLISYCEFESWEQDVTIDGEKKRKIVGHRVVPKSSPLFQEFKVWQNLNSIRITNMKTNEVYHIEEDSNTELFQKLNWTDKLSDKQVLKEFGLKPEEWKINFQKIEGNRTNHNLLEAYKEILKIEGYDNINFTNIGADELQKTLEQCFDEIGIDKQILDFNATLEGNEFSKQKSYELWHLLYSYEDDFSRTGTSSLEEKLKINFGFKDEHLPYLINIRFQDDYGNLSARAIRKLMPHLQDGKIYSDACELSGYNHSNSLTKKQNEERELKPKLEILKKNNLRNPVVEKILNQCINVVNAIIEDEKMGRPDEIRIELARELKNTKDQRSEMTKAIGRATREHEQYREEIKTKFGLPHVSRNDLIRYKLYKELESNGYRTLYTDEYIKPEDLFSKKYDIEHIIPKSRLFDDSFSNKTLETRESNLDKGDETALDFVERKYGKEGLDKYRNRVEELYKAGKIKGSKHRKLLMSLKDIPEDFLNRDLGNSAYIAKKAAEILLDVTKRVSLTSGTITSKLREDWGLIQVMQELNWDKYEKVGLTYYKENKEGKKLPRIKDWTKRNDHRHHAMDAITVAFTKPGMIQYLNNLNAKSNKEIYKLENAYTFKDERGKRKFKAPFSNIRKASKEHLSQILISHKTKNKVTTKNKNKINIKGKNTYKYQTVETPRGQLHKETVYGKSKYYETKLEKVGGKFDKDYINLVANQSYRNALLKRLEEFENNPKKAFTGKNSLTKNPVYLNGTQETVPEKVKLAWLEERFTIRKEVTPDLKIDKVVDEGIKQILHKRLKDFNNKPKEAFADLDKNPIWLNKEKGIKIKRVKINGVSNAEPLHHSKNHLGEVILDNKNNPIPNDYVSTGNNHHVAIYKDEKGNLQEEVVSFYEAVARKNAGLPIINKDHKKGWEFLFTMKQNEMFVFPNEEKGFNPTEIDLLNPENKALISENLFRVQKISTKNYMFCNHLHTLAITGDDLKNKKMLSTFIYHFIQTPEKLINIVKIRLNHLGDLVQVGEY

SEQ ID NO: 6771 - protein, 1369 aa, synthetic construct
  REGION 1..1369: note = Synthetic
MKKILGLDLGTTSIGWALVNEAENPEEESSIIKIGVRVNPLTVDEKNNFEKGKTITTNADRTLKRGMRRNLQRFKQRRLNLTACLIRNKFITAETILSENGNKTLFETHRLRAKAANEEISLEEFARVLLMINKKRGYKSNRKANEAEDGQAFDGISVAEILYNKGITPGQYSLSLLQEGKKYTPEFYKSDIQDELNQILLKQTEFYPEILTPDFLNSIEGKEKGAVKNRFKAIGILSADIKGKDRKLQSLKLRVQALKEKIQIEEVAFIVELLSGIINNSSKLLGSISDRSKELYFGKMTIGEYLMKKLDADPHFSIKNHTFFRKDYVDEFEKIWETQSKFHPELNQELRKKIAKIIFFQRPLRSQKGLISVCELEHRKIETMEAGKLISRIVGPKVCPKSSPIYQEFKIWQKLNDIRISDKNEGTEYELTVEQKQRLAEELSVKEKLTKSEVIRILFGKDKSKDMNFNDIPGNTTSAQLFKAYENIMEMTGHEQKFDKLSGKQIMEFVTSVFSALGYNTSILSLGTDVNGKNLEKEPLYKIWHLLYSYEGDNSATGNDGLVNKIKEIYQFDNIDLAKEIAKINFKPEYGSLSAKAISKILPFMKEGKKYSDACAEAGYNHSEKSLNKEQIENKQLIDKLELLQKNSLRNPVVEKILNQMINVVNSVIENYGKPDEIRVEMARELKKTAKEREEMTTSINQSKQDHEKYAEIIKRDFGFAYVSRNDIMRYKLYMELKDNGFHTLYSGTYIPYDQLFSNSFDIEHIIPKAKLYDDSFANKTLEARSVNLAKSNKTAFDFVKEVYPERIDEYKAIIADLHKRGVIGKRKRNYLLMEEKDIPSDFLNRELNDTRYIAKKAIDILSQIVKVVIPTTGAITDRLREDWQLIDIMKELNFPKYEAAGLVEVFTDHNGKPIKKIKDWTKRNDHRHHAMDALTIAFTKHEYIQYLNNLNARSDKSSSIYTIEKKELERRPDGKIVFKAPMKNFRQEAKKQLEATLVSVKSKAKVTTKHKNKPKKNAQESPTIQSVLTPRGPLHNETVYGTRKQYMLKSEKVGASFTREKIAQVAKKAYREALLTRLEEFDGDPKKAFTGKNALEKNPIWLDSNQTLHVPSKVEVLYMETIYTVRKPISKDLKIEKVLDAGIRRILQERINEYNGDAGKAFANLDENPIWLNKEKGIAIKSVTINAGLKDPEPIRTKRDKEGKQILDNNGTPIPSDFVQTAGNHHIAIFEDEDGKLQEHVVSFYEATARQIQGLTVVDKDYNKEIGWKFLFTLKQNEMFVFPSDDFNPKEVDLMDPDNYEIISKHLYRVQKLSSKYYVFRHHLETNVEDVNALKGSTWLRINKLDNLRNIVKVRINNIGQIVCIGEY

SEQ ID NO: 6772 - protein, 1437 aa, synthetic construct
  REGION 1..1437: note = Synthetic
MKKNILGLDLGITSIGWAHVIEGATPSESEIKQIGSRIIQFDNFDRVDKQGNVSESRDPLQDFASGRGLSPNADRTKKRGARRLLDRYKMRRENLVDLLLKSNIINPNTVIVEDGKNTTHGTWRLRSKAATERIELDELARVFLAINKKRGYKSSRKTKSAEEGYAIDGMGIAKKLYEENITPGEFVFENMMKGRKAIPDFYRSDLEAEFNKVWDCQREFYPDILTNDFYEELKGKGLRATSAMFWNRYDFNTASIKNLDDSLKKEQTIKYSKRDQTKLQAYKWRSDAISKKLDKEQMAYVIADINNNINSSSGYLGAISDRSKELYFNNETVGQYLYKQLQDNPHTSLKNQVFYRQDYLDEFETIWTTQAKFHPQLTEKLKEEIRDIVIFYQRQLKSQKGLISFCEFESKEVEIDGKRRTIGSRVAPKSSHLSQEFKIWQNLNNVVLRKSRSKKRLSEVDNLESLLKDEKDEFVFDMESKELLFEELNIKGKLNAKAIIELLGYKPKDWEMNYTELEGNNTNTALYNAYLKILEIEGYNEDLLKLSNKDEINVAELKTSAYEIKDMVKSIFKVLGINTDILEFNAELEGKAFEQQPSYQFWHLLYSAEDDYKKYSEEDILLFGNESIGLKKQLCAKFGFAPEHAKVLSNVAFQDDYANLSTKAMRRIYPYIKESMYSDACKLAGYRHSKHSLTKEEIEKRVLKSKLEVIKKNSLRNPVVEKILNQLVNVVNALIDKENDKLEKAGKPRNFHFDEIRIELARELKKSADERAQMTLNINAANRAHEEINKLLQSEFGVKNPTRNDIIRYRLYEELKDNGYKDLYSNTYIPREALFTKDIDIEHIIPQSRMFDDSFSNKTVVYRKDNLKKGNRTAIDYIEDEFGESGVNEYAMRMGKLFELNGKNGNGITKAKYHKLLRRASEIGDGFIERDLRDSQYIAKKAKDILFQITRTVVSTSGRVTNRLREDWDLINVMKELNLPKYRALGLTEMEERKFGQEIETIQDWTKRDDHRHHAMDALVVAFTKHSHIQYLNHLNARRNCTHKLHRHIIGIESRETELKEHLESVLISHKAKNKVVTNNINHVKTKRGYKKSLELTPRGQIHEETVYGKIKQPVVKEMSVGGQLTPELIEKVTNPTYKKLLLKRLSEYDNNPRKAFLGNNSLSKSPIYLDDSKTETLPQRVSLLFYEDCFTIRKEVAVDLRIDKVVDVGIRRILQDRLEEYGGNARDAFSDLNKNPIWLNREKGISVKRVTITGIRNAEALHYKKDHFGEFVLNEKGNKTPVDFVSTGNNHHVAIYRDKKGTLQENVVSFFEAVERARQGIGAIDRYYNKDIGWEFLFTMKKNEMFVFPNEETGFDPNEIDLMDPSNRKYISPNLFRVQKITAKDYTFRHHLETNVNVQKELVNIAFVRLRSPQSLKDIIKVRINHLGDIVAIGEC

SEQ ID NO: 6773 - protein, 1379 aa, synthetic construct
  REGION 1..1379: note = Synthetic
MKQILGLDLGTTSIGWALVREAENKDEQSSIVRIGVRVNPLTSDEQKNFEQGKSITTNADRTLKRSMRRNLQRYKLRRDHLKDCLQKNGIITDKAVLSENGNYTTFQTYYLRAKAVNEKISLEEFARVLLMLNKKRGYKSSRKMKSADEGQLIDGMSVAKRLYNDNITPGQYVLSLLEEGRKYIPDFYRSDLLDELDKIWTFQQCFYPEILTPECRKLIAGKGKQATAKIFLGKYKIYTADNKSKDKRLQAYQWRVEALSGQLPIEVVAFVVCEINGAIQASSGYLGAISDRSKELYFEGLTVGQYLVKQLEKNPDTSLKNKVFYRQDYLNEFEKIWEKQAEYHTELTPQLKKEVRDIIIFYQRTLKSQKGLVGFCEFESRQIEVMIDGKLKKKTVGCRVCPKSSPLFQEYKIWHNLNNLKIVEKELGKSRFLNQDEKESLFQELNIKEKLSKTDILKLLCLKAKEFDLNFEKVEGNRTQAELFRAYQAIIEMSGNGDYDFSKMTSSEIQDTVTGVFRGLGYNTDILSFDAEKEEKTFDKQPMYLLWHLLYSYEGDSSDTGNKALITKIKKLCGFESEEYARILTDVTFQSEYGNLSTKAIRRILPFMKKGSEYSEACRHAGYRHSERSLTKEELDKKVYKDHLELLPRNSLRNPVVEKILNQMIHVVNTVVDTYGKPDEIRIELARELKKSAKERDEMTASINKTAAEHKKYCEVLQKEFGFTHVSRNDIIRYKLYLELENNGYKTLYSDTYIPREKLFSKEFDIEHIIPQSKLFDDSFSNKTLECRSVNIEKSNDTAYDYVLNKYGEQGILDYKNRIENLYKDSKISRTKYQKLMMKNSDISGNFIERELRDSQYIAKKAREILEELVKFVVPTTGSVTARLREDWQLVDVMQELNWKKYDKLGLTDVRYDKDGREIRYIKDWSKRNDHRHHAMDALTIAFTKRSIIQYLNNLNAKSDKSGSIYAIEQKELFRDKRGKLKFIPPMPCNIFRAEAKRHLENVLVSVKAKNKVVTPNINRSKGKNGINKKIQLTPRGQLHNETIYGSMKRYETKWEKIGSGFDERQIAKVANKKFREALLSRLAEFGNDPQKAFTGKNSLEKNPLYVDELHTQKVPEKVKIVTLENLYTIRKEITPDLKIDKVVDAGVRRVLQERLDEFDDDSKKAFSNLDENPIWLNGKKMKRVTIMGVSNAVPLHDKKDYKGNLVFDSKGRKQPVDFVNTGSNHHVAIYRDESGELQDIVVSFYEATTRSTLGIPVIDKEYKKAEGWNFLFSMKQNEYFVFPNEETGFNPKEIDLMNPDNYTTISPNLYRVQKFSKCMYGNSSVREYVFRHHLETSVNDSKGLKNIAYKNVKSLVYLEGIVKVRINHIGQIVSVGEY

SEQ ID NO: 6774 - protein, 1393 aa, synthetic construct
  REGION 1..1393: note = Synthetic
MKRILGLDLGTTSIGWGLVNEGESVEEESGIIKLGVRNNPLSVDEKSNFEKGKAITTNAERTLKHGMRINLQRYKQRRDNLVACLKEHGIINDDTPLFELGNNTTFQTYRARAKAVSEEISLEEFARVLLMINKKRGYKSNRKAKDAEEGELIDGMDVAKELYNKNLTPGQYLMILKESGKSYRPAFYRSDLQNELNRIWDKQKEFHPEILTDEMRKEINGLSSTQCSAAFYNKKNITTAKNSGKDSYSTKLKWRNDCLKKEMDIEQVAYVVCSLCGEINGSSQRLAMISDRSKELYFSGKTIGQYLMALLDENPNTSLTNRIFYRQDYIDEFNAIWECQARYHKELTPELRKKIADNIIFFQRDLKSCKSLISFCELEHSEKEVDVGGKKKKVTIGLHVCPRSSPLFQTFKIWQVLNNIQVSVVGKKRKSVPKDSSLYLFSEREMGATQRFLEQDEKELLFKELSIKSKLKNTEILKMLFDNPERYEINYNEVEGNCTMSAFYSACAEIISQTGNGEYDFNKMRADKVKSLVKEIFSGLGYNTDFLSFNPLLEGKELEQQTSYRLWHLLYSYTGDKSVTGNDALLKKIGELCGLEREYARILANVSFVDDYGSLSAKAMRKVLPYMMEGTEYSMACQYAGYKHSAHSMTKEELEAKQYADHLEIIKRNSLRNPVVEKILNQMVNVVNSLIDTYGKPDEIRIELAREMKQSREERAEQDKNIRKATAEQEKIKKTLETEFGIKNVTRNDILRYRLYEELKMNGYKTLYSNTYIPREDLFTNKFDIEHIIPKAKLFDDSFSNKTLEARDVNIEKSNKTAYDFVAEKYDEKWLADYETRVEELLKQKVISKTKRNKLLMREADIPKDFLNRDLTDSQYIAKKAREMLESIVPNVVTTTGAITKRLREDWKLVDVMKELNWEKYNSLELTETIYDHDNKPIKRIKDWTKRNDNRHHAMDALTIAFTRPAIIQYLNNLNARSDKGGSIYGIEKKYMKRDEHGKLLFIPPIPIEKFREEAKRQLEAILVSTKAKNKVVTKSINKIKTRNGDKKKVQLTPRDQLHNETIYGKIEQYHTEIKKVGGKFTEEVVLRVANKRIREALYARLAEFDYDSKKAFTGKNSLEKNPVWIDEKRLCCVPEEVKLVAMKQVFTIRKLVDKNLNIDKVIDARVREILKQRLEEYGDDAAKAFSNLEENPIWFNKEKGIAIKRVKISGISNGTAIRVKHDVAGELILDEHGKALGNDYVSTSNNHHIAFFTDAEGNLHEHVVSFYEATARAILGYPVIDRYYNNELGWKYSFSIKQNEFFVFPNEAEGFNPCDIDLMDEANAPIISRNLYRVQKFSNRDYYFRHHLETNVEENKALKDVAWKRITCVNNLKGAVKVRINHIGKIVFVGEY

SEQ ID NO: 6775 - protein, 1052 aa, synthetic construct
  REGION 1..1052: note = Synthetic
VKKILGLDLGTNSIGWALVNEAENENEESSIIKLGVRVNPLSVDEKTNFEKGRPLSTNADRTLKRGMRRNLQRYKQRRESLIEILIEYGIIQKDTPLTEAGKNTTHETLSLRAKAAKERIGLEDFAKVLLAINKKRGYKSSRKANNEEEGQAIDGMAVAKKLYDNNITPGQYVLELLFKDKKYIPDFYRSDLKDEFKRIWETQKQYYPDVLTTELYKELDGKNKSQTWAICQKPFQIVGIKRTTKGKEKNIETYQWRAEGLTEKLELEHLAIVLQEINNSINQSSGYLGAISDRSKKLYLNQQTVGENLYAQLVKNPHTSLKNQVFYRQDYLDEFETIWETQSKFHLQLTEDLKKEIGDVIIFYQRKLKSQKALISFCQFESWEQEYKEEESGKIKKRTVGRRVIPKSSHLFQEFKIWQNLNHLVFKNQETNQNIKVKDLEQDLRQGLFDELNMRGDLNPNDLLKILKSEFKIGKLSDWKCNFEKIEGNRTNAALYNIYQKISDFEGYGVDWKKKDARAIKEELASTFPEMGIEATILNFDAEADDFTNQASYQLWHLLYSAEEDDKVSEEDKLIYGNTSVSLKKKLDQKFGFKPEYATMLANMSLVSDYGNLSAKAIRKILPYLKDGHLYSESCGLAGYNHSNSLTAEELSKRALKPTLELLKKNSLRNPVVEKILNQMVNVVNQVIETYGKPDAIRIELARELKKSAKERAKMTKGIADATRRNEEIKKIITQRFGIPNPTKTDVVRYRLWQELEPRGHKDLFTDTYIPPEKIFSSEIDIEHIIPKALLFDDSFSNKTLSYKDINLKKANRTAIDFIKQDFQSEVEAYTARVETMLKGGHISKGKRNKLLMALTDIPDGFIERDLRNSQYIARKAKQMLFEVFPEVMATTGSITDKLREDWDLINVMKELNLPKYRALGLTEFEERLDKGTETLFKHEVIKEWTKRNDHRHHAMDALTVAFTTHNHIQYINNLNARRDTTQDNHPIIKNIANQITEVNSKSKRVFKAPMSSFRESAKEHIEAILVSFKNKNKVVTKNINVTKTKRFQRAL

SEQ ID NO: 6776 - protein, 1432 aa, synthetic construct
  REGION 1..1432: note = Synthetic
MRKILGLDLGTNSIGWALVDEAENKDEISSIVKLGVRVNPLTVDEMQDFEKGKSITTNAVRTLKRSMRRNLQRYKLRRDALVGLLKENGFITDGTVLAEQGNGTTFETYRLRAKAAEEEISLEELARVLLMMNKKRGYKSSRKVKGDEEGALIDGMEVAKKLYDGDLTPGQFCLQLLEEGKRVFPDFYRSDLQEEFDRIWEFQKQFNPESFCDAAKEEVGGKNRSQTWAVLSKYFVWEKEENVWNENEAKTERQVKGCRLVGLKRTVKGEELKKENYRWRVQALTEQLSMEEVAVVLQEINGQISASSGYLGAISDRSKVLYFNRQTVGQYQMAELDKNPNTSLRNMVFYRQDYLDEFNVIWEKQAEYHKELTPELKKEIRDIIVFYQRRLRSQKGLISFCEFENREIIIEKDGKRQAKVVGCRVIPRSHPLFQEFKIWQTLNNIEVFVGEKKGKRKKTDVLPGLFDETEDALTTRGRRFLYQEEKEMLAKELAIKENLKKADVLKLLFENPQELDMNFNQIDGNRTGFAFFSAYSKIIEKYGYEPLDFKQPADEITDQLKAIFTSLNWNADVLFIDLNKENKELERQPYFRLWHLLYSFEGDNTPTGKGKLIGKIMQLCGMGKEYAVELANLSFQDDYGSLSAKAIKKILPYLREGNPYDVACEYAGYRHSKSSLTREEIENRVLKDKLEILPKNSLRNPVVEKILNQMVNVVNAIIDEYGRPDEIRIELARELKKSAKEREELTKVIAKNTREHVDIRKVLQSDFGMINVSRNDIIRYKLYEELKENGYKTLYSYQYIPKEKLFSNEIDIEHIIPQARLFDDSLSNKTLEYKAINIEKGNKTAYDFVKEKYGEDGLQQYLNRCESVYKDNKAKLRKLKMEEHDIPNGFIDRDLRNTQYIAKKALAMLKDISRRVVATTGSITDKLREDWQLVDVMKELNLPKYEALGLVEKFEDRNGRIIKRIKDWTKRNDHRHHAMDALTVAFTKDAFIQYFNNKNAAWTSDSKEHSNIIGIKTRYFESGRALPPMPLGQLRAEAKHHLENLLVSIKAKNKVVTTNVNMIKKKGGAYKKQQLTPRGQLHLETIYGSHKQYVTKMEKVNASFDAEKIATVCKQDYRNALLKRLADFGNDPKKAFTGKNTLGKNPIYVDEAKTISMPDKVQTVELETVYTIRKPVDSDLNVDKVIDTKVRSILKQRLEEYGGDAKKAFANLDENPIWLNKEKGISIKRVTIRGINNAQSLHEKKDKNGKLVLDENGNPIPVDFVNTGNNHHVAVYRKPVLDDKDQVKLDGEGNPMYELDEVVVSFFEAVTRANLGLPIVDKDYRRSEGWQFLFSMKQNEYFVFPNEKTGFNPKEMDLLAPNNYTEISPNLFRVQKIGSNDYTFRHHLETTIQNSMNDLKFITWIRCGKNGINDIVKVRINHIGQIVSIGEY

SEQ ID NO: 6777 - protein, 1427 aa, synthetic construct
  REGION 1..1427: note = Synthetic
MKKNILGLDLGTTSIGFAHIIEGNTPEQSSIVQIGVRVNPLTTDEQTNFEKGKPVSVNADRTLKRGARRNLDRYQDRRKNLIDALLKADVITKDTILAENGKNTTHETWCLRAKSVAEKIEKEELARVFLAINKKRGYKSSRKAKNEDEGQVIDGMAIAKRLYEENLTPGQLAYQLLKEGKKYIPDFYRSDLQAEFDKVWIFQKQFYPEILTDDFYKELQGKGQRATSASFWGKYQFNTAENKGNREEKKLQAYKWRSEAISKQLEKEEVAYVITEINNNLNNSSGYLGAISDRSKELFFNHLTVGQYLYNQLKNNPHTRLKNQVFYRQDYLDEFEAIWQEQAKYHKELKEELKAEIRDIVIFYQRKLKSQKGLVSFCEFESQEKIINGNKKRIGLKVAPKSSPLFQEFKIWQVLNNVLVRKKGSKKRAVKQSDQATLFDEEKEIFVFDLETKQRLFDELNIKGNLKANKIIEFLGYKSAEWEINYSELEGNRTNKALYDAYLKILELEGYDEDLLKLQGKDDINVSELKASASEIKDMVKRIFEVLNINTEILEFNAELDGKAFEQQASYQLWHLLYSYEGDDSKSGNEKLYELLEKKFGFKKEHAQILANVALSDDYGSLSTKAMRKIYPHIKELHYDKACELAGYRHSASSLTKEEIVNRPLKDKLELLKKNSLRNPVVEKILNQLVNVINTIIETNSKKDENGKITEYFKFDEIRIELARELKKNAKERAEMTTNINASKIAHEKIFKLLQTEFGIKNPTRNDIIRYRLYEELKNNGYKDLYTNTYIPREILFSKQVDIEHIIPQSKMFDDSFSNKTVVYRQTNLDKGNQTAYDYIESKFGDDKAEEYKARIEALYQLGIKSKEDGISKAKYQKLLKKESEIGDGFIDRDLRDSQYIAKKARNLLYEICRVVTPTTGSVTDRLREDWNLINIMQELNFEKFKALGLTEMVEKKDGTFKERIVDWSKRNDHRHHAMDALTVAFTKHSHIQYLNYLNARKNENHKLHSNIIGIETAETEVKIDAEGNKKRIFKLPIPNFRQQAKEHLENVLVSHKAKNKVVTKNKNKTKSKNGEKVKIELTPRGQLHKETIYGKYQYYVNKEEKVGTKFDEETINKVSNPLYKKLLLQRLSENGNDPKKAFAGKNALSKTPIYLNEEKTETLPETVKLTWLEEDYSIRKDVTPENFKDEKSIEKVLDKKVKDILKERLKTFGSDAKKAFSDLDKNPIWLNEAKGITIKRVTISGVKNAQFLHYKKDHLGNYILDKNGDKIPVDFVSTGNNHHVAIYRDEKGNLQERVVSLFDAVQLVNAGEPVIDKQYNQGLGWQFLFTMKQNEYFIFPNEKTGFNPKEVDLVDPKNKKEISPNLFRVQKLATGDYWFRHHLETTVDVKAELKDVTYKRCSLVGIKDIVKVRINHLGDIVSVGEY

SEQ ID NO: 6778 - protein, 1412 aa, synthetic construct
  REGION 1..1412: note = Synthetic
MKKIIGLDLGTTSIGWAVVNEAENDSEKSSIERLGVRVNPLTVDERTNFEKGKPITTNADRTLKRSMRRNLQRYKLRRDNLIEVLKREGFITDETVLAEQGNHSTFETYRLRAKAVSEKVSLEELARILLMINKKRGYKSSRKAKNEEEGSLIDGMSIAKELYDNDMTPGQYSLSLLEAGKKSLPDYYRSDLQSEFEKIWVVQKAYYPEQLSDELKDLLIGKNSKQTWAIIADKTVWKEDVKQWNETLAKTEYLIREYKLKGIKREGKRDEQKLENYKWRVAGLRGRLHPEQLAIVFQEINSQIYSSSGYLGAISDRSKELFFNKQTVGQYLMKLLDEDPNTSLVNRVFYRQDYMDEFETIWEKQSEFHPELTHELKREIRDIIIFYQRRLKSQKGLISYCELESWEIDVVRNGKVEKKTIGQRVIPRSSPLFQEFKIWQMLNDVEVSVKDIRIKKRKEGNNLSLFEEQDPSEKLKIYGRRRLTEDEMALVASELSIRSEMKKEDVLKLLFDDWKSLDLNFKRLDGNKTGNALYEAYSNIIELSGHFPINWNHSADEITSYVKEVFDALGWNSNILSFDSSKDLQSQDYYMLWHLLYSYESDNSETGNKSLIDKLVSFCGFDREYAVVLSNVSFLEDYGNLSAKAIGRILPHLKDGNDYYLSCELAGYKHSKSSITKEENEARILKDSLDLLPKNSLRNPVVEKILNQMVNVVNALMQEYGRPDEFRVELARELKKNQREREEMTKSINESTRVNEGIREVLMKEFDLTHVTRNDIVRYKLYEELKDNGYHTLYSNTYIPKEKLFSKDFDIEHIIPRSRLFDDSFSNKTLEVRSINIDKGNQTAYDYVLSKYGETELEEYMNRCKALFPKDSAKLKKLLMTETDIPEGFVERDLRNTQYIAKKALSMLNDVCRRVVATTGSITDELRSDWQLVDVMKELNWEKYKEQGLVDYHSGQDGRIIGKIQDWTKRNDHRHHAMDALTVAFTNPALIQYYNNVNASFNQTSNAYLIKNKYFKDGRAISPIPLNEFRAEAKRHLENILVSIKAKNKVVTRNVNVTKNGKGGTNTKIQLTPRGQLHNETIYGSHQRVFYVEEKVGSSFDKEKISRVSNARYRQALMERLEASLWNPKKAFTGANALSKKPIWINEEKGVQLPENVKVKNEEVIYTIRKPIDESLNIGKVIDPKVRAILEERLKEYGTPKKAFSNLDENPIYLNKEKGITIKRVTISGINTARALREKDGKNGEKAPKDFVSTNNNHHVALFKRPIIDQKGVEGYEFCEVVVPFIEAVARVNLGDPVIDVDYGKDEGWEFMFTMKQNEYFVFPNEKTGFDPHEIDLLNPDNYALISPNLFRVQKFSTKYYVFRHHLETGVKDVEELRDVTWKRITCLDSRLLGIIKVRINHIGRIVSVGEY

SEQ ID NO: 6779 - protein, 914 aa, synthetic construct
  REGION 1..914: note = Synthetic
MKKILGLDLGTNSIGWALVNEAESGEEKSSIVRLGVRVIGYDNFVSTKTGKESKEPEKDFAGGKGISPNAGRTMKRTMRRNLQRYKLRRENLIEILKEYGFISDENILSENGSRTTFETYRLRAKAATEEISLEQLARVLLMINKKRGYRSSRKVKNEDDGQLIDGMEIAQKLYDENLTPGQFCLRLLENGQKTLPDFYHSDLLAEFDKIWAEQKEFYPDILTDKLKENLCGKNGKQTWAICATPFQIVGIKRDVKGEELKKENFVWRVKALSEKMDLESLAVILQEVNAQINNSGGYLGKISDRSKELFFNRQTVGQYQMAVLDKNPNASLKNMVFYRQDYLDEFNTIWETQAKFHKELNDKLKREIRDVVIFYQRKLKSQKGTIVFCEFESRKTEVEVEGKKKIRTVGSRVVPRSSPLFQEFKIWQNLNNIELTDKDSGEMRALTPEEKDTLFQRLQVTEKLRDKEVLSILFDKSAKKYALNYEKLDGNKTRAAIFNVLGDSGLLSFDSNKELDEQPLYKLWHLLYSYEDDNSVTGINRLVNNLKLTFGLSEETAKKLANISFQDDYGSLSAKAIRKILPFLKEGHKYDAACGYAGYRHSASSLTKEEIENKVLKDKLENLPKNYLRNPVVEKILNQMVNVTNGVIDAYGKPDEVRIELARELKKNAKEREQMTTAISESTKKNEEIVKTLQREFGITNPRRKDIIRYKLYMELAANGYKTLYSDTYIAREELFSKNFDVEHIIPQARLFDDSFANKTLEKRDVNIKKGNSTAYDFVKNEYGEDKAKEYLIKIEKLLKDEKISRTKHKHLTWSEKDIPEDFIDRDIRDTQYIAKYAKTMLCDIVKEVVSTTGSITDRLRDDWQLVDVMKELNWDKYKSLGLTEEFTNEDAAESVRLKIGQSEMTIATTQWTL

SEQ ID NO: 6780 - protein, 659 aa, synthetic construct
  REGION 1..659: note = Synthetic
MSHVSRNAIIRYKLYEELKDNGYKTLYSNTYIPKEKLFSKDFDIEHIIPQARLFDDSFSNKTLEVKSINIEKGSKTAYDFVEEKYGEQGLQEYLNRCEVLFRDKKTKLRKLKMQESEIPEGFIDRDLRNTQYIAKKALSMLNEICRRVVATTGAITDELREDWQLVDVMKELNWEKYKVLGLVEYFEDNDGRLIGRIKDWTKRNDHRHHAMDALTVAFTKDVFIQYFNNKNASLKPDTNEAAIRNKYFQNGKAIPPMSLDEFRAEAKKHLNDTLISIKTKNKVVTINLNRTKKKNGINKKQQQTPRGQLHLETVYGSHKQYVVKEEKVNASFDAAKIATVNKPAYRDALLRRLQENGNDSKKAFTGKNSLDKQPVWLDAKQNECVPEKVKTVMLETVYTVRKPIDEKLNVDKVVDARIRKLLQDRIKEYGNAKSAFANLDENPIWLNKEKGITIKRVSVFGISKAQSLHEKKDKDGNFILDKDSRRIPVDFVNTGNNHHVAIYRKPVLDKKGQAVFDENGELKFELEEVVVSFFDAVTRVNLSQPIIDKDYKRSEGWKFLFSMKQNEYFVFPNEKTGFDPKEIDLLNPENYALISPNLFRVQKIASKDYVFRHHLETVVADRKELQEITWKRISSLSILNRIIKVRVNHIGQIVMIGEY

SEQ ID NO: 6781 - protein, 1385 aa, synthetic construct
  REGION 1..1385: note = Synthetic
MNNTNGKMILGLDLGSTSIGWALVLERENQQSEIIRTGVRVIPLSTDEIGNFEKGKAITTNQDRTNSRSARRNLQRYKLRRTELLSILKENGFITDETILSEDGKNSTYETLELRAKAVSQKISKEEFARVLISINKKRGYKSSRKAKNDDEGQLIDGMEVAMKLHEENITPGQYCFDLLQNEKKHLPDFYRSDLQNEFDLIWNFQQQFYSDVLNDILKEKLHGRNKTQTWAICKDPFKIVGIKRETKGLQLKIENYKWRAIATKQKLDFEQLAIVLSDINNDINKSSGYLGDISDRSKELYFNKQTVGQYLFNQIQENCHTRLKGQVFYRKDYEDEFDTIWIEQSKHHAELSNELKTELKDICIFYQRRLKSQKGLKNTCELESKPREIIVDGKLKTRLIGPKVTPKSSPLFQEFRIWQRLNDLEVWNKKERTKWRLDDDSKKLLFEELNVKNKLSKAEILKILFKDFKDLDLNFKDVDGNRTNATLYEAFKQIIEISGHGEHDLGKMTATKIVELIENVFTTIGINTEILKFNTLLEGKELENQAAYQFWHLLYSYEGDNSKTGNDSLIRKLQVKFGFEKEYAQLISKVTFEPDYASLSAKAISKILPHLKDGLDYSQAASLAGYNHSKSLNKEELESRELKDKLEILEKNSLRNPVVEKILNQTIHVVNAIIEEYGKPVEVRLELARELKKSAKEREDATKNINKATIEHEKIKEILKNEFGLTYVSKNDIVRYKLYKELEPNGYKTLYSNEYISAQKLFSKDFDIEHIIPQSRLFDDSFSNKTLELRSINIEKGDRTAYDFVSEKYGESGLKEFEKRVEDLFKNVDGKKGKLTKLLKKSSEIEDGFIDRDLRNSQYIAKKAKDILQDVFRKVTTTTGTITNRLREDWQLVNVLQELNWEKYEKLGLTYYETNREGKKLPRIIDWTKRNDHRHHAMDALTVAFTRPSHVQYLNHLNARKDENSKEFSKVIGIEKKELYKDERNKLRFIPPMELHKFRHEAKNHLENTLISFKAKNKIVTPNKNKIKGSDHAQKVFTPRGQLHLETVYGSIKQYETKDVKVGGNFDQDTICKVAKQNYRVALLKRLEEFDNDPKKAFTGKNSLDKNPIYVNDSKTKTIPDKVKLVSEITIYTIRKPISPELKIDKVVDVKIRRLLEKRLQEFNNDAKKAFTNLDEHPIWLNKEKGIQIKSVTITGISNAVALHDKKDKNGKVVIDQNGNKQAVDFVNTGNNHHVAIYRDEKGNLQEKVVSFYEAVMRINQGLPAIDKAYNRDNGWQFLFTLKQNEYFVFPNEKTGFNPNEIDLLDPSNYSKISPNLFRVQKISTKNYMFAHHLETQAISGETLKSKKMLSTISYYFIQTPSNLKDIIKVRTNHLGKIVCVGEL
